United States Patent Application Publication US 2024/0327476 A1 - sequence listing, part 83

SEQ ID NO: 158636 - DNA, 810 bp, synthetic construct
  misc_feature 1..810: note = Description of Artificial Sequence: Synthetic coding sequence
  source 1..810: mol_type = other DNA
atgtcctggaagaaggccctgcgcatccctgggggcctgcgggtggccaccgtgaccctgatgctggccatgctgagcacccctgtggccgagggccgggacagcccagaagattttgtgtaccagttcaagggcatgtgctacttcaccaatggaacagagcgggtgcggggcgtgacccgctacatctacaaccgggaggagtatgccaggtttgacagtgatgtgggcgtgtacagagctgtgacccccctgggccccccagctgctgagtactggaacagccagaaggaggtgctggagaggaccagggctgagctggacacagtgtgccgccacaactaccagctggagctgcggaccaccctgcagaggagagtgtacccagaggtgacagtgtacccagccaagacccagcccctgcagcaccacaacctgctggtgtgcagcgtgaatggcttctacccaggcagcattgaggtgcgctggttcagaaatggccaggaggagaagacaggagtggtgtccacaggcctcatccagaatggagactggaccttccagaccctggtgatgctggagaccgtgcccaggtctggagaggtgtacacctgccaggtggagcaccccagcctgaccagccccctgactgtggagtggagggcccggtctgagagcgcccagagcaagatgctgtctggagtgggcggctttgtgctgggcctgctcttcctgggcgccggcctcttcatctacttcaggaaccagaagggccacagcggcctgcagcccaccggcttcctgtcctag

SEQ ID NO: 158637 - DNA, 792 bp, synthetic construct
  misc_feature 1..792: note = Description of Artificial Sequence: Synthetic coding sequence
  source 1..792: mol_type = other DNA
atggtgtgcctgaagtttcctgggggcagctgcatggccgccctgactgtgaccctgatggtgctgagcagccccctggccctggccggggacacccggccccgcttcctggagcaggtgaagcatgagtgccacttcttcaacggcacagagcgggtgcgcttcctggaccgctacttctaccaccaggaggagtatgtgcgctttgacagtgatgtgggggagtacagagctgtgacagagctgggccgcccagatgctgagtactggaacagccagaaggacctgctggagcagaggagagctgaggtggacacctactgccgccacaactacggcgtggtggagagcttcaccgtgcagaggagagtgtacccagaggtgacagtgtacccagccaagacccagcccctgcagcaccacaacctgctggtgtgcagcgtgaatggcttctacccaggcagcattgaggtgcgctggttcagaaatggccaggaggagaagacaggagtggtgtccacaggcctcatccagaatggagactggaccttccagaccctggtgatgctggagaccgtgcccaggtctggagaggtgtacacctgccaggtggagcaccccagcctgaccagccccctgactgtggagtggagggcccggtctgagagcgcccagagcaagatgctgagcggcgtgggcggctttgtgctgggcctgctcttcctgggcgccggcctcttcatctacttcaggaaccagaagggccacagcggcctgcagcccaccggctag

SEQ ID NO: 158638 - DNA, 141 bp, synthetic construct
  misc_feature 1..141: note = Description of Artificial Sequence: Synthetic coding sequence
  source 1..141: mol_type = other DNA
cacagcggcctgcagcccactggaaacaccttcagcagcagcctgaggaacagatttggaggccaggcccagcacgcctgcaaccccagcaccctgggcggccggggcggccgcatcatgagaattcctgagctgaagtag

SEQ ID NO: 158639 - DNA, 891 bp, synthetic construct
  misc_feature 1..891: note = Description of Artificial Sequence: Synthetic coding sequence
  source 1..891: mol_type = other DNA
atggtgtgcctgaagtttcctgggggcagctgcatggccgccctgactgtgaccctgatggtgctgagcagccccctggccctggccggggacacccggccccgcttcctggagcaggtgaagcatgagtgccacttcttcaacggcacagagcgggtgcgcttcctggaccgctacttctaccaccaggaggagtatgtgcgctttgacagtgatgtgggggagtacagagctgtgacagagctgggccgcccagatgctgagtactggaacagccagaaggacctgctggagcagaggagagctgaggtggacacctactgccgccacaactacggcgtggtggagagcttcaccgtgcagaggagagtgtacccagaggtgacagtgtacccagccaagacccagcccctgcagcaccacaacctgctggtgtgcagcgtgaatggcttctacccaggcagcattgaggtgcgctggttcagaaatggccaggaggagaagacaggagtggtgtccacaggcctcatccagaatggagactggaccttccagaccctggtgatgctggagaccgtgcccaggtctggagaggtgtacacctgccaggtggagcaccccagcctgaccagccccctgactgtggagtggagggcccggtctgagagcgcccagagcaagatgctgagcggcgtgggcggctttgtgctgggcctgctcttcctgggcgccggcctcttcatctacttcaggaaccagaagggccacagcggcctgcagcccaccggcaacaccttcagcagcagcctgaggaacagatttggaggccaggcccagtggctgacccctgtgatcccagccctgtgggaggccgaggccggggagagctag

SEQ ID NO: 158640 - DNA, 801 bp, synthetic construct
  misc_feature 1..801: note = Description of Artificial Sequence: Synthetic coding sequence
  source 1..801: mol_type = other DNA
atggtgtgcctgaagctgcccggcggcagcagcctggccgccctgactgtgaccctgatggtgctgagcagccggctggcctttgctggggacacccggccccgcttcctggagctgctgaagtctgagtgccacttcttcaacggcacagagcgggtgcgcttcctggagcggcacttccacaaccaggaggagtatgccaggtttgacagtgatgtgggggagtacagagctgtgcgggagctgggccgcccagatgctgagtactggaacagccagaaggacctgctggagcagaagaggggccaggtggacaactactgccgccacaactacggcgtgggggagagcttcaccgtgcagaggagagtgcacccccaggtgacagtgtacccagccaagacccagcccctgcagcaccacaacctgctggtgtgcagcgtgtctggcttctacccaggcagcattgaggtgcgctggttcagaaatggccaggaggagaaggccggcgtggtgtccacaggcctcatccagaatggagactggaccttccagaccctggtgatgctggagaccgtgcccaggtctggagaggtgtacacctgccaggtggagcaccccagcgtgaccagccccctgactgtggagtggagcgcccggtctgagagcgcccagagcaagatgctgagcggcgtgggcggctttgtgctgggcctgctcttcctgggcgccggcctcttcatctacttcaggaaccagaagggccacagcggcctgcagcccaccggcttcctgtcctag

SEQ ID NO: 158641 - DNA, 801 bp, synthetic construct
  misc_feature 1..801: note = Description of Artificial Sequence: Synthetic coding sequence
  source 1..801: mol_type = other DNA
atggtgtgcctgaagctgcccggcggcagcagcctggccgccctgactgtgaccctgatggtgctgagcagccggctggcctttgctggggacacccggccccgcttcctggagctgaggaagtctgagtgccacttcttcaacggcacagagcgggtgcgctacctggaccgctacttccacaaccaggaggagttcctgcgctttgacagtgatgtgggggagtacagagctgtgacagagctgggccggcctgtggccgagagctggaacagccagaaggacctgctggagcagaagaggggccgggtggacaactactgccgccacaactacggcgtgggggagagcttcaccgtgcagaggagagtgcacccccaggtgacagtgtacccagccaagacccagcccctgcagcaccacaacctgctggtgtgcagcgtgtctggcttctacccaggcagcattgaggtgcgctggttcagaaatggccaggaggagaaggccggcgtggtgtccacaggcctcatccagaatggagactggaccttccagaccctggtgatgctggagaccgtgcccaggtctggagaggtgtacacctgccaggtggagcaccccagcgtgaccagcgccctgactgtggagtggagggcccggtctgagagcgcccagagcaagatgctgagcggcgtgggcggctttgtgctgggcctgctcttcctgggcgccggcctcttcatctacttcaggaaccagaagggccacagcggcctgcagcccaccggcttcctgtcctag

SEQ ID NO: 158642 - DNA, 801 bp, synthetic construct; identical to SEQ ID NO: 158640
  misc_feature 1..801: note = Description of Artificial Sequence: Synthetic coding sequence
  source 1..801: mol_type = other DNA

SEQ ID NO: 158643 - DNA, 801 bp, synthetic construct
  misc_feature 1..801: note = Description of Artificial Sequence: Synthetic coding sequence
  source 1..801: mol_type = other DNA
atggtgtgcctgaagctgcccggcggcagctacatggccaagctgactgtgaccctgatggtgctgagcagccccctggccctggccggggacacccggccccgcttcctgcagcaggacaagtatgagtgccacttcttcaacggcacagagcgggtgcgcttcctgcaccgggacatctacaaccaggaggaggacctgcgctttgacagtgatgtgggggagtacagagctgtgacagagctgggccgcccagatgctgagtactggaacagccagaaggacttcctggaggaccggcgggctgctgtggacacctactgccgccacaactacggcgtgggggagagcttcaccgtgcagaggagagtggagcccaaggtgacagtgtacccagcccggacccagaccctgcagcaccacaacctgctggtgtgcagcgtgaatggcttctacccaggcagcattgaggtgcgctggttcaggaacagccaggaggagaaggccggcgtggtgtccacaggcctcatccagaatggagactggaccttccagaccctggtgatgctggagaccgtgcccaggtctggagaggtgtacacctgccaggtggagcaccccagcgtgaccagccccctgactgtggagtggagggcccagagcgagagcgcccagagcaagatgctgagcggcgtgggcggctttgtgctgggcctgctcttcctgggcgccggcctcttcatctacttcaagaaccagaagggccacagcggcctgcaccccaccggcctggtgtcctag

SEQ ID NO: 158644 - DNA, 891 bp, synthetic construct
  misc_feature 1..891: note = Description of Artificial Sequence: Synthetic coding sequence
  source 1..891: mol_type = other DNA
atgggagagctgatggccttcctgctgcccctcatcatcgtgctgatggtgaagcacagcgacagcaggacccacagcctgcgctacttccggctgggcgtgtctgaccccatccatggagtgcctgagttcatctctgtgggctacgtggacagccaccccatcaccacctatgacagcgtgacccggcagaaggagccccgggccccctggatggccgagaacctggccccagaccactgggagcgctacacccagctgctgcggggctggcagcagatgttcaaggtggagctgaagaggctgcagaggcactacaaccacagcgacaacgtggcccacaccatcaagcaggcctgggaggccaaccagcacgagctgctgtaccagaagaactggctggaggaggagtgcatcgcctggctgaagcgcttcctggagtatggcaaggacaccctgcagaggacagagccccccctggtgcgggtgaacaggaaggagaccttccctggggtgacagccctcttctgcaaggcccacggcttctacccacctgagatctacatgacctggatgaagaatggagaggagatcgtgcaggagattgattatggagacatcctgcccagcggagatggcacctaccaggcctgggccagcattgagctggacccccagagcagcaacctgtacagctgccacgtggagcactgcggcgtgcacatggtgctgcaggtgccccaggagagcgagaccatccccctggtgatgaaggctgtgtctggcagcatcgtgctggtgattgtgctggccggcgtgggcgtgctggtgtggaggcggcggccccgggagcagaatggagccatctacctgcccaccccagacagatag

SEQ ID NO: 158645 - DNA, 1026 bp, synthetic construct
  misc_feature 1..1026: note = Description of Artificial Sequence: Synthetic coding sequence
  source 1..1026: mol_type = other DNA
atgggagagctgatggccttcctgctgcccctcatcatcgtgctgatggtgaagcacagcgacagcaggacccacagcctgcgctacttccggctgggcgtgtctgaccccatccatggagtgcctgagttcatctctgtgggctacgtggacagccaccccatcaccacctatgacagcgtgacccggcagaaggagccccgggccccctggatggccgagaacctggccccagaccactgggagcgctacacccagctgctgcggggctggcagcagatgttcaaggtggagctgaagaggctgcagaggcactacaaccacagcggcagccacacctaccagaggatgattggctgtgagctgctggaggatggcagcaccaccggcttcctgcagtatgcctatgatggccaggacttcctgatcttcaacaaggacaccctgtcctggctggccgtggacaacgtggcccacaccatcaagcaggcctgggaggccaaccagcacgagctgctgtaccagaagaactggctggaggaggagtgcatcgcctggctgaagcgcttcctggagtatggcaaggacaccctgcagaggacagagccccccctggtgcgggtgaacaggaaggagaccttccctggggtgacagccctcttctgcaaggcccacggcttctacccacctgagatctacatgacctggatgaagaatggagaggagatcgtgcaggagattgattatggagacatcctgcccagcggagatggcacctaccaggcctgggccagcattgagctggacccccagagcagcaacctgtacagctgccacgtggagcactgcggcgtgcacatggtgctgcaggtgccccaggagagcgagaccatccccctggtgatgaaggctgtgtctggcagcatcgtgctggtgattgtgctggccggcgtgggcgtgctggtgtggaggagaagaccccgggagcagaatggagccatctacctgcccaccccagacagatag

SEQ ID NO: 158646 - DNA, 645 bp, synthetic construct
  misc_feature 1..645: note = Description of Artificial Sequence: Synthetic coding sequence
  source 1..645: mol_type = other DNA
atgggagagctgatggccttcctgctgcccctcatcatcgtgctgatggtgaagcacagcgacagcaggacccacagcctgcgctacttccggctgggcgtgtctgaccccatccatggagtgcctgagttcatctctgtgggctacgtggacagccaccccatcaccacctatgacagcgtgacccggcagaaggagccccgggccccctggatggccgagaacctggccccagaccactgggagcgctacacccagctgctgcggggctggcagcagatgttcaaggtggagctgaagaggctgcagaggcactacaaccacagcggcagccacacctaccagaggatgattggctgtgagctgctggaggatggcagcaccaccggcttcctgcagtatgcctatgatggccaggacttcctgatcttcaacaaggacaccctgtcctggctggccgtggacaacgtggcccacaccatcaagcaggcctgggaggccaaccagcacgagctgctgtaccagaagaactggctggaggaggagtgcatcgcctggctgaagcgcttcctggagtatggcaaggacaccctgcagaggacagagcagaatggagccatctacctgcccaccccagacagatag

SEQ ID NO: 158647 - DNA, 792 bp, synthetic construct
  misc_feature 1..792: note = Description of Artificial Sequence: Synthetic coding sequence
  source 1..792: mol_type = other DNA
atgtgggagctgcggagcgccagcttctggagggccatctttgctgagttctttgccaccctcttctacgtgttcttcggcctgggcagcagcctgcgctgggcccctggccccctgcacgtgctgcaggtggccatggccttcggcctggccctggccaccctggtgcagagcgtgggccacatcagcggggcccacgtgaacccagctgtgacctttgccttcctggtgggcagccagatgagcctgctgcgggccttctgctacatggccgcccagctgctgggcgctgtggccggggctgctgtgctgtacagcgtgaccccacctgctgtgcggggcaacctggccctgaacaccctgcaccctgctgtgtctgtgggccaggccaccaccgtggagatcttcctgaccctgcagtttgtgctgtgcatctttgccacctatgatgagaggagaaatggccagctgggctctgtggccctggccgtgggcttcagcctggccctgggccacctgtttggcatgtactacacaggagctggcatgaacccagcccggagctttgccccagccatcctgactggaaacttcaccaaccactgggtgtactgggtgggccccatcatcggcggcggcctgggcagcctgctgtatgacttcctgctcttcccccggctgaagagcatcagcgagcggctgtctgtgctgaagggggccaagccagatgtgtccaatggccagcctgaggtgactggagagcctgtggagctgaacacccaggccctgtag

SEQ ID NO: 158648 - DNA, 2682 bp, synthetic construct
  misc_feature 1..2682: note = Description of Artificial Sequence: Synthetic coding sequence
  source 1..2682: mol_type = other DNA
atggccacagaggagttcatcatccgcatccccccctaccactacatccacgtgctggaccagaacagcaatgtgtcccgggtggaggtgggccccaagacctacatccggcaggacaatgaaagagtgctgtttgcccccatgaggatggtgacagtgccccccaggcactactgcaccgtggccaaccctgtgtccagagatgcccagggcctggtgctgtttgatgtgacaggccaggtgcggctgcggcatgctgacctggagatccggctggcccaggaccccttccccctgtacccaggagaggtgctggagaaggacatcacccccctgcaggtggtgctgcccaacacagccctgcacctgaaggccctgctggactttgaggacaaggatggagacaaggtggtggccggagatgagtggctgtttgagggccctggcacctacatccccaggaaggaggtggaggtggtggagatcatccaggccaccatcatccggcagaaccaggccctgcggctgcgggccaggaaagaatgctgggacagagatggcaaggagcgggtgactggagaggagtggctggtgaccaccgtgggcgcctacctgcctgctgtgtttgaggaggtgctggacctggtggatgctgtgatcctgacagagaagacagccctgcacctgcgggcccggaggaacttccgggacttccggggcgtgtccagaagaactggagaggagtggctggtgacagtgcaggacacagaggcccacgtgcctgatgtgcatgaggaggtgctgggcgtggtgcccatcaccaccctgggcccccacaactactgcgtcatcctggaccctgtgggcccagatggcaagaaccagctgggccagaagagggtggtgaagggggagaagagcttcttcctgcagcccggggagcagctggagcagggcatccaggatgtgtatgtgctgtctgagcagcagggcctgctgctgcgggccctgcagcccctggaggagggggaggatgaggagaaggtgagccaccaggccggggaccactggctgatccggggccccctggagtatgtgcccagcgccaaggtggaggtggtggaggagcggcaggccatccccctggatgaaaatgaaggcatctacgtgcaggatgtgaagacaggcaaggtgcgggccgtcatcggcagcacctacatgctgacccaggatgaggtgctgtgggagaaggagctgcccccaggagtggaggagctgctgaacaagggccaggaccccctggccgacagaggagagaaggacacagccaagagcctgcagcccctggcccccaggaacaagaccagggtggtgtcctacagagtgccccacaatgctgctgtgcaggtgtatgactaccgggagaagagggcccgggtggtgtttggacctgagctggtgtccctgggccctgaggagcagttcaccgtgctgagcctgtctgctggccggcccaagaggcctcatgcccggcgggccctgtgcctgctgctgggccctgacttcttcacagatgtgatcaccattgaaacagctgaccacgcccggctgcagctgcagctggcctacaactggcactttgaggtgaatgacaggaaggacccccaggagacagccaagctgttctctgtgcctgactttgtgggagatgcctgcaaggccatcgccagccgggtgagaggagctgtggcctctgtgacctttgatgacttccacaagaacagcgcccgcatcatcagaacagctgtgtttggatttgagaccagcgaggccaagggcccagatggcatggccctgccccggccccgggaccaggccgtgttcccccagaatggcctggtggtgtcctctgtggatgtgcagagcgtggagcctgtggaccagaggaccagagatgccctgcagaggtctgtgcagctggccatcgagatcaccaccaacagccaggaggccgccgccaagcatgaggcccagaggctggagcaggaggcccggggccgcctggagcggcagaagatcctggaccagagcgaggccgagaaggccaggaaggagctgctggagctggaggccctgtccatggctgtggagagcactggaacagccaaggccgaggccgagagcagagctgaggccgccagaattgaaggagagggctctgtgctgcaggccaagctgaaggcccaggccctggccattgaaacagaagctgagctgcagagggtgcagaaggtgcgggagctggagctggtgtatgcccgggcccagctggagctggaggtgtccaaggcccagcagctggccgaggtggaggtgaagaagttcaagcagatgacagaggccatcggccccagcaccatccgggacctggccgtggccggccctgagatgcaggtgaagctgctgcagagcctgggcctgaagagcaccctcatcacagatggcagcacccccatcaacctcttcaacacagccttcggcctgctgggcatgggccctgagggccagcccctgggccggcgggtggccagcggccccagccctggagagggcatcagcccccagagcgcccaggccccccaggcccctggggacaaccacgtggtgcctgtgctgaggtag

SEQ ID NO: 158649 - DNA, 2682 bp, synthetic construct; identical to SEQ ID NO: 158648
  misc_feature 1..2682: note = Description of Artificial Sequence: Synthetic coding sequence
  source 1..2682: mol_type = other DNA

SEQ ID NO: 158650 - DNA, 480 bp, synthetic construct
  misc_feature 1..480: note = Description of Artificial Sequence: Synthetic coding sequence
  source 1..480: mol_type = other DNA
atgtgctggaccaggacagccacctgccctgtgtggaggagcggccagaggcccaccagcggccgcaccatgaggggcagcggctttggaggccgccgccacccctacggcaaggacagccctgcccctcctggcagcgctgagctgcccggcctgcagggctctgtgcccccccactggggcggcgtggccggcaacagcgctggccaccggggcccccgggcccgctgcccccggggcggggccggcggctgtgcccaccaccaccctggccccccccagctgctgcgggacagccggccctgcaggacaggctggcaggagagcgctggagctgaggcccggggccagggccgggaggtgttcttccccccagccaggagagctgctggcaccaggcaccctggctgtgtgtgtgctgtgggcgccgccggggctgctgctgagggccctgctgcccctgggggcggcggcggctag

SEQ ID NO: 158651 - DNA, 1251 bp, synthetic construct
  misc_feature 1..1251: note = Description of Artificial Sequence: Synthetic coding sequence
  source 1..1251: mol_type = other DNA
atgagcaccaagcagatcacctgccgctacttcatgcatggagtgtgccgggagggcagccagtgcctcttcagccatgacctggccaacagcaagcccagcaccatctgcaagtactaccagaagggctactgtgcctacggcacccgctgccgctatgaccacacccggcccagcgctgctgctgggggcgctgtgggcaccatggcccacagcgtgcccagccctgccttccacagcccccaccccccatctgaggtgacagccagcatcgtgaagaccaacagccatgagcccgggaagcgggagaagaggaccctggtgctgcgggacaggaacctgagcggcatggccgagaggaagacccagcccagcatggtgagcaaccctggcagctgcagcgacccccagcccagccctgagatgaagccccacagctacctggatgccatccgcagcggcctggatgatgtggaggccagcagcagctacagcaatgagcagcagctgtgcccctatgctgctgctggggagtgccgctttggagatgcctgtgtgtacctgcatggagaggtgtgtgagatctgccgcctgcaggtgctgcacccctttgatcctgagcagaggaaggcccacgagaagatctgcatgctgacctttgagcacgagatggagaaggcctttgccttccaggccagccaggacaaggtgtgcagcatctgcatggaggtgatcctggagaaggccagcgccagcgagcggcgcttcggcatcctgagcaactgcaaccacacctactgcctgagctgcatccggcagtggaggtgtgccaagcagtttgagaaccccatcatcaagagctgcccagagtgcagggtcatcagcgagtttgtgatccccagcgtgtactgggtggaggaccagaacaagaagaatgagctgattgaggccttcaagcagggcatgggcaagaaggcctgcaagtactttgagcagggcaagggcacctgccccttcggcagcaagtgcctgtacagacatgcctacccagatggccgcctggccgagcctgagaagcccaggaagcagctgagcagccagggcaccgtgcgcttcttcaacagcgtgcggctgtgggacttcattgaaaatcgggagagcagacatgtgcccaacaatgaagatgtggacatgacagagctgggggacctcttcatgcacctgtctggagtggagagcagcgagccctag

SEQ ID NO: 158652 - DNA, 1524 bp, synthetic construct
  misc_feature 1..1524: note = Description of Artificial Sequence: Synthetic coding sequence
  source 1..1524: mol_type = other DNA
atggaggagcctgctgcccccagcgaggcccatgaagctgctggggcccaggccggggctgaggccgcccgggagggcgtgtctggccctgacctgcctgtgtgtgagcccagcggggagagcgctgccccagacagcgccctgccccatgctgcccggggctgggcccccttccctgtggcccctgtgcctgcccacctgcggcggggcggcctgcggcctgccccagccagcggcggcggggcctggcccagccccctgcccagccgcagcagcggcatctggaccaagcagatcatctgccgctactacatccacggccagtgcaaggagggggagaactgccgctacagccatgacctgagcggcaggaagatggccacagagggcggcgtgagccccccaggggccagcgctgggggcggccccagcacagctgcccacatcgagccccccacccaggaggtggccgaggcccccccagctgccagcagcctgagcctgcctgtgattggcagcgctgctgagcggggcttctttgaggccgagcgggacaatgctgacagaggagctgctgggggcgccggcgtggagagctgggcagatgccatcgagtttgtgcccggccagccctaccggggccgctgggtggccagcgcccctgaggcccccctgcagagcagcgagacagagaggaagcagatggctgtgggcagcggcctgcgcttctgctactatgccagccggggcgtgtgcttccggggggagagctgcatgtacctgcacggggacatctgtgacatgtgtggcctgcagaccctgcaccccatggatgctgcccagcgggaggagcacatgagggcctgcatcgaggcccacgagaaggacatggagctgagctttgctgtgcagaggggcatggacaaggtgtgtggcatctgcatggaggtggtgtatgagaaggccaaccccaatgacagaagatttggcatcctgagcaactgcaaccacagcttctgcatccgctgcatccgccgctggaggtctgcccggcagtttgagaacagaattgtgaagagctgcccccagtgccgggtgaccagcgagctggtgatccccagcgagttctgggtggaggaggaggaggagaagcagaagctgatccagcagtacaaggaggccatgagcaacaaggcctgccgctactttgctgagggccggggcaactgcccctttggagacacctgcttctacaagcatgagtacccagagggctggggagatgagcccccaggccctgggggcggcagcttcagcgcctactggcaccagctggtggagcctgtgaggatgggagagggcaacatgctgtacaagagcatcaagaaggagctggtggtgctgcggctggccagcctgctcttcaagcgcttcctgagcctgagagatgagctgcccttcagcgaggaccagtgggacctgctgcactatgagctggaggagtacttcaacctgatcctgtag

SEQ ID NO: 158653 - DNA, 462 bp, synthetic construct
  misc_feature 1..462: note = Description of Artificial Sequence: Synthetic coding sequence
  source 1..462: mol_type = other DNA
atggccccagctgctgccactggaggcagcaccctgcccagcggcttctctgtgttcaccaccctgcctgacctgctcttcatctttgagttcatctttggaggcctggtgtggatcctggtggccagcagcctggtgccctggcccctggtgcagggctgggtgatgtttgtgtctgtgttctgctttgtggccaccaccaccctcatcatcctgtacatcattggagcccacggcggggagacctcctgggtgaccctggatgctgcctaccactgcacagctgccctcttctacctgagcgcctctgtgctggaggccctggccaccatcaccatgcaggacggcttcacctaccgccactaccacgagaacattgctgctgtggtgttctcctacatcgccaccctgctgtatgtggtgcatgctgtgttcagcctcatccgctggaagagcagctag

SEQ ID NO: 158654 - DNA, 168 bp, synthetic construct
  misc_feature 1..168: note = Description of Artificial Sequence: Synthetic coding sequence
  source 1..168: mol_type = other DNA
atggccccagctgctgccactggaggcagcaccctgcccagcggcttctctgtgttcaccaccctgcctgacctgctcttcatctttgaatttgtgttctcctacatcgccaccctgctgtatgtggtgcatgctgtgttcagcctcatccgctggaagagcagctag

SEQ ID NO: 158655 - DNA, 336 bp, synthetic construct
  misc_feature 1..336: note = Description of Artificial Sequence: Synthetic coding sequence
  source 1..336: mol_type = other DNA
atggccccagctgctgccactggaggcagcaccctgcccagcggcttctctgtgttcaccaccctgcctgacctgctcttcatctttgagttcatctttggaggcctggtgtggatcctggtggccagcagcctggtgccctggcccctggtgcagggctgggtgatgtttgtgtctgtgttctgctttgtggccaccaccaccctcatcatcctgtacatcattggagcccacggcggggagacctcctgggtgaccctggtgttctcctacatcgccaccctgctgtatgtggtgcatgctgtgttcagcctcatccgctggaagagcagctag

SEQ ID NO: 158656 - DNA, 294 bp, synthetic construct
  misc_feature 1..294: note = Description of Artificial Sequence: Synthetic coding sequence
  source 1..294: mol_type = other DNA
atggccccagctgctgccactggaggcagcaccctgcccagcggcttctctgtgttcaccaccctgcctgacctgctcttcatctttgaatttgatgctgcctaccactgcacagctgccctcttctacctgagcgcctctgtgctggaggccctggccaccatcaccatgcaggacggcttcacctaccgccactaccacgagaacattgctgctgtggtgttctcctacatcgccaccctgctgtatgtggtgcatgctgtgttcagcctcatccgctggaagagcagctag

SEQ ID NO: 158657 - DNA, 462 bp, synthetic construct
  misc_feature 1..462: note = Description of Artificial Sequence: Synthetic coding sequence
  source 1..462: mol_type = other DNA
atggccagcccagaccccccagccaccagctatgcccccagtgatgtgcccagcggcgtggccctcttcctgaccatcccctttgccttcttcctgcctgagctgatcttcggcttcctggtgtggaccatggtggccgccacccacatcgtgtaccccctgctgcagggctgggtgatgtatgtgtccctgaccagcttcctgatcagcctgatgttcctgctgagctacctgtttggcttctacaagagatttgagagctggagggtgctggacagcctgtaccacggcaccaccggcatcctgtacatgtctgctgctgtgctgcaggtgcacgccaccatcgtgtctgagaagctgctggacccccgcatctactacatcaacagcgctgccagcttctttgccttcatcgccaccctgctgtacatcctgcacgccttcagcatctactaccactag

SEQ ID NO: 158658 - DNA, 6216 bp, synthetic construct
  misc_feature 1..6216: note = Description of Artificial Sequence: Synthetic coding sequence
  source 1..6216: mol_type = other DNA
atggagctggcccacagcctgctgctgaatgaggaggccctggcccagatcacagaggccaagaggcctgtgttcatctttgagtggctgcgcttcctggacaaggtgctggtggccgccaacaagacagatgtgaaggagaagcagaagaagctggtggagcagctgaccggcctcatcagcagcagccctggcccccccaccaggaagctgctggccaagaacctggccgccctgtacagcatcggggacaccttcaccgtcttccagaccctggacaagtgcaatgacatcatccggaacaaggatgacacagctgcctacctgcccaccaagctggccgctgtggcctgtgtgggcgccttctatgagaagatgggccgcatgctgggcagcgccttccctgagaccgtgaacaacctgctgaagagcctgaagtctgctgagagccagggccgctctgagatcctgatgagcctgcagaaggtgctgagcggcctgggcggcgctgctgccagcagccaccgggacatctacaagaatgcccggagcctgctgacagaccgctccatggctgtgcgctgtgctgtggccaagtgcctgctggagctgcagaatgaggccgtgttcatgtggacagctgagctggagaacatcgccaccctgtgcttcaaggccctggagaacagcaactacggcgtgcgggtggccgtgtccaagctgctgggcaccgtgatggccacagccctgatgcccaagcaggccaccgtgatgaggcagaatgtgaagagggccacctttgatgaggtgctggagctgatggccaccggcttcctgcggggcggcagcggcttcctgaagagcggcggggagatgctgaaggtgggcggctctgtgaaccgggaggtgcgggtgggcgtgacccaggcctacgtggtgtttgtgaccaccctgggcggccagtggctggagaggagctttgccaccttcctgagccacgtgctggacctggtgagccacccccgggccacccagacccacgtggaggccgtgtacagccgccgctgtgtgtccttcatcctgcgggccaccgtgggcagcctgctgggggagaaggcccagattgctgctgccaaggagatctgccaggccatcggcaagcagatgaaggctgtggaggccgtggtgaatgacaccagcggggagaacaagtctggagctgctgacattgctgccagccagcacgtgatggtgtgtgccctgcaggagctgggcagcctggtgcagagcctgaatgccacagccagccccctcatccaggaggccagcatcggcctgctggagatcgtgacctctgtgctgctgcaccccagcatggccgcccggctggccgccgcctggtgcctgcgctgtgtggccgtggccctgcccttccagctgacccccttcctggacagatgtgccgagcggctgaacaacctgaagaccagccctgaggccgtgtctggctacagctttgccatggccgccctgctgggcggcgtgcaccagtgccccctgggcatcccccacgccaagggcaagatggtggtgtccattgctgaggacctgctgaggacagctgcccagaacagccggctgagcctgcagaggacccaggccggctggctgctgctgggcgccctgatgaccctgggccccagcgtggtgcgctaccacctgcccaagatgctgctgctgtggagaaatgtgttccccaggagcctgaaggagctggaggccgagaaggcccggggggacagcttcacctggcaggtgaccctggagggccgggccggggccctgtgtgccatgaggagctttgtggcccactgcccagagctgctgacagaagatgtgatcaggaagctgatgacccccattgaatgtgccatgaccatgatgagccacatccccagcgtgatgaaggcccacggggcccacctgaaggccagcgctgccatggtgcggctgcggctgtatgacatcctggccctgctgccccccaagacctatgagggcagcttcaatgccctgctgcgggagctggtggccgagttcaccctgacagacaacagcgccaacaccaccaccagcctgctgcggagcctgtgccactatgatgattctgtgctgctgggctcctggctgcaggagacagaccacaagagcattgaggaccagctgcagcccaacagcgccagcggcagcggggccctggagcatgaccccagcagcatctacctgcgcatcccagctggggaggccgtgcccggccccctgcccctgggcgtgtctgtgattgatgcctctgtggccctgtttggagtggtgttcccccacgtgtcctacaagcaccggctgcagatgctggaccactttgctgaatgtgtgaagcaggccaagggcgtgcggcagcaggccgtgcagctgaacatcttcaccgctgtgctgagcgccctgaagggcctggccgagaacaagagcaccctgggccctgaggaggtgaggaagagcgccctgaccctggtgatgggccccctggacaaccccaaccccatcctgcgctgtgccgccggggaggccctgggccgcatggcccaggtggtgggggaggccaccttcatcgccaggatggcccagtacagctttgacaagctgaagagcgccagagatgtggtgtccaggacaggccacagcctggccctgggctgcctgcaccgctacgtgggcggcatcggcagcggccagcacctgaagacctctgtgtccatcctgctggccctggcccaggacggcaccagccctgaggtgcagacctggagcctgcacagcctggccctgattgtggacagcagcggccccatgtaccggggctacgtggagcccaccctgagcctggtgctgaccctgctgctgactgtgccccccagccacacagaggtgcaccagtgcctgggccgctgcctgggcgccatcatcaccaccgtgggccctgagctgcagggcaatggagccaccaccagcaccatccgcagcagctgcctggtgggctgtgccatcacccaggaccacagcgacagcctggtgcaggccgccgccatcagctgcctgcagcagctgcacatgtttgcccccaggcatgtgaacctgagcagcctggtgcccagcctgtgtgtgcacctgtgcagcagccacctgctgctgcggcgggctgctgtggcctgcctgcggcagctggcccagcgggaggccgctgaggtgtgtgaatatgccatgagcctggccaagaacacaggagacaaggagagcagcagcgccaacgtgagcccctttgcccctggggtgagcagcaggacagacatccactgccgccaccagggcgtgaacatcacagaaacaggcctggagggcctgctgtttggcatgctggaccgggagacagacaggaagctgtgcagcgacatccatgacaccctgggccacatgctgagcagcctggccgtggagaagctgagccactggctgatgctgtgcaaggatgtgctggccgccagcagtgacatgagcacagccaccctgctgagcagcggcaaggatgaggaggccgagaagaaggatgagatggatgatgacaccatgttcaccaccctgggggaggaggacaagagcaagccctttgtggccccccgctgggccaccagggtgtttgctgctgactgcctgtgccgcatcatcaacctgtgtgaaaatgctgaccaggcccactttgacctggccctggcccggagcgccaagctgaggaaccccaccaatgacctgctggtgctgcacctgagtgacctgatccgcatggccttcatggccgccacagaccacagcaaccagctgaggatggccggcctgcaggccctggaggacatcatcaagaagtttgcctctgtgcctgagcctgagttccctggccacgtgatcctggagcagtaccaggccaacgtgggcgccgccctgcggcctgccttcagccaggacacccccagcgacatcatcgccaaggcctgccaggtgtgcagcacctggattggcagcggcgtggtgtctgacctgaatgacctgcggcgggtgcacaacctgctggtgagcagcctggacaaggtgcaggccggcaagggcagcagcagccagctgtaccgggagagcgccaccaccatggagaagctggccgtgctgaaggcctgggccgaggtgtatgtggtggccatgaacatcaagaaggaggccgagagcaagcccaagagggccatcaagaacacagatgatgatgatgatgactgtggcaccattgatgagctgcccccagacagcctcatcaccctggtgcagcctgagctgcccaccctgagccggctgtggctggccgccctgaaggactatgccctgctgaccctgcctgctgagttcagcagccagctgcccccagatggaggagccttctacaccccagagaccatcgacacagcccggctgcactacagaaattcctgggcccccatcctgcatgctgtggccctgtggctgaacagcacaggcttcacctgcagcgagagcacagaggccgccgccatcagcggcctgcagaagaggagcacctctgtgaacctgaaccaggccagcggggctgtgggcagcgccaagagcctgcctgagatcaacaaggacaggatgcacctgatcctgggcgtgtccatccagttcctgtgcagccccaggcctgaggagcccatcgagcacgtgacagcctgcctgcaggccctgcacaccctgctggacagcccctatgcccgggtgcacatcgccgaggaccagctgattggagtggagctgctgtctgtgctgcaccggctgctgctgacctggaaccccagctctgtgcagctgctggtgactggagtggtgcagcagatcgtgcgggccgcccaggactacctgcaggagaagaggaacaccctgaatgaagatgacatggagaaggaggcctgcaccgtgctgggggagggcggggacagcggcggcctcatccctgggaagagcctggtgtttgccaccatggagctgctgatgttcatcctggtgcgccacatgccccacctgagcaccaaggtgtctgacagccccagccacatcgccaccaagacccggctgtctgaggagagcgcccggctggtggccgccaccgtgaccatcctgagtgacctgcccagcctgtgcagccctgctggctgcatgaccatcctgcccaccatcctcttcctgattgcccgcatcctgaaggacacagccatcaagtctgctgacaaccaggtgcccccacctgtgtctgctgccctgcagggcatcaagagcatcgtgaccctgtccatggccaagacagaagctggggtgcagaagcagtggacagccctgatccgcagcaccctggcctgcatcctggagtacagccagccagaagattctgtgcccaccccagatgaggtgtccatgctgacagccatcgccctcttcctgtggagcgccagcaatgagatcatcggcgtgcagagcctgcagaatggctgcatgaaccgcttcaagaatgccctgaacagctgtgacccctgggtgcaggccaagtgctaccagctgctgctgagcgtcttccagcacagcaacagagccctgagcaccccctacatccacagcctggcccccatcgtggtggagaagctgaaggctgtggagaggaacagacctgccagcaacatcgagctgctggccgtgcaggagggcatcaaggtgctggagaccctggtggccctgggggaggagcagaacagagtgcagctgctggccctgctggtgcccaccctcatctcctacctgctggatgaaaattcctttgccagcgccagcagcgccagcaaggacctgcatgaatttgccctgcagaacctgatgcacatcggccccctgtacccccacgccttcaagacagtgatgggcgccgcccctgagctgaaggtgcggctggagacagctgtgcgggccagccaggccagcaaggccaaggccgccgcccggcagcctgccccagccatccacagcgcccccaccatcaagctgaagaccagcttcttctag

SEQ ID NO: 158659 - DNA, 1005 bp, synthetic construct
  misc_feature 1..1005: note = Description of Artificial Sequence: Synthetic coding sequence
  source 1..1005: mol_type = other DNA
atgtctgagcccatccgggtgctggtgactggagctgctggccagatcgcctacagcctgctgtacagcattggaaatggatctgtgtttgggaaggaccagcccatcatcctggtgctgctggacatcacccccatgatgggcgtgctggatggagtgctgatggagctgcaggactgtgccctgcccctgctgaaggatgtgattgccacagacaaggaggatgtggccttcaaggacctggatgtggccatcctggtgggctccatgccccggcgggagggcatggagaggaaggacctgctgaaggccaacgtgaagatcttcaagagccagggcgccgccctggacaagtatgccaagaagtctgtgaaggtgattgtggtgggcaacccagccaacaccaactgcctgacagccagcaagagcgcccccagcatccccaaggagaacttcagctgcctgacccggctggaccacaacagagccaaggcccagatcgccctgaagctgggcgtgacagccaatgatgtgaagaatgtcatcatctggggcaaccacagcagcacccagtacccagatgtgaaccacgccaaggtgaagctgcagggcaaggaggtgggcgtgtatgaggccctgaaggatgacagctggctgaagggggagtttgtgaccaccgtgcagcagagaggagctgctgtgatcaaggccaggaagctgagcagcgccatgtctgctgccaaggccatctgtgaccacgtgcgggacatctggtttggcaccccagagggggagtttgtgtccatgggcgtcatcagtgatggcaacagctatggagtgcctgatgacctgctgtacagcttccctgtggtgatcaagaacaagacctggaagtttgtggagggcctgcccatcaatgacttcagccgggagaagatggacctgacagccaaggagctgacagaggagaaggagagcgcctttgagttcctgagcagcgcctag

SEQ ID NO: 158660 - DNA, 1059 bp, synthetic construct
  misc_feature 1..1059: note = Description of Artificial Sequence: Synthetic coding sequence
  source 1..1059: mol_type = other DNA
atgaggcgctgcagctacttccccaaggatgtgacagtgtttgacaaggatgacaagtctgagcccatccgggtgctggtgactggagctgctggccagatcgcctacagcctgctgtacagcattggaaatggatctgtgtttgggaaggaccagcccatcatcctggtgctgctggacatcacccccatgatgggcgtgctggatggagtgctgatggagctgcaggactgtgccctgcccctgctgaaggatgtgattgccacagacaaggaggatgtggccttcaaggacctggatgtggccatcctggtgggctccatgccccggcgggagggcatggagaggaaggacctgctgaaggccaacgtgaagatcttcaagagccagggcgccgccctggacaagtatgccaagaagtctgtgaaggtgattgtggtgggcaacccagccaacaccaactgcctgacagccagcaagagcgcccccagcatccccaaggagaacttcagctgcctgacccggctggaccacaacagagccaaggcccagatcgccctgaagctgggcgtgacagccaatgatgtgaagaatgtcatcatctggggcaaccacagcagcacccagtacccagatgtgaaccacgccaaggtgaagctgcagggcaaggaggtgggcgtgtatgaggccctgaaggatgacagctggctgaagggggagtttgtgaccaccgtgcagcagagaggagctgctgtgatcaaggccaggaagctgagcagcgccatgtctgctgccaaggccatctgtgaccacgtgcgggacatctggtttggcaccccagagggggagtttgtgtccatgggcgtcatcagtgatggcaacagctatggagtgcctgatgacctgctgtacagcttccctgtggtgatcaagaacaagacctggaagtttgtggagggcctgcccatcaatgacttcagccgggagaagatggacctgacagccaaggagctgacagaggagaaggagagcgcctttgagttcctgagcagcgcctag

SEQ ID NO: 158661 - DNA, 738 bp, synthetic construct
  misc_feature 1..738: note = Description of Artificial Sequence: Synthetic coding sequence
  source 1..738: mol_type = other DNA
atgccccggcgggagggcatggagaggaaggacctgctgaaggccaacgtgaagatcttcaagagccagggcgccgccctggacaagtatgccaagaagtctgtgaaggtgattgtggtgggcaacccagccaacaccaactgcctgacagccagcaagagcgcccccagcatccccaaggagaacttcagctgcctgacccggctggaccacaacagagccaaggcccagatcgccctgaagctgggcgtgacagccaatgatgtgaagaatgtcatcatctggggcaaccacagcagcacccagtacccagatgtgaaccacgccaaggtgaagctgcagggcaaggaggtgggcgtgtatgaggccctgaaggatgacagctggctgaagggggagtttgtgaccaccgtgcagcagagaggagctgctgtgatcaaggccaggaagctgagcagcgccatgtctgctgccaaggccatctgtgaccacgtgcgggacatctggtttggcaccccagagggggagtttgtgtccatgggcgtcatcagtgatggcaacagctatggagtgcctgatgacctgctgtacagcttccctgtggtgatcaagaacaagacctggaagtttgtggagggcctgcccatcaatgacttcagccgggagaagatggacctgacagccaaggagctgacagaggagaaggagagcgcctttgagttcctgagcagcgcctag

SEQ ID NO: 158662 - DNA, 1017 bp, synthetic construct
  misc_feature 1..1017: note = Description of Artificial Sequence: Synthetic coding sequence
  source 1..1017: mol_type = other DNA
atgctgagcgccctggcccggcctgccagcgctgccctgcggcgctccttcagcaccagcgcccagaacaatgccaaggtggccgtgctgggcgccagcggcggcatcggccagcccctgagcctgctgctgaagaacagccccctggtgtcccggctgaccctgtatgacatcgcccacaccccaggagtggccgctgacctgagccacatcgagaccaaggctgctgtgaagggctacctgggccctgagcagctgcctgactgcctgaagggctgtgatgtggtggtgatcccagctggggtgcccaggaagccaggcatgaccagagatgacctcttcaacaccaatgccaccatcgtggccaccctgacagctgcctgtgcccagcactgcccagaggccatgatctgtgtgattgccaaccctgtgaacagcaccatccccatcacagctgaggtgttcaagaagcacggcgtgtacaaccccaacaagatctttggagtgaccaccctggacatcgtgcgggccaacacctttgtggccgagctgaagggcctggaccctgcccgggtgaatgtgcctgtgattggaggccatgctgggaagaccatcatccccctcatcagccagtgcacccccaaggtggacttcccccaggaccagctgacagccctgaccggccgcatccaggaggccggcacagaggtggtgaaggccaaggccggggccggcagcgccaccctgtccatggcctatgctggggccaggtttgtgttcagcctggtggatgccatgaatggcaaggagggcgtggtggagtgcagctttgtgaagagccaggagacagagtgcacctacttcagcacccccctgctgctgggcaagaagggcatcgagaagaacctgggcatcggcaaggtgagcagctttgaggagaagatgatcagtgatgccatccctgagctgaaggccagcatcaagaagggagaagattttgtgaagaccctgaagtag

SEQ ID NO: 158663 - DNA, 1872 bp, synthetic construct
  misc_feature 1..1872: note = Description of Artificial Sequence: Synthetic coding sequence
  source 1..1872: mol_type = other DNA
atgaaccgctacaccaccatgaggcagctgggagatggcacctacggctctgtgctgatgggcaagagcaatgaaagtggagagctggtggccatcaagaggatgaagaggaagttctacagctgggatgagtgcatgaacctgcgggaggtgaagagcctgaagaagctgaaccacgccaacgtcatcaagctgaaggaggtgatcagagaaaatgaccacctgtacttcatctttgagtacatgaaggagaacctgtaccagctgatgaaggacaggaacaagctgtttcctgagagcgtcatccggaacatcatgtaccagatcctgcagggcctggccttcatccacaagcacggcttcttccaccgggacatgaagccagagaacctgctgtgcatgggccctgagctggtgaagattgctgactttggcctggcccgggagctgcggagccagcccccctacacagattatgtgtccacccgctggtaccgggcccctgaggtgctgctgcggagctctgtgtacagcagccccattgatgtgtgggccgtgggcagcatcatggccgagctgtacatgctgcggcccctcttccctggcaccagcgaggtggatgagatcttcaagatctgccaggtgctgggcacccccaagaagagtgactggccagagggctaccagctggccagctccatgaacttccgcttcccccagtgtgtgcccatcaacctgaagaccctcatccccaatgccagcaatgaggccatccagctgatgacagagatgctgaactgggaccccaagaagaggcccacagccagccaggccctgaagcacccctacttccaggtgggccaggtgctgggccccagcagcaaccacctggagagcaagcagagcctgaacaagcagctgcagcccctggagagcaagcccagcctggtggaggtggagcccaagcccctgcctgacatcatcgaccaggtggtgggccagccccagcccaagaccagccagcagcccctgcagcccatccagcccccccagaacctgtctgtgcagcagccccccaagcagcagagccaggagaagccaccccagaccctcttccccagcatcgtgaagaacatgcccaccaagcccaacggcaccctgagccacaagtctggaagaagacgctggggccagaccatcttcaagagcggggacagctgggaggagctggaggactatgactttggagccagccacagcaagaagcccagcatgggcgtcttcaaggagaagaggaagaaggacagccccttccggctgcctgagcctgtgcccagcggcagcaaccacagcactggagagaacaagagcctgcctgctgtgaccagcctgaagagtgacagcgagctgagcacagcccccaccagcaagcagtactacctgaagcagagccgctacctgcccggggtgaaccccaagaaggtgtccctcatcgccagcggcaaggagatcaacccccacacctggagcaaccagctgttccccaagagcctgggccctgtgggcgctgagctggccttcaagaggagcaatgccggcaacctgggcagctatgccacctacaaccagagcggctacatccccagcttcctgaagaaggaggtgcagagcgctggccagaggatccacctggcccccctgaatgccacagccagcgagtacacctggaacaccaagacaggccggggccagttcagcggccgcacctacaaccccacagccaagaacctgaacatcgtgaacagagcccagcccatccccagcgtgcacggccgcacagactgggtggccaagtatggaggccacaggtag

SEQ ID NO: 158664 - DNA, 1872 bp, synthetic construct; identical to SEQ ID NO: 158663
  misc_feature 1..1872: note = Description of Artificial Sequence: Synthetic coding sequence
  source 1..1872: mol_type = other DNA

SEQ ID NO: 158665 - DNA, 867 bp, synthetic construct
  misc_feature 1..867: note = Description of Artificial Sequence: Synthetic coding sequence
  source 1..867: mol_type = other DNA
atgaaccgctacaccaccatgaggcagctgggagatggcacctacggctctgtgctgatgggcaagagcaatgaaagtggagagctggtggccatcaagaggatgaagaggaagttctacagctgggatgagtgcatgaacctgcgggaggtgaagagcctgaagaagctgaaccacgccaacgtcatcaagctgaaggaggtgatcagagaaaatgaccacctgtacttcatctttgagtacatgaaggagaacctgtaccagctgatgaaggacaggaacaagctgtttcctgagagcgtcatccggaacatcatgtaccagatcctgcagggcctggccttcatccacaagcacggcttcttccaccgggacatgaagccagagaacctgctgtgcatgggccctgagctggtgaagattgctgactttggcctggcccgggagctgcggagccagcccccctacacagattatgtgtccacccgctggtaccgggcccctgaggtgctgctgcggagctctgtgtacagcagccccattgatgtgtgggccgtgggcagcatcatggccgagctgtacatgctgcggcccctcttccctggcaccagcgaggtggatgagatcttcaagatctgccaggtgctgggcacccccaagaagagtgactggccagagggctaccagctggccagctccatgaacttccgcttcccccagtgtgtgcccatcaacctgaagaccctcatccccaatgccagcaatgaggccatccagctgatgacagagatgctgaactgggaccccaagaagaggcccacagccagccagccctgcttcctggtggaggtggagcggcccaactag

SEQ ID NO: 158666 - DNA, 1374 bp, synthetic construct
  misc_feature 1..1374: note = Description of Artificial Sequence: Synthetic coding sequence
  source 1..1374: mol_type = other DNA
atgaaccgctacaccaccatgaggcagctgggagatggcacctacggctctgtgctgatgggcaagagcaatgaaagtggagagctggtggccatcaagaggatgaagaggaagttctacagctgggatgagtgcatgaacctgcgggaggtgaagagcctgaagaagctgaaccacgccaacgtcatcaagctgaaggaggtgatcagagaaaatgaccacctgtacttcatctttgagtacatgaaggagaacctgtaccagctgatgaaggacaggaacaagctgtttcctgagagcgtcatccggaacatcatgtaccagatcctgcagggcctggccttcatccacaagcacggcttcttccaccgggacatgaagccagagaacctgctgtgcatgggccctgagctggtgaagattgctgactttggcctggcccgggagctgcggagccagcccccctacacagattatgtgtccacccgctggtaccgggcccctgaggtgctgctgcggagctctgtgtacagcagccccattgatgtgtgggccgtgggcagcatcatggccgagctgtacatgctgcggcccctcttccctggcaccagcgaggtggatgagatcttcaagatctgccaggtgctgggcacccccaagaagagtgactggccagagggctaccagctggccagctccatgaacttccgcttcccccagtgtgtgcccatcaacctgaagaccctcatccccaatgccagcaatgaggccatccagctgatgacagagatgctgaactgggaccccaagaagaggcccacagccagccaggccctgaagcacccctacttccaggtgggccaggtgctgggccccagcagcaaccacctggagagcaagcagagcctgaacaagcagctgcagcccctggagagcaagcccagcctggtggaggtggagcccaagcccctgcctgacatcatcgaccaggtggtgggccagccccagcccaagaccagccagcagcccctgcagcccatccagcccccccagaacctgtctgtgcagcagccccccaagcagcagagccaggagaagccaccccagaccctcttccccagcatcgtgaagaacatgcccaccaagcccaacggcaccctgagccacaagtctggaagaagacgctggggccagaccatcttcaagagcggggacagctgggaggagctggaggactatgactttggagccagccacagcaagaagcccagcatgggcgtcttcaaggagaagaggaagaaggacagccccttccggcagcaggtgaagatggctgtgatcagcctgagcgcccaccagttccccaccctgtag

SEQ ID NO: 158667 - DNA, 942 bp, synthetic construct
  misc_feature 1..942: note = Description of Artificial Sequence: Synthetic coding sequence
  source 1..942: mol_type = other DNA
atggaggagatgtctggagagagcgtggtgagcagcgctgtgcctgctgctgccaccaggaccaccagcttcaagggcaccagccccagcagcaaatatgtgaagctgaatgtgggcggggccctgtactacaccaccatgcagaccctgaccaagcaggacaccatgctgaaggccatgttcagcggccgcatggaggtgctgacagattctgagggctggatcctgattgacagatgtgggaagcacttcggcaccatcctgaactacctgagagatggagctgtgcccctgcctgagagccggcgggagattgaggagctgctggccgaggccaagtactacctggtgcagggcctggtggaggagtgccaggccgccctgcagaacaaggacacctatgagcccttctgcaaggtgcctgtgatcaccagcagcaaggaggagcagaagctgattgccaccagcaacaagccagctgtgaagctgctgtacaacagaagcaacaacaagtacagctacaccagcaacagtgatgacaacatgctgaagaacatcgagctgtttgacaagctgagcctgcgcttcaacggccgggtgctcttcatcaaggatgtgattggagatgagatctgctgctggagcttctacggccagggcaggaagattgctgaggtgtgctgcaccagcatcgtgtatgccacagagaagaagcagaccaaggtggagttccctgaggcccgcatctatgaggagaccctgaacatcctgctgtatgaggcccaggacggccggggccctgacaatgccctgctggaggccactggaggagctgctggccgcagccaccacctggatgaagatgaggagcgggagcgcatcgagcgggtgcggcgcatccacatcaagaggccagatgaccgggcccacctgcaccagtag

SEQ ID NO: 158668 - DNA, 558 bp, synthetic construct
  misc_feature 1..558: note = Description of Artificial Sequence: Synthetic coding sequence
  source 1..558: mol_type = other DNA
atgggccctgagcggcacctgagcggggccccagccaggatggccaccgtggtgctgggcggggacaccatgggccctgagcgcatcttccccaaccagacagaggagctgggccaccagggccccagcgagggcaccggggactggagcagcgaggagcctgaggaggagcaggaggagactggaagtggccctgctggctacagctaccagcccctgaaccaggaccctgagcaggaggaggtggagctggcccctgtgggagatggagatgtggtggccgacatccaggaccgcatccaggccctgggcctgcacctgcctgacccccccctggagagtgaagatgaagatgaggagggcgccacagccctgaacaaccacagcagcatccccatggaccctgagcacgtggagctggtgaagaggaccatggccggcgtgtccctgcctgcccctggggtgcctgcctgggcccgggagatcagtgatgcccagtgggaggatgtggtgcagaaggccctgcaggcccggcaggccagccctgcctggaagtag

SEQ ID NO: 158669 - DNA, 1719 bp, synthetic construct
  misc_feature 1..1719: note = Description of Artificial Sequence: Synthetic coding sequence
  source 1..1719: mol_type = other DNA
atggagcctgaggccccccggcggcggcacacccaccagaggggctacctgctgaccaggaacccccacctgaacaaggacctggccttcaccctggaggagcggcagcagctgaacatccacggcctgctgcccccatccttcaacagccaggagatccaggtgctgcgggtggtgaagaactttgagcacctgaacagcgactttgaccgctacctgctgctgatggacctgcaggacagaaatgagaagctgttctacagagtgctgaccagtgacatcgagaagttcatgcccatcgtgtacacccccaccgtgggcctggcctgccagcagtacagcctggtgttcaggaagccccggggcctcttcatcaccatccatgaccggggccacatcgcctctgtgctgaatgcctggccagaagatgtgatcaaggccatcgtggtgacagatggagagcgcatcctgggcctgggggacctgggctgcaatggcatgggcatccctgtgggcaagctggccctgtacacagcctgtggcggcatgaacccccaggagtgcctgcccgtcatcctggatgtgggcacagaaaatgaggagctgctgaaggaccccctgtacatcggcctgcggcagaggagagtgcggggctctgaatatgatgacttcctggatgagttcatggaggccgtgagcagcaaatatggcatgaactgcctgatccagtttgaagattttgccaacgtgaatgccttccggctgctgaacaagtacagaaaccagtactgcaccttcaatgatgacatccagggcacagcctctgtggccgtggccggcctgctggccgccctgcgcatcaccaagaacaagctgagtgaccagaccatcctcttccagggcgctggggaggccgccctgggcatcgcccacctgattgtgatggccctggagaaggagggcctgcccaaggagaaggccatcaagaagatctggctggtggacagcaagggcctcatcgtgaagggccgggccagcctgacccaggagaaggagaagtttgcccacgagcacgaggagatgaagaacctggaggccatcgtgcaggagatcaagcccacagccctgattggagtggccgccatcggcggggccttcagcgagcagatcctgaaggacatggccgccttcaatgaaagacccatcatctttgccctgagcaaccccaccagcaaggccgagtgcagcgctgagcagtgctacaagatcaccaagggccgggccatctttgccagcggcagcccctttgatcctgtgaccctgcccaacggccagaccctgtacccaggccagggcaacaacagctatgtgtttcctggggtggccctgggcgtggtggcctgtggcctgcggcagatcacagacaacatcttcctgaccacagctgaggtgattgcccagcaggtgtctgacaagcacctggaggagggccgcctgtacccacccctgaacaccatcagagatgtgtccctgaagattgctgagaagatcgtgaaggatgcctaccaggagaagacagccaccgtgtacccagagccccagaacaaggaggcctttgtgcgcagccagatgtacagcacagattatgaccagatcctgcctgactgctacagctggccagaggaggtgcagaagatccagaccaaggtggaccagtag

SEQ ID NO: 158670 - DNA, 699 bp, synthetic construct
  misc_feature 1..699: note = Description of Artificial Sequence: Synthetic coding sequence
  source 1..699: mol_type = other DNA
gtgaagggccgggccagcctgacccaggagaaggagaagtttgcccacgagcacgaggagatgaagaacctggaggccatcgtgcaggagatcaagcccacagccctgattggagtggccgccatcggcggggccttcagcgagcagatcctgaaggacatggccgccttcaatgaaagacccatcatctttgccctgagcaaccccaccagcaaggccgagtgcagcgctgagcagtgctacaagatcaccaagggccgggccatctttgccagcggcagcccctttgatcctgtgaccctgcccaacggccagaccctgtacccaggccagggcaacaacagctatgtgtttcctggggtggccctgggcgtggtggcctgtggcctgcggcagatcacagacaacatcttcctgaccacagctgaggtgattgcccagcaggtgtctgacaagcacctggaggagggccgcctgtacccacccctgaacaccatcagagatgtgtccctgaagattgctgagaagatcgtgaaggatgcctaccaggagaagacagccaccgtgtacccagagccccagaacaaggaggcctttgtgcgcagccagatgtacagcacagattatgaccagatcctgcctgactgctacagctggccagaggaggtgcagaagatccagaccaaggtggaccagtag

SEQ ID NO: 158671 - DNA, 1221 bp, synthetic construct
  misc_feature 1..1221: note = Description of Artificial Sequence: Synthetic coding sequence
  source 1..1221: mol_type = other DNA
atgggcatccctgtgggcaagctggccctgtacacagcctgtggcggcatgaacccccaggagtgcctgcccgtcatcctggatgtgggcacagaaaatgaggagctgctgaaggaccccctgtacatcggcctgcggcagaggagagtgcggggctctgaatatgatgacttcctggatgagttcatggaggccgtgagcagcaaatatggcatgaactgcctgatccagtttgaagattttgccaacgtgaatgccttccggctgctgaacaagtacagaaaccagtactgcaccttcaatgatgacatccagggcacagcctctgtggccgtggccggcctgctggccgccctgcgcatcaccaagaacaagctgagtgaccagaccatcctcttccagggcgctggggaggccgccctgggcatcgcccacctgattgtgatggccctggagaaggagggcctgcccaaggagaaggccatcaagaagatctggctggtggacagcaagggcctcatcgtgaagggccgggccagcctgacccaggagaaggagaagtttgcccacgagcacgaggagatgaagaacctggaggccatcgtgcaggagatcaagcccacagccctgattggagtggccgccatcggcggggccttcagcgagcagatcctgaaggacatggccgccttcaatgaaagacccatcatctttgccctgagcaaccccaccagcaaggccgagtgcagcgctgagcagtgctacaagatcaccaagggccgggccatctttgccagcggcagcccctttgatcctgtgaccctgcccaacggccagaccctgtacccaggccagggcaacaacagctatgtgtttcctggggtggccctgggcgtggtggcctgtggcctgcggcagatcacagacaacatcttcctgaccacagctgaggtgattgcccagcaggtgtctgacaagcacctggaggagggccgcctgtacccacccctgaacaccatcagagatgtgtccctgaagattgctgagaagatcgtgaaggatgcctaccaggagaagacagccaccgtgtacccagagccccagaacaaggaggcctttgtgcgcagccagatgtacagcacagattatgaccagatcctgcctgactgctacagctggccagaggaggtgcagaagatccagaccaaggtggaccagtag

SEQ ID NO: 158672 - DNA, 1494 bp, synthetic construct
  misc_feature 1..1494: note = Description of Artificial Sequence: Synthetic coding sequence
  source 1..1494: mol_type = other DNA
atggacctgcaggacagaaatgagaagctgttctacagagtgctgaccagtgacatcgagaagttcatgcccatcgtgtacacccccaccgtgggcctggcctgccagcagtacagcctggtgttcaggaagccccggggcctcttcatcaccatccatgaccggggccacatcgcctctgtgctgaatgcctggccagaagatgtgatcaaggccatcgtggtgacagatggagagcgcatcctgggcctgggggacctgggctgcaatggcatgggcatccctgtgggcaagctggccctgtacacagcctgtggcggcatgaacccccaggagtgcctgcctgtgatcctggatgtgggcacagaaaatgaggagctgctgaaggaccccctgtacatcggcctgcggcagaggagagtgcggggctctgaatatgatgacttcctggatgagttcatggaggccgtgagcagcaaatatggcatgaactgcctgatccagtttgaggactttgccaacgtgaatgccttccggctgctgaacaagtacagaaaccagtactgcaccttcaatgatgacatccagggcacagcctctgtggccgtggccggcctgctggccgccctgcgcatcaccaagaacaagctgagtgaccagaccatcctcttccagggcgctggggaggccgccctgggcatcgcccacctgattgtgatggccctggagaaggagggcctgcccaaggagaaggccatcaagaagatctggctggtggacagcaagggcctgattgtgaagggccgggccagcctgacccaggagaaggagaagtttgcccatgaacatgaggagatgaagaacctggaggccatcgtgcaggagatcaagcccacagccctgattggagtggccgccatcggcggggccttcagcgagcagatcctgaaggacatggccgccttcaatgaaagacccatcatctttgccctgagcaaccccaccagcaaggcagaatgttctgctgagcagtgctacaagatcaccaagggccgggccatctttgccagcggcagcccctttgatcctgtgaccctgcccaacggccagaccctgtacccaggccagggcaacaacagctatgtgtttcctggggtggccctgggcgtggtggcctgtggcctgcggcagatcacagacaacatcttcctgaccacagctgaggtgattgcccagcaggtgtctgacaagcacctggaggagggccgcctgtacccacccctgaacaccatcagagatgtgtccctgaagattgctgagaagatcgtgaaggatgcctaccaggagaagacagccaccgtgtacccagagccccagaacaaggaggcctttgtgcgcagccagatgtacagcacagattatgaccagatcctgcctgactgctacagctggccagaggaggtgcagaagatccagaccaaggtggaccagtag

SEQ ID NO: 158673 - DNA, 1755 bp, synthetic construct
  misc_feature 1..1755: note = Description of Artificial Sequence: Synthetic coding sequence
  source 1..1755: mol_type = other DNA
atgctgagccggctgcgggtggtgtccaccacctgcaccctggcctgccgccacctgcacatcaaggagaagggcaagcccctgatgctgaaccccaggaccaacaagggcatggccttcaccctgcaggagcggcagatgctgggcctgcagggcctgctgccccccaagattgagacccaggacatccaggccctgcgcttccacaggaacctgaagaagatgaccagccccctggagaagtacatctacatcatgggcatccaggagagaaatgagaagctgttctaccgcatcctgcaggatgacatcgagagcctgatgcccatcgtgtacacccccaccgtgggcctggcctgcagccagtatggccacatcttccggcggcccaagggcctcttcatcagcatcagtgaccggggccacgtgcgcagcatcgtggacaactggccagagaaccacgtgaaggctgtggtggtgacagatggagagcgcatcctgggcctgggggacctgggcgtgtatggcatgggcatccctgtgggcaagctgtgcctgtacacagcctgtgccggcatccggccagaccgctgcctgcctgtgtgcattgatgtgggcacagacaacatcgccctgctgaaggaccccttctacatgggcctgtaccagaagagggacaggacccagcagtatgatgacctgattgatgagttcatgaaggccatcacagacagatatggcaggaacaccctcatccagtttgaagattttggaaaccacaatgccttccgcttcctgaggaagtaccgggagaagtactgcaccttcaatgatgacatccagggcacagctgctgtggccctggccggcctgctggccgcccagaaggtgatcagcaagcccatcagcgagcacaagatcctcttcctgggcgctggggaggccgccctgggcatcgccaacctgattgtgatgtccatggtggagaatggcctgtctgagcaggaggcccagaagaagatctggatgtttgacaagtatggcctgctggtgaagggcaggaaggccaagattgacagctaccaggagcccttcacccacagcgcccctgagagcatcccagacacctttgaagatgctgtgaacatcctgaagcccagcaccatcatcggcgtggccggggccggccgcctcttcaccccagatgtgatccgggccatggccagcatcaatgaaagacctgtgatctttgccctgagcaaccccacagcccaggctgaatgtacagctgaggaggcctacaccctgacagagggccgctgcctgtttgccagcggcagcccctttggacctgtgaagctgacagatggccgggtcttcaccccaggccagggcaacaacgtgtacatcttccctggggtggccctggccgtcatcctgtgcaacaccaggcacatcagtgacagcgtcttcctggaggccgccaaggccctgaccagccagctgacagatgaggagctggcccagggccgcctgtacccacccctggccaacatccaggaggtgtccatcaacatcgccatcaaggtgacagagtacctgtatgccaacaagatggccttccgctacccagagcctgaggacaaggccaagtatgtgaaggagaggacctggaggagtgaatatgacagcctgctgcctgatgtgtatgagtggccagagagcgccagcagcccccctgtgatcacagaatag

SEQ ID NO: 158674 - DNA, 1440 bp, synthetic construct
  misc_feature 1..1440: note = Description of Artificial Sequence: Synthetic coding sequence
  source 1..1440: mol_type = other DNA
atgctgagccggctgcgggtggtgtccaccacctgcaccctggcctgccgccacctgcacatcaaggagaagggcaagcccctgatgctgaaccccaggaccaacaagggcatggccttcaccctgcaggagcggcagatgctgggcctgcagggcctgctgccccccaagattgagacccaggacatccaggccctgcgcttccacaggaacctgaagaagatgaccagccccctggagaagtacatctacatcatgggcatccaggagagaaatgagaagctgttctaccgcatcctgcaggatgacatcgagagcctgatgcccatcgtgtacacccccaccgtgggcctggcctgcagccagtatggccacatcttccggcggcccaagggcctcttcatcagcatcagtgaccggggccacgtgcgcagcatcgtggacaactggccagagaaccacgtgaaggctgtggtggtgacagatggagagcgcatcctgggcctgggggacctgggcgtgtatggcatgggcatccctgtgggcaagctgtgcctgtacacagcctgtgccggcatccggccagaccgctgcctgcctgtgtgcattgatgtgggcacagacaacatcgccctgctgaaggaccccttctacatgggcctgtaccagaagagggacaggacccagcagtatgatgacctgattgatgagttcatgaaggccatcacagacagatatggcaggaacaccctcatccagtttgaagattttggaaaccacaatgccttccgcttcctgaggaagtaccgggagaagtactgcaccttcaatgatgacatccagggcacagctgctgtggccctggccggcctgctggccgcccagaaggtgatcagcaagcccatcagcgagcacaagatcctcttcctgggcgctggggaggccgccctgggcatcgccaacctgattgtgatgtccatggtggagaatggcctgtctgagcaggaggcccagaagaagatctggatgtttgacaagtatggcctgctggtgaagggcaggaaggccaagattgacagctaccaggagcccttcacccacagcgcccctgagagcatcccagacacctttgaagatgctgtgaacatcctgaagcccagcaccatcatcggcgtggccggggccggccgcctcttcaccccagatgtgatccgggccatggccagcatcaatgaaagacctgtgatctttgccctgagcaaccccacagcccaggctgaatgtacagctgaggaggcctacaccctgacagagggccgctgcctgtttgccagcggcagcccctttggacctgtgaagctgacagatggccgggtcttcaccccaggccagggcaacaacgtgtacatcttccctggctaccgcatccccatctgctag

SEQ ID NO: 158675 - DNA, 780 bp, synthetic construct
  misc_feature 1..780: note = Description of Artificial Sequence: Synthetic coding sequence
  source 1..780: mol_type = other DNA
atggccttcaccctggaggagcggctgcagctgggcatccacggcctcatccccccctgcttcctgagccaggatgtgcagctgctgcgcatcatgagatactatgagcggcagcagagcgacctggacaagtacatcatcctgatgaccctgcaggacagaaatgagaagctgttctacagagtgctgaccagtgatgtggagaagttcatgcccatcgtgtacacccccaccgtgggcctggcctgccagcactacggcctgaccttcagaagaccccggggcctcttcatcaccatccatgacaagggccacctggccaccatgctgaacagctggccagaggacaacatcaaggctgtggtggtgacagatggagagcgcatcctgggcctgggggacctgggctgctacggcatgggcatccctgtgggcaagctggccctgtacacagcctgtggcggcgtgaacccccagcagtgcctgcctgtgctgctggatgtgggcaccaacaatgaggagctgctgcgggaccccctgtacatcggcctgaagcaccagagggtgcacggcaaggcctatgatgacctgctggatgagttcatgcaggccgtgacagacaagtttggcatcaactgcctgatccagtttgaggactttgccaatgccaatgccttccggctgctgaacaagtacagaaacaagtactgcatgtttaatgatgacatccaggatgacttcagccggggccccaagaggagccagctgttcttcaagtag

SEQ ID NO: 158676 - DNA, 1815 bp, synthetic construct
  misc_feature 1..1815: note = Description of Artificial Sequence: Synthetic coding sequence
  source 1..1815: mol_type = other DNA
atgggcgccgccctgggcaccggcacccggctggccccctggccaggccgggcctgtggggccctgccccgctggacccccacagccccagcccagggctgccacagcaagccaggccctgcccggcctgtgcccctgaagaagaggggctatgatgtgaccaggaacccccacctgaacaagggcatggccttcaccctggaggagcggctgcagctgggcatccacggcctcatccccccctgcttcctgagccaggatgtgcagctgctgcgcatcatgagatactatgagcggcagcagagcgacctggacaagtacatcatcctgatgaccctgcaggacagaaatgagaagctgttctacagagtgctgaccagtgatgtggagaagttcatgcccatcgtgtacacccccaccgtgggcctggcctgccagcactacggcctgaccttcagaagaccccggggcctcttcatcaccatccatgacaagggccacctggccaccatgctgaacagctggccagaggacaacatcaaggctgtggtggtgacagatggagagcgcatcctgggcctgggggacctgggctgctacggcatgggcatccctgtgggcaagctggccctgtacacagcctgtggcggcgtgaacccccagcagtgcctgcctgtgctgctggatgtgggcaccaacaatgaggagctgctgcgggaccccctgtacatcggcctgaagcaccagagggtgcacggcaaggcctatgatgacctgctggatgagttcatgcaggccgtgacagacaagtttggcatcaactgcctgatccagtttgaggactttgccaatgccaatgccttccggctgctgaacaagtacagaaacaagtactgcatgtttaatgatgacatccagggcacagcctctgtggccgtggccggcatcctggccgccctgcgcatcaccaagaacaagctgagcaaccacgtgtttgtgttccagggcgctggggaggccgccatgggcatcgcccacctgctggtgatggccctggagaaggagggcgtgcccaaggccgaggccaccaggaagatctggatggtggacagcaagggcctgattgtgaagggccgcagccacctgaaccacgagaaggagatgtttgcccaggaccaccctgaggtgaacagcctggaggaggtggtgcggctggtgaagcccacagccatcatcggcgtggccgccatcgccggggccttcacagagcagatcctgcgggacatggccagcttccacgagcggcccatcatctttgccctgagcaaccccaccagcaaggcagaatgtacagctgagaagtgctacagagtgacagagggccggggcatctttgccagcggcagccccttcaagtctgtgaccctggaggatggcaagaccttcatccctggccagggcaacaatgcctacgtgtttcctggggtggccctgggcgtgattgctgggggcatccgccacatcccagatgagatcttcctgctgacagctgagcagatcgcccaggaggtgtctgagcagcacctgagccagggccgcctgtacccacccctgagcaccatcagagatgtgtccctgcgcatcgccatcaaggtgctggactatgcctacaagcacaacctggccagctactacccagagcccaaggacaaggaggcctttgtgcgcagcctggtgtacaccccagactatgacagcttcaccctggacagctacacctggcccaaggaggccatgaatgtgcagacagtgtag

SEQ ID NO: 158677 - DNA, 1815 bp, synthetic construct; identical to SEQ ID NO: 158676
  misc_feature 1..1815: note = Description of Artificial Sequence: Synthetic coding sequence
  source 1..1815: mol_type = other DNA

SEQ ID NO: 158678 - DNA, 1746 bp, synthetic construct
  misc_feature 1..1746: note = Description of Artificial Sequence: Synthetic coding sequence
  source 1..1746: mol_type = other DNA
atgggcgccgccctgggcaccggcacccggctggccccctggccaggccgggcctgtggggccctgccccgctggacccccacagccccagcccagggctgccacagcaagccaggccctgcccggcctgtgcccctgaagaagaggggctatgatgtgaccaggaacccccacctgaacaagggcatggccttcaccctggaggagcggctgcagctgggcatccacggcctcatccccccctgcttcctgagccaggatgtgcagctgctgcgcatcatgagatactatgagcggcagcagagcgacctggacaagtacatcatcctgatgaccctgcaggacagaaatgagaagctgttctacagagtgctgaccagtgatgtggagaagttcatgcccatcgtgtacacccccaccgtgggcctggcctgccagcactacggcctgaccttcagaagaccccggggcctcttcatcaccatccatgacaagggccacctggccaccatgctgaacagctggccagaggacaacatcaaggctgtggtggtgacagatggagagcgcatcctgggcctgggggacctgggctgctacggcatgggcatccctgtgggcaagctggccctgtacacagcctgtggcggcgtgaacccccagcagtgcctgcctgtgctgctggatgtgggcaccaacaatgaggagctgctgcgggaccccctgtacatcggcctgaagcaccagagggtgcacggcaaggcctatgatgacctgctggatgagttcatgcaggccgtgacagacaagtttggcatcaactgcctgatccagtttgaggactttgccaatgccaatgccttccggctgctgaacaagtacagaaacaagtactgcatgtttaatgatgacatccagggcacagcctctgtggccgtggccggcatcctggccgccctgcgcatcaccaagaacaagctgagcaaccacgtgtttgtgttccagggcgctggggaggccgccatgggcatcgcccacctgctggtgatggccctggagaaggagggcgtgcccaaggccgaggccaccaggaagatctggatggtggacagcaagggcctgattgtgaagggccgcagccacctgaaccacgagaaggagatgtttgcccaggaccaccctgaggtgaacagcctggaggaggtggtgcggctggtgaagcccacagccatcatcggcgtggccgccatcgccggggccttcacagagcagatcctgcgggacatggccagcttccacgagcggcccatcatctttgccctgagcaaccccaccagcaaggcagaatgtacagctgagaagtgctacagagtgacagagggccggggcatctttgccagcggcagccccttcaagtctgtgaccctggaggatggcaagaccttcatccctggccagggcaacaatgcctacgtgtttcctggggtggccctgggcgtgattgctgggggcatccgccacatcccagatgagatcttcctgctgacagctgagcagatcgcccaggaggtgtctgagcagcacctgagccagggccgcctgtacccacccctgagcaccatcagagatgtgtccctgcgcatcgccatcaaggtgctggactatgcctacaagcacaacctggccagctactacccagagcccaaggacaaggaggcctttgtgcgcagcctggtgtacacctag

SEQ ID NO: 158679 - DNA, 1029 bp, synthetic construct
  misc_feature 1..1029: note = Description of Artificial Sequence: Synthetic coding sequence
  source 1..1029: mol_type = other DNA
atgggcgccgccctgggcaccggcacccggctggccccctggccaggccgggcctgtggggccctgccccgctggacccccacagccccagcccagggctgccacagcaagccaggccctgcccggcctgtgcccctgaagaagaggggctatgatgtgaccaggaacccccacctgaacaagggcatggccttcaccctggaggagcggctgcagctgggcatccacggcctcatccccccctgcttcctgagccaggatgtgcagctgctgcgcatcatgagatactatgagcggcagcagagcgacctggacaagtacatcatcctgatgaccctgcaggacagaaatgagaagctgttctacagagtgctgaccagtgatgtggagaagttcatgcccatcgtgtacacccccaccgtgggcctggcctgccagcactacggcctgaccttcagaagaccccggggcctcttcatcaccatccatgacaagggccacctggccaccatgctgaacagctggccagaggacaacatcaaggctgtggtggtgacagatggagagcgcatcctgggcctgggggacctgggctgctacggcatgggcatccctgtgggcaagctggccctgtacacagcctgtggcggcgtgaacccccagcagtgcctgcctgtgctgctggatgtgggcaccaacaatgaggagctgctgcgggaccccctgtacatcggcctgaagcaccagagggtgcacggcaaggcctatgatgacctgctggatgagttcatgcaggccgtgacagacaagtttggcatcaactgcctgatccagtttgaggactttgccaatgccaatgccttccggctgctgaacaagtacagaaacaagtactgcatgtttaatgatgacatccagggcaccacctgccacaccttcagctgcccctggcacctgtgggcccaggtgatgttccagcacatccctggccccatgggcttcagcgagtggctgcccaggaacagctag

SEQ ID NO: 158680 - DNA, 189 bp, synthetic construct
  misc_feature 1..189: note = Description of Artificial Sequence: Synthetic coding sequence
  source 1..189: mol_type = other DNA
atgggcgccgccctgggcaccggcacccggctggccccctggccaggccgggcctgtggggccctgccccgctggacccccacagccccagcccagggctgccacagcaagccaggccctgcccggcctgtgcccctgaagaagaggggctatgatgtgaccaggaacccccacctgaacaaggtgtag

SEQ ID NO: 158681 - DNA, 186 bp, synthetic construct
  misc_feature 1..186: note = Description of Artificial Sequence: Synthetic coding sequence
  source 1..186: mol_type = other DNA
atgggcgccgccctgggcaccggcacccggctggccccctggccaggccgggcctgtggggccctgccccgctggacccccacagccccagcccagggctgccacagcaagccaggccctgcccggcctgtgcccctgaagaagaggggctatgatgtgaccaggaacccccacctgaacaagtag

SEQ ID NO: 158682 - DNA, 456 bp, synthetic construct
  misc_feature 1..456: note = Description of Artificial Sequence: Synthetic coding sequence
  source 1..456: mol_type = other DNA
atgggcgccgccctgggcaccggcacccggctggccccctggccaggccgggcctgtggggccctgccccgctggacccccacagccccagcccagggctgccacagcaagccaggccctgcccggcctgtgcccctgaagaagaggggctatgatgtgaccaggaacccccacctgaacaagggcatggccttcaccctggaggagcggctgcagctgggcatccacggcctcatccccccctgcttcctgagccaggatgtgcagctgctgcgcatcatgagatactatgagcggcagcagagcgacctggacaagtacatcatcctgatgaccctgcaggacagaaatgagaagctgttctacagagtgctgaccagtgatgtggagaagttcatgcccatcgtgtacacccccaccgtgggcctggcctgccagcactacggcctgacctag

SEQ ID NO: 158683 - DNA, 240 bp, synthetic construct
  misc_feature 1..240: note = Description of Artificial Sequence: Synthetic coding sequence
  source 1..240: mol_type = other DNA
atgggcgccgccctgggcaccggcacccggctggccccctggccaggccgggcctgtggggccctgccccgctggacccccacagccccagcccagggctgccacagcaagccaggccctgcccggcctgtgcccctgaagaagaggggctatgatgtgaccaggaacccccacctgaacaaggtgatgggccagagagctggccggcctgccctgcggagccggggctgcaggaagtag

SEQ ID NO: 158684 - DNA, 1815 bp, synthetic construct; identical to SEQ ID NO: 158676
  misc_feature 1..1815: note = Description of Artificial Sequence: Synthetic coding sequence
  source 1..1815: mol_type = other DNA

SEQ ID NO: 158685 - DNA, 759 bp, synthetic construct
  misc_feature 1..759: note = Description of Artificial Sequence: Synthetic coding sequence
  source 1..759: mol_type = other DNA
atggccttcaccctggaggagcggctgcagctgggcatccacggcctcatccccccctgcttcctgagccaggatgtgcagctgctgcgcatcatgagatactatgagcggcagcagagcgacctggacaagtacatcatcctgatgaccctgcaggacagaaatgagaagctgttctacagagtgctgaccagtgatgtggagaagttcatgcccatcgtgtacacccccaccgtgggcctggcctgccagcactacggcctgaccttcagaagaccccggggcctcttcatcaccatccatgacaagggccacctggccaccatgctgaacagctggccagaggacaacatcaaggctgtggtggtgacagatggagagcgcatcctgggcctgggggacctgggctgctacggcatgggcatccctgtgggcaagctggccctgtacacagcctgtggcggcgtgaacccccagcagtgcctgcctgtgctgctggatgtgggcaccaacaatgaggagctgctgcgggaccccctgtacatcggcctgaagcaccagagggtgcacggcaaggcctatgatgacctgctggatgagttcatgcaggccgtgacagacaagtttggcatcaactgcctgatccagtttgaggactttgccaatgccaatgccttccggctgctgaacaagtacagaaacaagtactgcatgtttaatgatgacatccaggcccccagcacagccccagccacctag

SEQ ID NO: 158686 - DNA, 1482 bp, synthetic construct
  misc_feature 1..1482: note = Description of Artificial Sequence: Synthetic coding sequence
  source 1..1482: mol_type = other DNA
atgaggggcttcggccctggcctgacagcccggcggctgctgcccctgcggctgcccccccggcccccaggcccccggctggccagcggccaggccgccggggccctggagcgggccatggatgagctgctgcggcgggctgtgccccccaccccagcctatgagctgcgggagaagaccccagccccagctgagggccagtgtgccgactttgtgtccttctatggaggcctggccgagacagcccagagagctgagctgctgggccgcctggcccggggctttggagtggaccacggccaggtggccgagcagagcgctggggtgctgcacctgcggcagcagcagcgggaggccgctgtgctgctgcaggccgaggaccggctgcgctatgccctggtgccccgctaccggggcctcttccaccacatcagcaagctggatggcggcgtgcgcttcctggtgcagctgcgggctgacctgctggaggcccaggccctgaagctggtggagggcccagatgtgcgggagatgaatggagtgctgaagggcatgctgtctgagtggttcagcagcggcttcctgaacctggagcgggtgacctggcacagcccctgtgaggtgctgcagaagatcagcgaggccgaggccgtgcaccctgtgaagaactggatggacatgaagagaagagtgggcccctaccgccgctgctacttcttcagccactgcagcaccccaggagagcccctggtggtgctgcacgtggccctgaccggggacatcagcagcaacatccaggccatcgtgaaggagcaccccccatctgaaacagaggagaagaacaagatcacagctgccatcttctacagcatcagcctgacccagcagggcctgcagggcgtggagctgggcaccttcctgatcaagagggtggtgaaggagctgcagcgggagttcccccacctgggcgtcttcagcagcctgagccccatccctggcttcaccaagtggctgctgggcctgctgaacagccagaccaaggagcacggcagaaatgagctgttcacagacagcgagtgcaaggagatcagcgagatcactggaggccccatcaatgagaccctgaagctgctgctgagcagcagcgagtgggtgcagagcgagaagctggtgcgggccctgcagacccccctgatgaggctgtgtgcctggtacctgtatggagagaagcaccggggctacgccctgaaccctgtggccaacttccacctgcagaatggagctgtgctgtggaggatcaactggatggctgatgtgtccctgcggggcatcaccggcagctgtggcctgatggccaactaccgctacttcctggaggagaccggccccaacagcaccagctacctgggcagcaagatcatcaaggccagcgagcaggtgctgagcctggtggcccagttccagaagaacagcaagctgtag

SEQ ID NO: 158687 - DNA, 558 bp, synthetic construct
  misc_feature 1..558: note = Description of Artificial Sequence: Synthetic coding sequence
  source 1..558: mol_type = other DNA
atggccaggaagaagctgaagaagttcaccaccctggagatcgtgctgtctgtgctgctgctggtgctcttcatcatcagcatcgtgctgattgtgctgctggccaaggagagcctgaagagcacagccccagaccccggcaccaccggcaccccagaccccggcaccaccggcaccccagaccccggcaccaccggcaccacccacgcccggaccactggacctccagaccccggcaccaccggcaccacccctgtgtctgcagaatgtcctgtggtgaatgagctggagcgcatcaactgcatcccagaccagccccccaccaaggccacctgtgaccagaggggctgctgctggaacccccagggcgctgtgtctgtgccctggtgctactacagcaagaaccacagctaccacgtggagggcaacctggtgaacaccaatgccggcttcaccgcccggctgaagaacctgcccagcagccctgtgtttggcagcaatgtggacaacgtgctgctgacagctgagtaccagaccagcaaccgcttccacttctag

SEQ ID NO: 158688 - DNA, 4989 bp, synthetic construct
  misc_feature 1..4989: note = Description of Artificial Sequence: Synthetic coding sequence
  source 1..4989: mol_type = other DNA
gctgtgtctgtgccctggtgctactacagcaagaaccacagctaccacgtggagggcaacctggtgaacaccaatgccggcttcaccgcccggctgaagaacctgcccagcagccctgtgtttggcagcaatgtggacaacgtgctgctgacagctgagtaccagaccagcaaccgcttccacttcaagctgacagaccagaccaacaacagatttgaggtgccccatgagcacgtgcagagcttctctggaaatgctgctgccagcctgacctaccaggtggagatcagccggcagcccttcagcatcaaggtgaccaggaggagcaacaacagagtgctgtttgacagcagcatcggccccctgctgtttgctgaccagttcctgcagctgagcacccggctgcccagcaccaacgtgtatggcctgggggagcacgtgcaccagcagtacagacatgacatgaactggaagacctggcccatcttcaacagagacaccaccccaaatggaaatggcaccaacctgtatggagcccagaccttcttcctgtgcctggaggatgccagcggcctgagctttggagtcttcctgatgaacagcaatgccatggaggtggtgctgcagcctgccccagccatcacctaccgcaccatcggcggcatcctggacttctacgtgttcctgggcaacaccccagagcaggtggtgcaggagtacctggagctgattggccgcccagccctgcccagctactgggccctgggcttccacctgagccgctatgaatatggcaccctggacaacatgagggaggtggtggagaggaacagagctgcccagctgccctatgatgtgcagcacgccgacatcgactacatggatgaaagaagagacttcacctatgacagcgtggacttcaagggcttccctgagtttgtgaatgagctgcacaacaacggccagaagctggtgatcatcgtggaccctgccatcagcaacaacagcagcagcagcaagccctacggcccctatgaccggggcagtgacatgaagatctgggtgaacagcagtgatggagtgacccccctgattggagaggtgtggccaggccagacagtgtttcctgactacaccaaccccaactgtgctgtgtggtggaccaaggagtttgagctgttccacaaccaggtggagtttgatggcatctggattgacatgaatgaggtgagcaactttgtggatggctctgtgtctggctgcagcaccaacaacctgaacaacccccccttcaccccccgcatcctggatggctacctgttctgcaagaccctgtgcatggatgctgtgcagcactggggcaagcagtatgacatccacaacctgtatggctacagcatggctgtggccacagctgaggccgccaagacagtgttccccaacaagaggagcttcatcctgaccaggagcacctttgctggcagcggcaagtttgctgcccactggctgggggacaacacagccacctgggatgacctgcgctggagcatccctggggtgctggagttcaacctgtttggcatccccatggtgggccctgacatctgtggctttgccctggacaccccagaggagctgtgccgccgctggatgcagctgggcgccttctaccccttcagcaggaaccacaacggccagggctacaaggaccaggaccctgccagctttggagctgacagcctgctgctgaacagcagccgccactacctgaacatccgctacaccctgctgccctacctgtacaccctcttcttccgggcccacagcagaggagacacagtggcccggcccctgctgcacgagttctatgaggacaacagcacctgggatgtgcaccagcagttcctgtggggccctggcctgctgatcacccctgtgctggatgagggcgctgagaaggtgatggcctacgtgcctgatgctgtgtggtatgactatgagaccggcagccaggtgcgctggaggaagcagaaggtggagatggagctgcccggggacaagattggcctgcacctgcggggcggctacatcttccccacccagcagcccaacaccaccaccctggccagcaggaagaaccccctgggcctcatcatcgccctggatgagaacaaggaggccaagggggagctgttctgggacaatggagagaccaaggacacagtggccaacaaggtgtacctgctgtgtgagttctctgtgacccagaaccggctggaggtgaacatcagccagagcacctacaaggaccccaacaacctggccttcaatgagatcaagatcctgggcacagaggagcccagcaatgtgacagtgaagcacaatggagtgcccagccagaccagccccaccgtgacctatgacagcaacctgaaggtggccatcatcacagacatcgacctgctgctgggggaggcctacacagtggagtggagcatcaagatcagagatgaggagaagattgactgctacccagatgaaaatggagccagcgctgagaactgcacagcccggggctgcatctgggaggccagcaacagcagcggcgtgcccttctgctactttgtgaatgacctgtacagcgtgtctgatgtgcagtacaacagccacggggccacagctgacatcagcctgaagagctctgtgtatgccaatgccttccccagcacccctgtgaaccccctgcggctggatgtgacctaccacaagaatgagatgctgcagttcaagatctatgaccccaacaagaacagatatgaggtgcctgtgcccctgaacatccccagcatgcccagcagcaccccagagggccagctgtatgatgtgctgatcaagaagaacccctttggaattgagatccggaggaagagcacaggcaccatcatctgggacagccagctgctgggcttcaccttcagtgacatgttcatccgcatcagcacccggctgcccagcaagtacctgtatggctttggagaaacagagcacaggagctaccgccgggacctggagtggcacacctggggcatgttcagccgggaccagcccccaggctacaagaagaacagctatggagtgcacccctactacatgggcctggaggaggatggcagcgcccacggcgtgctgctgctgaacagcaatgccatggatgtgaccttccagcccctgcctgccctgacctaccgcaccactggaggagtgctggacttctacgtgttcctgggccccaccccagagctggtgacccagcagtacacagagctgattggccggcctgtgatggtgccctactggagcctgggcttccagctgtgccgctatggctaccagaatgacagcgagatcgccagcctgtatgatgagatggtggccgcccagatcccctatgatgtgcagtacagcgacatcgactacatggagcggcagctggacttcaccctgagccccaagtttgctggcttccctgccctgatcaacaggatgaaggcagatggcatgagggtcatcctgatcctggaccctgccatctctggaaatgagacccagccctacccagccttcacccggggcgtggaggatgatgtgttcatcaagtacccaaatgatggagacatcgtgtggggcaaggtgtggccagacttcccagatgtggtggtgaatggcagcctggactgggacagccaggtggagctgtaccgggcctacgtggccttcccagacttcttcaggaacagcacagccaagtggtggaagcgggagattgaggagctgtacaacaacccccagaaccctgagaggagcctgaagtttgatggcatgtggattgacatgaatgagcccagcagctttgtgaatggagctgtgtccccaggctgcagagatgccagcctgaaccaccccccctacatgccccacctggagagccgggaccggggcctgagcagcaagaccctgtgcatggagagccagcagatcctgcctgatggcagcctggtgcagcactacaacgtgcacaacctgtatggctggagccagacccggcccacctatgaagctgtgcaggaggtgacaggccagaggggcgtggtgatcaccaggagcaccttccccagcagcggccgctgggccggccactggctgggggacaacacagctgcctgggaccagctgaagaagagcatcatcggcatgatggagttcagcctgtttggcatctcctacacaggagctgacatctgtggcttcttccaggatgctgaatatgagatgtgtgtgcgctggatgcagctgggcgccttctaccccttcagcaggaaccacaacaccatcggcacccggcggcaggaccctgtgtcctgggatgctgcctttgtgaacatcagcagaaatgtgctgcagacccgctacaccctgctgccctacctgtacaccctgatgcagaaggcccacacagaaggagtgacagtggtgcggcccctgctgcacgagtttgtgtctgaccaggtgacctgggacatcgacagccagttcctgctgggccctgccttcctggtgtcccctgtgctggagagaaatgccagaaatgtgacagcctacttcccccgggcccgctggtatgactactacacaggagtggacatcaatgcccggggggagtggaagaccctgcctgcccccctggaccacatcaacctgcacgtgcggggcggctacatcctgccctggcaggagcccgccctgaacacccacctgagcaggaagaaccccctgggcctcatcatcgccctggatgagaacaaggaggccaagggggagctgttctgggatgatggccagaccaaggacacagtggccaagaaggtgtacctgctgtgtgagttctctgtgacccagcaggtggtgttcctgaacatcgtgttcaactag

SEQ ID NO: 158689 - DNA, 5574 bp, synthetic construct
  misc_feature 1..5574: note = Description of Artificial Sequence: Synthetic coding sequence
  source 1..5574: mol_type = other DNA
atggccaggaagaagctgaagaagttcaccaccctggagatcgtgctgtctgtgctgctgctggtgctcttcatcatcagcatcgtgctgattgtgctgctggccaaggagagcctgaagagcacagccccagaccccggcaccaccggcaccccagaccccggcaccaccggcaccccagaccccggcaccaccggcaccacccacgcccggaccactggacctccagaccccggcaccaccggcaccacccctgtgtctgcagaatgtcctgtggtgaatgagctggagcgcatcaactgcatcccagaccagccccccaccaaggccacctgtgaccagaggggctgctgctggaacccccagggcgctgtgtctgtgccctggtgctactacagcaagaaccacagctaccacgtggagggcaacctggtgaacaccaatgccggcttcaccgcccggctgaagaacctgcccagcagccctgtgtttggcagcaatgtggacaacgtgctgctgacagctgagtaccagaccagcaaccgcttccacttcaagctgacagaccagaccaacaacagatttgaggtgccccatgaacatgtgcagagcttctctggaaatgctgctgccagcctgacctaccaggtggagatcagccggcagcccttcagcatcaaggtgacccggcgcagcaacaacagagtgctgtttgacagcagcatcggccccctgctgtttgctgaccagttcctgcagctgagcacccggctgcccagcaccaacgtgtatggcctgggggagcacgtgcaccagcagtacagacatgacatgaactggaagacctggcccatcttcaacagagacaccaccccaaatggaaatggcaccaacctgtatggagcccagaccttcttcctgtgcctggaggatgccagcggcctgagctttggagtcttcctgatgaacagcaatgccatggaggtggtgctgcagcctgccccagccatcacctaccgcaccatcggcggcatcctggacttctacgtgttcctgggcaacaccccagagcaggtggtgcaggagtacctggagctgattggccggcctgccctgcccagctactgggccctgggcttccacctgagccgctatgaatatggcaccctggacaacatgagggaggtggtggagaggaacagagctgcccagctgccctatgatgtgcagcacgccgacatcgactacatggatgagcggcgggacttcacctatgattctgtggacttcaagggcttccctgagtttgtgaatgagctgcacaacaacggccagaagctggtgatcatcgtggaccctgccatcagcaacaacagcagcagcagcaagccctacggcccctatgaccggggcagtgacatgaagatctgggtgaacagcagtgatggagtgacccccctcatcggggaggtgtggccaggccagaccgtcttcccagactacaccaaccccaactgtgctgtgtggtggaccaaggagtttgagctgttccacaaccaggtggagtttgatggcatctggattgacatgaatgaggtgagcaactttgtggatggctctgtgtctggctgcagcaccaacaacctgaacaacccccccttcaccccccgcatcctggatggctacctgttctgcaagaccctgtgcatggatgctgtgcagcactggggcaagcagtatgacatccacaacctgtatggctacagcatggctgtggccacagctgaggccgccaagacagtgttccccaacaagaggagcttcatcctgaccaggagcacctttgctggcagcggcaagtttgctgcccactggctgggggacaacacagccacctgggatgacctgcgctggagcatccctggggtgctggagttcaacctgtttggcatccccatggtgggccctgacatctgtggctttgccctggacaccccagaggagctgtgccgccgctggatgcagctgggcgccttctaccccttcagcaggaaccacaacggccagggctacaaggaccaggaccctgccagctttggagctgacagcctgctgctgaacagcagccgccactacctgaacatccgctacaccctgctgccctacctgtacaccctcttcttccgggcccacagcagaggagacacagtggcccggcccctgctgcacgagttctatgaggacaacagcacctgggatgtgcaccagcagttcctgtggggccctggcctgctgatcacccctgtgctggatgaaggagctgagaaggtgatggcctacgtgcctgatgctgtgtggtatgactatgaaacaggcagccaggtgcgctggaggaagcagaaggtggagatggagctgcccggggacaagattggcctgcacctgcggggcggctacatcttccccacccagcagcccaacaccaccaccctggccagcaggaagaaccccctgggcctcatcatcgccctggatgagaacaaggaggccaagggggagctgttctgggacaacggggagaccaaggacacagtggccaacaaggtgtacctgctgtgtgagttctctgtgacccagaaccggctggaggtgaacatcagccagagcacctacaaggaccccaacaacctggccttcaatgagatcaagatcctgggcacagaggagcccagcaatgtgacagtgaagcacaacggggtgcccagccagaccagccccaccgtgacctatgacagcaacctgaaggtggccatcatcacagacatcgacctgctgctgggggaggcctacacagtggagtggagcatcaagatcagagatgaggagaagattgactgctacccagatgaaaatggagccagcgctgagaactgcacagcccggggctgcatctgggaggccagcaacagcagtggagtgcccttctgctactttgtgaatgacctgtacagcgtgtctgatgtgcagtacaacagccatggagccacagctgacatcagcctgaagagctctgtgtatgccaatgccttccccagcacccctgtgaaccccctgcggctggatgtgacctaccacaagaatgagatgctgcagttcaagatctatgaccccaacaagaacagatatgaggtgcctgtgcccctgaacatccccagcatgcccagcagcaccccagagggccagctgtatgatgtgctgatcaagaagaaccccttcggcatcgagatccggaggaagagcacaggcaccatcatctgggacagccagctgctgggcttcaccttcagtgacatgttcatccgcatcagcacccggctgcccagcaagtacctgtatggctttggagaaacagagcacaggagctacagaagagacctggagtggcacacctggggcatgttcagccgggaccagcccccaggctacaagaagaacagctatggagtgcacccctactacatgggcctggaggaggatggcagcgcccatggagtgctgctgctgaacagcaatgccatggatgtgaccttccagcccctgcctgccctgacctaccgcaccaccggcggcgtgctggacttctacgtgttcctgggccccaccccagagctggtgacccagcagtacacagagctgattggccggcctgtgatggtgccctactggagcctgggcttccagctgtgccgctatggctaccagaatgattctgaaattgccagcctgtatgatgagatggtggccgcccagatcccctatgatgtgcagtacagcgacatcgactacatggagcggcagctggacttcaccctgagccccaagtttgctggcttccctgccctgatcaacaggatgaaggcagatggcatgagggtcatcctgatcctggaccctgccatctctggaaatgagacccagccctacccagccttcacccggggcgtggaggatgatgtgttcatcaagtacccaaatgatggagacatcgtgtggggcaaggtgtggccagacttcccagatgtggtggtgaatggcagcctggactgggacagccaggtggagctgtaccgggcctacgtggccttcccagacttcttcaggaacagcacagccaagtggtggaagcgggagattgaggagctgtacaacaacccccagaaccctgagaggagcctgaagtttgatggcatgtggattgacatgaatgagcccagcagctttgtgaatggagctgtgtccccaggctgcagagatgccagcctgaaccaccccccctacatgccccacctggagagccgggaccggggcctgagcagcaagaccctgtgcatggagagccagcagatcctgcctgatggcagcctggtgcagcactacaacgtgcacaacctgtatggctggagccagacccggcccacctatgaggccgtgcaggaggtgacaggccagaggggcgtggtgatcaccaggagcaccttccccagcagcggccgctgggccggccactggctgggggacaacacagctgcctgggaccagctgaagaagagcatcatcggcatgatggagttcagcctgtttggcatctcctacaccggggctgacatctgtggcttcttccaggatgctgaatatgagatgtgtgtgcgctggatgcagctgggcgccttctaccccttcagcaggaaccacaacaccatcggcacccggcggcaggaccctgtgtcctgggatgtggcctttgtgaacatcagcaggacagtgctgcagacccgctacaccctgctgccctacctgtacaccctgatgcacaaggcccacacagagggcgtgacagtggtgcggcccctgctgcatgaatttgtgtctgaccaggtgacctgggacatcgacagccagttcctgctgggccctgccttcctggtgtcccctgtgctggagagaaatgccagaaatgtgacagcctacttcccccgggcccgctggtatgactactacacaggagtggacatcaatgcccggggggagtggaagaccctgcctgcccccctggaccacatcaacctgcacgtgcggggcggctacatcctgccctggcaggagcccgccctgaacacccacctgagccggcagaagttcatgggcttcaagatcgccctggatgatgagggcacagctgggggctggctgttctgggatgatggccagagcattgacacctacggcaagggcctgtactacctggccagcttcagcgccagccagaacaccatgcagagccacatcatcttcaacaactacatcaccggcaccaaccccctgaagctgggctacatcgagatctggggcgtgggctctgtgcctgtgacctctgtgtccatctctgtgtctggcatggtgatcacccccagcttcaacaatgaccccaccacccaggtgctgagcattgatgtgacagacaggaacatcagcctgcacaacttcaccagcctgacctggatcagcaccctgtag

SEQ ID NO: 158690 - DNA, 2061 bp, synthetic construct
  misc_feature 1..2061: note = Description of Artificial Sequence: Synthetic coding sequence
  source 1..2061: mol_type = other DNA
atgctgctgcggggcgtgctgctggccctgcaggccctgcagctggccggggccctggacctgcctgctggcagctgtgcctttgaggagagcacctgtggctttgattctgtgctggccagcctgccctggatcctgaatgaggagggccactacatctacgtggacaccagctttgggaagcagggcgagaaggctgtgctgctgagcccagacctgcaggccgaggagtggagctgcctgcggctggtgtaccagatcaccaccagcagcgagagcctgagtgaccccagccagctgaacctgtacatgagatttgaagatgagagctttgaccggctgctgtggagcgccaaggagcccagcgacagctggctgattgccagcctggacctgcagaacagcagcaagaagttcaagatcctgattgaaggagtgctgggccagggcaacacagccagcatcgccctgtttgagatcaagatgaccaccggctactgcattgaatgtgactttgaggagaaccacctgtgtggctttgtgaaccgctggaaccccaacgtgaactggtttgtgggcggcggcagcatcagaaatgtgcacagcatcctgccccaggaccacaccttcaagtctgagctgggccactacatgtatgtggacagcgtgtatgtgaagcacttccaggaggtggcccagctgatcagccccctgaccacagcccccatggccggctgcctgtccttctactaccagatccagcagggcaatgacaacgtgttcagcctgtacaccagagatgtggccggcctgtatgaggagatctggaaggctgacaggcctggaaatgctgcctggaacctggccgaggtggagttcagcgccccctaccccatggaggtgatctttgaggtggccttcaacggccccaagggcggctacgtggccctggatgacatctccttcagccctgtgcactgccagaaccagacagagctgctcttctctgctgtggaggccagctgcaactttgagcaggacctgtgcaacttctaccaggacaaggagggccctggctggaccagggtgaaggtgaagcccaacatgtaccgggccggggaccacaccaccggcctgggctactacctgctggccaacaccaagttcaccagccagcccggctacatcggccgcctgtatggccccagcctgcccggcaacctgcagtactgcctgcgcttccactacgccatctacggcttcctgaagatgtctgacaccctggccgtgtacatctttgaagaaaatcatgtggtgcaggagaagatctggagcgtgctggagagcccccggggcgtgtggatgcaggccgagatcaccttcaagaagcccatgcccaccaaggtggtgttcatgagcctgtgcaagagcttctgggactgtggcctggtggccctggatgacatcaccatccagctgggcagctgcagcagcagcgagaagctgcccccacctcctggagagtgcacctttgagcaggatgaatgtaccttcacccaggagaagaggaacagaagctcctggcacagaagaagaggagagacccccaccagctacacaggccccaagggggaccacaccaccggggtgggctactacatgtacatcgaggccagccacatggtgtatggccagaaggcccggctgctgagccggcccctgcggggcgtgtctgggaagcactgcctgaccttcttctaccacatgtatggaggcggcaccggcctgctgtctgtgtacctgaagaaggaggaggacagcgaggagagcctgctgtggaggagaagaggagagcagagcatctcctggctgcgggccctgattgagtacagctgtgagcggcagcaccagatcatctttgaggccatccggggcgtgtccatccgcagtgacatcgccattgatgatgtgaagttccaggccggcccctgtggggagatggaggacaccacccagcagagcagcggctacagcgaggacctgaatgaaattgagtactag

SEQ ID NO: 158691 - DNA, 2880 bp, synthetic construct
  misc_feature 1..2880: note = Description of Artificial Sequence: Synthetic coding sequence
  source 1..2880: mol_type = other DNA
atggaggtgacctgcctgctgctgctggccctgatccccttccactgccggggccagggcgtgtatgccccagcccaggcccagatcgtgcacgccggccaggcctgtgtggtgaaggaggacaacatcagcgagcgggtgtacaccatccgggagggggacaccctgatgctgcagtgcctggtgacaggccacccccggccccaggtgcgctggaccaagacagctggcagcgccagtgacaagttccaggagacctctgtgttcaatgagaccctgagaattgagcgcatcgcccggacccagggcggccgctactactgcaaggcagaaaatggagtgggcgtgcctgccatcaagagcatccgggtggatgtgcagtacctggatgagcccatgctgactgtgcaccagacagtgtctgatgtgcggggcaacttctaccaggagaagacagtgttcctgcgctgcaccgtgaacagcaaccccccagcccgcttcatctggaagaggggcagtgacaccctgagccacagccaggacaacggggtggacatctatgagcccctgtacacccagggcgagaccaaggtgctgaagctgaagaacctgcggccccaggactatgccagctacacctgccaggtgtctgtgagaaatgtgtgtggcatcccagacaaggccatcaccttccggctgaccaacaccacagcccccccagccctgaagctgtctgtgaatgagaccctggtggtgaaccctggagaaaatgtgacagtgcagtgcctgctgactggaggagaccccctgccccagctgcagtggagccacggccctggccccctgcccctgggcgccctggcccagggcggcaccctgagcatccccagcgtgcaggcccgggacagcggctactacaactgcacagccaccaacaacgtgggcaacccagccaagaagacagtgaacctgctggtgcgctccatgaagaatgccaccttccagatcaccccagatgtgatcaaggagagcgagaacatccagctgggccaggacctgaagctgagctgccacgtggatgctgtgccccaggagaaggtgacctaccagtggttcaagaatggcaagccagccaggatgagcaagaggctgctggtgaccagaaatgaccctgagctgcctgctgtgaccagcagcctggagctgattgacctgcacttcagtgactatggcacctacctgtgcatggccagcttccctggggcccctgtgcctgacctgtctgtggaggtgaacatcagcagcgagaccgtgccccccaccatctctgtgcccaagggccgggctgtggtgacagtgcgggagggcagccctgctgagctgcagtgtgaggtgcggggcaagcccaggcctcctgtgctgtggagccgggtggacaaggaggccgccctgctgcccagcggcctgcccctggaggagaccccagatggcaagctgcggctggagcgggtgtcccgggacatgagcggcacctaccgctgccagacagcccgctacaacggcttcaacgtgcggccccgggaggcccaggtgcagctgaatgtgcagagcccctgcttccccccagaggtggagcccagcagccaggatgtgcggcaggccctgggccggcctgtgctgctgcgctgcagcctgctgcggggcagcccccagagaattgccagcgctgtgtggaggttcaagggccagctgctgcccccacctcctgtggtgcctgctgctgctgaggccccagaccatgctgagctgcggctggatgctgtgacccgggacagcagcggcagctatgaatgttctgtgtccaatgatgtgggcagcgctgcctgcctcttccaggtgtctgccaaggcctacagccctgagttctactttgacacccccaaccccaccaggagccacaagctgagcaagaactacagctatgtgctgcagtggacccagcgggagccagatgctgtggaccctgtgctgaactaccgcctgagcatccggcagctgaaccagcacaatgctgtggtgaaggccatccctgtgagaagagtggagaagggccagctgctggagtacatcctgacagacctgcgggtgccccacagctatgaggtgcggctgaccccctacaccaccttcggggccggggacatggccagccgcatcatccactacacagagctgctggccctgcggaccctgagcagtgacaacacctgccactttgaagatgagaagatctgtggctacacccaggacctgacagacaactttgactggacccggcagaatgccctgacccagaaccccaagaggagccccaacacaggccccccaacagacatcagcggcaccccagagggctactacatgttcatcgagaccagccggccccgggagctgggggaccgggcccggctggtgagccccctgtacaatgccagcgccaagttctactgtgtgtccttcttctaccacatgtatggcaagcacatcggcagcctgaacctgctggtgcgcagcagaaataaaggagccctggacacccacgcctggagcctgagcggcaacaagggaaatgtgtggcagcaggcccacgtgcccatcagccccagcggccccttccagatcatctttgagggcgtgcggggccctggctacctgggggacatcgccattgatgatgtgaccctgaagaagggagaatgtcccaggaagcagacagaccccaacaaggtggtggtgatgcctggcagcggggccccctgccagagcagcccccagctgtggggccccatggccatcttcctgctggccctgcagaggtag

SEQ ID NO: 158692 - DNA, 2868 bp, synthetic construct
  misc_feature 1..2868: note = Description of Artificial Sequence: Synthetic coding sequence
  source 1..2868: mol_type = other DNA
atggaggtgacctgcctgctgctgctggccctgatccccttccactgccggggccagggcgtgtatgccccagcccaggcccagatcgtgcacgccggccaggcctgtgtggtgaaggaggacaacatcagcgagcgggtgtacaccatccgggagggggacaccctgatgctgcagtgcctggtgacaggccacccccggccccaggtgcgctggaccaagacagctggcagcgccagtgacaagttccaggagacctctgtgttcaatgagaccctgagaattgagcgcatcgcccggacccagggcggccgctactactgcaaggcagaaaatggagtgggcgtgcctgccatcaagagcatccgggtggatgtgcagtacctggatgagcccatgctgactgtgcaccagacagtgtctgatgtgcggggcaacttctaccaggagaagacagtgttcctgcgctgcaccgtgaacagcaaccccccagcccgcttcatctggaagaggggcagtgacaccctgagccacagccaggacaacggggtggacatctatgagcccctgtacacccagggcgagaccaaggtgctgaagctgaagaacctgcggccccaggactatgccagctacacctgccaggtgtctgtgagaaatgtgtgtggcatcccagacaaggccatcaccttccggctgaccaacaccacagcccccccagccctgaagctgtctgtgaatgagaccctggtggtgaaccctggagaaaatgtgacagtgcagtgcctgctgactggaggagaccccctgccccagctgcagtggagccacggccctggccccctgcccctgggcgccctggcccagggcggcaccctgagcatccccagcgtgcaggcccgggacagcggctactacaactgcacagccaccaacaacgtgggcaacccagccaagaagacagtgaacctgctggtgcgctccatgaagaatgccaccttccagatcaccccagatgtgatcaaggagagcgagaacatccagctgggccaggacctgaagctgagctgccacgtggatgctgtgccccaggagaaggtgacctaccagtggttcaagaatggcaagccagccaggatgagcaagaggctgctggtgaccagaaatgaccctgagctgcctgctgtgaccagcagcctggagctgattgacctgcacttcagtgactatggcacctacctgtgcatggccagcttccctggggcccctgtgcctgacctgtctgtggaggtgaacatcagcagcgagaccgtgccccccaccatctctgtgcccaagggccgggctgtggtgacagtgcgggagggcagccctgctgagctgcagtgtgaggtgcggggcaagcccaggcctcctgtgctgtggagccgggtggacaaggaggccgccctgctgcccagcggcctgcccctggaggagaccccagatggcaagctgcggctggagcgggtgtcccgggacatgagcggcacctaccgctgccagacagcccgctacaacggcttcaacgtgcggccccgggaggcccaggtgcagctgaatgtgcagttccccccagaggtggagcccagcagccaggatgtgcggcaggccctgggccggcctgtgctgctgcgctgcagcctgctgcggggcagcccccagagaattgccagcgctgtgtggaggttcaagggccagctgctgcccccacctcctgtggtgcctgctgctgctgaggccccagaccacgccgagctgcggctggatgctgtgacccgggacagcagcggcagctatgagtgcagcgtgtccaatgatgtgggcagcgctgcctgcctcttccaggtgtctgccaaggcctacagccctgagttctactttgacacccccaaccccaccaggagccacaagctgagcaagaactacagctatgtgctgcagtggacccagcgggagccagatgctgtggaccctgtgctgaactaccgcctgagcatccggcagctgaaccagcacaatgctgtggtgaaggccatccctgtgcggcgggtggagaagggccagctgctggagtacatcctgacagacctgcgggtgccccacagctatgaggtgcggctgaccccctacaccacctttggagctggggacatggccagccgcatcatccactacacagagcccatcaacagccccaacctgagtgacaacacctgccactttgaagatgagaagatctgtggctacacccaggacctgacagacaactttgactggacccggcagaatgccctgacccagaaccccaagaggagccccaacacaggccccccaacagacatcagcggcaccccagagggctactacatgttcatcgagaccagccggccccgggagctgggggaccgggcccggctggtgagccccctgtacaatgccagcgccaagttctactgtgtgtccttcttctaccacatgtatggcaagcacatcggcagcctgaacctgctggtgcgcagcagaaataaaggagccctggacacccacgcctggagcctgagcggcaacaagggaaatgtgtggcagcaggcccacgtgcccatcagccccagcggccccttccagatcatctttgagggcgtgcggggccctggctacctgggggacatcgccattgatgatgtgaccctgaagaagggagaatgtcccaggaagcagacagaccccaacaaggtggtggtgatgcctggcagcggggccccctgccagagcagcccccagctgtggggccccatggccatcttcctgctggccctgcagaggtag

SEQ ID NO: 158693 - DNA, 2922 bp, synthetic construct
  misc_feature 1..2922: note = Description of Artificial Sequence: Synthetic coding sequence
  source 1..2922: mol_type = other DNA
atggaggtgacctgcctgctgctgctggccctgatccccttccactgccggggccagggcgtgtatgccccagcccaggcccagatcgtgcacgccggccaggcctgtgtggtgaaggaggacaacatcagcgagcgggtgtacaccatccgggagggggacaccctgatgctgcagtgcctggtgacaggccacccccggccccaggtgcgctggaccaagacagctggcagcgccagtgacaagttccaggagacctctgtgttcaatgagaccctgagaattgagcgcatcgcccggacccagggcggccgctactactgcaaggcagaaaatggagtgggcgtgcctgccatcaagagcatccgggtggatgtgcagtacctggatgagcccatgctgactgtgcaccagacagtgtctgatgtgcggggcaacttctaccaggagaagacagtgttcctgcgctgcaccgtgaacagcaaccccccagcccgcttcatctggaagaggggcagtgacaccctgagccacagccaggacaacggggtggacatctatgagcccctgtacacccagggcgagaccaaggtgctgaagctgaagaacctgcggccccaggactatgccagctacacctgccaggtgtctgtgagaaatgtgtgtggcatcccagacaaggccatcaccttccggctgaccaacaccacagcccccccagccctgaagctgtctgtgaatgagaccctggtggtgaaccctggagaaaatgtgacagtgcagtgcctgctgactggaggagaccccctgccccagctgcagtggagccacggccctggccccctgcccctgggcgccctggcccagggcggcaccctgagcatccccagcgtgcaggcccgggacagcggctactacaactgcacagccaccaacaacgtgggcaacccagccaagaagacagtgaacctgctggtgcgctccatgaagaatgccaccttccagatcaccccagatgtgatcaaggagagcgagaacatccagctgggccaggacctgaagctgagctgccacgtggatgctgtgccccaggagaaggtgacctaccagtggttcaagaatggcaagccagccaggatgagcaagaggctgctggtgaccagaaatgaccctgagctgcctgctgtgaccagcagcctggagctgattgacctgcacttcagtgactatggcacctacctgtgcatggccagcttccctggggcccctgtgcctgacctgtctgtggaggtgaacatcagcagcgagaccgtgccccccaccatctctgtgcccaagggccgggctgtggtgacagtgcgggagggcagccctgctgagctgcagtgtgaggtgcggggcaagcccaggcctcctgtgctgtggagccgggtggacaaggaggccgccctgctgcccagcggcctgcccctggaggagaccccagatggcaagctgcggctggagcgggtgtcccgggacatgagcggcacctaccgctgccagacagcccgctacaacggcttcaacgtgcggccccgggaggcccaggtgcagctgaatgtgcagttccccccagaggtggagcccagcagccaggatgtgcggcaggccctgggccggcctgtgctgctgcgctgcagcctgctgcggggcagcccccagagaattgccagcgctgtgtggaggttcaagggccagctgctgcccccacctcctgtggtgcctgctgctgctgaggccccagaccacgccgagctgcggctggatgctgtgacccgggacagcagcggcagctatgagtgcagcgtgtccaatgatgtgggcagcgctgcctgcctcttccaggtgtctgccaaggcctacagccctgagttctactttgacacccccaaccccaccaggagccacaagctgagcaagaactacagctatgtgctgcagtggacccagcgggagccagatgctgtggaccctgtgctgaactaccgcctgagcatccggcagctgaaccagcacaatgctgtggtgaaggccatccctgtgcggcgggtggagaagggccagctgctggagtacatcctgacagacctgcgggtgccccacagctatgaggtgcggctgaccccctacaccacctttggagctggggacatggccagccgcatcatccactacacagagcccatcaacagccccaacctgagtgacaacacctgccactttgaagatgagaagatctgtggctacacccaggacctgacagacaactttgactggacccggcagaatgccctgacccagaaccccaagaggagccccaacacaggccccccaacagacatcagcggcaccccagagggctactacatgttcatcgagaccagccggccccgggagctgggggaccgggcccggctggtgagccccctgtacaatgccagcgccaagttctactgtgtgtccttcttctaccacatgtatggcaagcacatcggcagcctgaacctgctggtgcgcagcagaaataaaggagccctggacacccacgcctggagcctgagcggcaacaagggaaatgtgtggcagcaggcccacgtgcccatcagccccagcggccccttccagatcatctttgagggcgtgcggggccctggctacctgggggacatcgccattgatgatgtgaccctgaagaagggagaatgtcccaggaagcagacagaccccaacaagggggcccggcgggagggcggcggcggcgctgagagcggcggcagctgtgcctggaggggcttcctgtctgtggagggcggctgcctgggcctgaacagaggctctgaatgtctgagtgatggcaaccacgtggccctgactgtgtag

SEQ ID NO: 158694 - DNA, 2184 bp, synthetic construct
  misc_feature 1..2184: note = Description of Artificial Sequence: Synthetic coding sequence
  source 1..2184: mol_type = other DNA
atggtgtccttccggctgagcaacaagacagccagccccagcatcaagctgctggtggatgaccccatcgtggtgaaccctggagaggccatcaccctggtgtgtgtgaccaccggcggggagcccgcccccagcctgacctgggtgcgcagctttggcaccctgcctgagaagacagtgctgaatggaggcaccctgaccatcccagccatcaccagtgatgatgctggcacctacagctgcatcgccaacaacaacgtgggcaacccagccaagaagagcaccaacatcatcgtgcgggccctgaagaagggccgcttctggatcaccccagacccctaccacaaggatgacaacatccagatcggccgggaggtgaagatcagctgccaggtggaggccgtgcccagcgaggagctgaccttctcctggttcaagaatggccggcccctgcggagcagcgagaggatggtgatcacccagacagatcctgatgtgtccccaggcaccaccaacctggacatcatcgacctgaagttcacagactttggcacctacacctgtgtggccagcctgaagggcggcggcatcagtgacatcagcattgatgtgaacatcagcagcagcacagtgccccccaacctgactgtgccccaggagaagagccccctggtgacccgggagggggacaccatcgagctgcagtgccaggtgacaggcaagcccaagcccatcatcctgtggagcagagctgacaaggaggtggccatgccagatggctccatgcagatggagagctatgatggcaccctgagaattgtgaatgtgtcccgggagatgagcggcatgtaccgctgccagaccagccagtacaacggcttcaacgtgaagccccgggaggccctggtgcagctgattgtgcagtaccccccagctgtggagcccgccttcctggagatccggcagggccaggacagatctgtgaccatgagctgccgggtgctgcgggcctaccccatccgggtgctgacctatgagtggaggctgggcaacaagctgctgaggacaggccagtttgacagccaggagtacacagaatatgctgtgaagagcctgagcaatgaaaattatggagtgtacaactgcagcatcatcaatgaggccggggccggccgctgcagcttcctggtgacaggcaaggcctatgcccctgagttctactatgacacctacaaccctgtgtggcagaacagacaccgggtgtacagctacagcctgcagtggacccagatgaacccagatgctgtggacagaattgtggcctaccgcctgggcatccggcaggccggccagcagcgctggtgggagcaggagatcaagatcaatggaaacatccagaagggggagctgatcacctacaacctgacagagctgatcaagccagaggcctatgaggtgcggctgacccccctgaccaagtttggagagggggacagcaccatccgggtcatcaagtacagcgcccctgtgaacccccacctgcgggagttccactgcggctttgaagatggcaacatctgcctcttcacccaggatgacacagacaactttgactggaccaagcagagcacagccaccaggaacaccaagtacacccccaacacaggccccaatgctgacaggagcggcagcaaggagggcttctacatgtacatcgagaccagccggccccggctggagggggagaaggcccggctgctgagccctgtgttcagcatcgcccccaagaacccctacggccccaccaacacagcctactgcttctccttcttctaccacatgtatggccagcacatcggcgtgctgaatgtgtacctgcggctgaagggccagaccaccatcgagaaccccctgtggagcagcagcggcaacaagggccagcgctggaatgaggcccacgtgaacatctaccccatcaccagcttccagctgatctttgagggcatccggggccctggcatcgagggggacatcgccattgatgatgtgtccattgctgaaggagaatgtgccaagcaggacctggccaccaagaacagcgtggatggagctgtgggcatcctggtgcacatctggctgttccccatcatcgtgctgatcagcatcctgagccccaggaggtag

SEQ ID NO: 158695 - DNA, 477 bp, synthetic construct
  misc_feature 1..477: note = Description of Artificial Sequence: Synthetic coding sequence
  source 1..477: mol_type = other DNA
atgtacatcgagaccagccggccccggctggagggggagaaggcccggctgctgagccctgtgttcagcatcgcccccaagaacccctacggccccaccaacacagcctactgcttctccttcttctaccacatgtatggccagcacatcggcgtgctgaatgtgtacctgcggctgaagggccagaccaccatcgagaaccccctgtggagcagcagcggcaacaagggccagcgctggaatgaggcccacgtgaacatctaccccatcaccagcttccagctgatctttgagggcatccggggccctggcattgaaggagacatcgccattgatgatgtgtccattgctgagggggagtgtgccaagcaggacctggccaccaagaacagcgtggatggagctgtgggcatcctggtgcacatctggctgttccccatcatcgtgctgatcagcatcctgagccccaggaggtag

SEQ ID NO: 158696 - DNA, 3078 bp, synthetic construct
  misc_feature 1..3078: note = Description of Artificial Sequence: Synthetic coding sequence
  source 1..3078: mol_type = other DNA
atgtctgtgtggagcgctggcctgctgcggagcgccaggagaagaagaagaggaagaacagatggaagacgcttcctgctgcggcgggctgtgcccggccacctgggcctggcccgggcccgggtggagcgggcctggctggccgccggcctgctgaaggtgcccctgcggaccccctgggccggctacgtgcacgtgcacgtgaagatggacctgctgtatggcctggtgtggctgctgactgtgctgctggagggcatcagcggccagggcgtgtatgcccccccaacagtgcgcatcgtgcacagcggcctggcctgcaacatcgaggaggagcgctacagcgagcgggtgtacaccatccgggagggggagaccctggagctgacctgcctggtgacaggccacccccggccccagatccgctggaccaagacagctggcagcgccagtgaccgcttccaggacagcagcgtcttcaatgagaccctgcgcatcaccaacatccagaggcaccagggcggccgctactactgcaaggccgagaatggcctgggcagccctgccatcaagagcatccgggtggatgtgtactacctggatgatcctgtggtgacagtgcaccagagcattggagaggccaaggagcagttctactatgaaagaacagtgttcctgcgctgtgtggccaacagcaacccccctgtgcgctacagctggaggcggggccaggaggtgctgctgcagggcagtgacaagggcgtggagatctatgagcccttcttcacccagggcgagaccaagatcctgaagctgaagaacctgcggccccaggactatgccaactacagctgcatcgcctctgtgagaaatgtgtgcaacatcccagacaagatggtgtccttccggctgagcaacaagacagccagccccagcatcaagctgctggtggatgaccccatcgtggtgaaccctggagaggccatcaccctggtgtgtgtgaccaccggcggggagcccgcccccagcctgacctgggtgcgcagctttggcaccctgcctgagaagacagtgctgaatggaggcaccctgaccatcccagccatcaccagtgatgatgctggcacctacagctgcatcgccaacaacaacgtgggcaacccagccaagaagagcaccaacatcatcgtgcgggccctgaagaagggccgcttctggatcaccccagacccctaccacaaggatgacaacatccagatcggccgggaggtgaagatcagctgccaggtggaggccgtgcccagcgaggagctgaccttctcctggttcaagaatggccggcccctgcggagcagcgagaggatggtgatcacccagacagatcctgatgtgtccccaggcaccaccaacctggacatcatcgacctgaagttcacagactttggcacctacacctgtgtggccagcctgaagggcggcggcatcagtgacatcagcattgatgtgaacatcagcagcagcacagtgccccccaacctgactgtgccccaggagaagagccccctggtgacccgggagggggacaccatcgagctgcagtgccaggtgacaggcaagcccaagcccatcatcctgtggagcagagctgacaaggaggtggccatgccagatggctccatgcagatggagagctatgatggcaccctgagaattgtgaatgtgtcccgggagatgagcggcatgtaccgctgccagaccagccagtacaacggcttcaacgtgaagccccgggaggccctggtgcagctgattgtgcagtaccccccagctgtggagcccgccttcctggagatccggcagggccaggacagatctgtgaccatgagctgccgggtgctgcgggcctaccccatccgggtgctgacctatgagtggaggctgggcaacaagctgctgaggacaggccagtttgacagccaggagtacacagaatatgctgtgaagagcctgagcaatgaaaattatggagtgtacaactgcagcatcatcaatgaggccggggccggccgctgcagcttcctggtgacaggcaaggcctatgcccctgagttctactatgacacctacaaccctgtgtggcagaacagacaccgggtgtacagctacagcctgcagtggacccagatgaacccagatgctgtggacagaattgtggcctaccgcctgggcatccggcaggccggccagcagcgctggtgggagcaggagatcaagatcaatggaaacatccagaagggggagctgatcacctacaacctgacagagctgatcaagccagaggcctatgaggtgcggctgacccccctgaccaagtttggagagggggacagcaccatccgggtcatcaagtacagcgcccctgtgaacccccacctgcgggagttccactgcggctttgaagatggcaacatctgcctcttcacccaggatgacacagacaactttgactggaccaagcagagcacagccaccaggaacaccaagtacacccccaacacaggccccaatgctgacaggagcggcagcaaggagggcttctacatgtacatcgagaccagccggccccggctggagggggagaaggcccggctgctgagccctgtgttcagcatcgcccccaagaacccctacggccccaccaacacagcctactgcttctccttcttctaccacatgtatggccagcacatcggcgtgctgaatgtgtacctgcggctgaagggccagaccaccatcgagaaccccctgtggagcagcagcggcaacaagggccagcgctggaatgaggcccacgtgaacatctaccccatcaccagcttccagctgatctttgagggcatccggggccctggcatcgagggggacatcgccattgatgatgtgtccattgctgaaggagaatgtgccaagcaggacctggccaccaagaacagcgtggatggagctgtgggcatcctggtgcacatctggctgttccccatcatcgtgctgatcagcatcctgagccccaggaggtag

SEQ ID NO: 158697 - DNA, 2184 bp, synthetic construct; identical to SEQ ID NO: 158694
  misc_feature 1..2184: note = Description of Artificial Sequence: Synthetic coding sequence
  source 1..2184: mol_type = other DNA

SEQ ID NO: 158698 - DNA, 2871 bp, synthetic construct
  misc_feature 1..2871: note = Description of Artificial Sequence: Synthetic coding sequence
  source 1..2871: mol_type = other DNA
atggacctgctgtatggcctggtgtggctgctgactgtgctgctggagggcatcagcggccagggcgtgtatgccccacccaccgtgagaattgtgcacagcggcctggcctgcaacatcgaggaggagcgctacagcgagcgggtgtacaccatccgggagggggagaccctggagctgacctgcctggtgacaggccacccccggccccagatccgctggaccaagacagctggcagcgccagtgaccgcttccaggacagctctgtgttcaatgagaccctgcgcatcaccaacatccagaggcaccagggcggccgctactactgcaaggcagaaaatggcctgggcagccctgccatcaagagcatccgggtggatgtgtactacctggatgatcctgtggtgacagtgcaccagagcatcggggaggccaaggagcagttctactatgaaagaacagtgttcctgcgctgtgtggccaacagcaacccccctgtgcgctacagctggaggcggggccaggaggtgctgctgcagggcagtgacaagggcgtggagatctatgagcccttcttcacccagggcgagaccaagatcctgaagctgaagaacctgcggccccaggactatgccaactacagctgcatcgcctctgtgagaaatgtgtgcaacatcccagacaagatggtgtccttccggctgagcaacaagacagccagccccagcatcaagctgctggtggatgaccccatcgtggtgaaccctggagaggccatcaccctggtgtgtgtgaccactggaggagagcccgcccccagcctgacctgggtgcgcagctttggcaccctgcctgagaagacagtgctgaatggaggcaccctgaccatcccagccatcaccagtgatgatgctggcacctacagctgcatcgccaacaacaacgtgggcaacccagccaagaagagcaccaacatcatcgtgcgggccctgaagaagggccgcttctggatcaccccagacccctaccacaaggatgacaacatccagatcggccgggaggtgaagatcagctgccaggtggaggccgtgcccagcgaggagctgaccttctcctggttcaagaatggccggcccctgcggagcagcgagaggatggtgatcacccagacagatcctgatgtgtccccaggcaccaccaacctggacatcatcgacctgaagttcacagactttggcacctacacctgtgtggccagcctgaagggcggcggcatcagtgacatcagcattgatgtgaacatcagcagcagcacagtgccccccaacctgactgtgccccaggagaagagccccctggtgacccgggagggggacaccatcgagctgcagtgccaggtgacaggcaagcccaagcccatcatcctgtggagcagagctgacaaggaggtggccatgccagatggctccatgcagatggagagctatgatggcaccctgcgcatcgtgaatgtgtcccgggagatgagcggcatgtaccgctgccagaccagccagtacaacggcttcaacgtgaagccccgggaggccctggtgcagctgattgtgcagtacccacctgctgtggagcccgccttcctggagatccggcagggccaggacagatctgtgaccatgagctgccgggtgctgcgggcctaccccatccgggtgctgacctatgagtggaggctgggcaacaagctgctgaggacaggccagtttgacagccaggagtacacagaatatgctgtgaagagcctgagcaatgaaaactacggcgtgtacaactgcagcatcatcaatgaagctggagctggccgctgcagcttcctggtgacaggcaaggcctatgcccctgagttctactatgacacctacaaccctgtgtggcagaacagacaccgggtgtacagctacagcctgcagtggacccagatgaacccagatgctgtggaccgcatcgtggcctaccgcctgggcatccggcaggccggccagcagcgctggtgggagcaggagatcaagatcaatggaaacatccagaagggggagctgatcacctacaacctgacagagctgatcaagccagaggcctatgaggtgcggctgacccccctgaccaagtttggagagggggacagcaccatccgggtcatcaagtacagcgcccctgtgaacccccacctgcgggagttccactgcggctttgaagatggcaacatctgcctcttcacccaggatgacacagacaactttgactggaccaagcagagcacagccaccaggaacaccaagtacacccccaacacaggccccaatgctgacagaagtggcagcaaggagggcttctacatgtacatcgagaccagccggccccggctggagggggagaaggcccggctgctgagccctgtgttcagcatcgcccccaagaacccctacggccccaccaacacagcctactgcttctccttcttctaccacatgtatggccagcacatcggcgtgctgaatgtgtacctgcggctgaagggccagaccaccatcgagaaccccctgtggagcagcagcggcaacaagggccagcgctggaatgaggcccacgtgaacatctaccccatcaccagcttccagctgatctttgagggcatccggggccctggcattgaaggagacatcgccattgatgatgtgtccattgctgagggggagtgtgccaagcaggacctggccaccaagaacagcgtggatggagctgtgggcatcctggtgcacatctggctgttccccatcatcgtgctgatcagcatcctgagccccaggaggtag

SEQ ID NO: 158699 - DNA, 1143 bp, synthetic construct
  misc_feature 1..1143: note = Description of Artificial Sequence: Synthetic coding sequence
  source 1..1143: mol_type = other DNA
atgcgctggctgctgctgtactatgccctgtgcttcagcctgagcaaggccagcgcccacacagtggagctgaacaacatgtttggccagatccagagccctggctacccagacagctaccccagcgacagcgaggtgacctggaacatcaccgtgcctgatggcttccgcatcaagctgtacttcatgcacttcaacctggagagcagctacctgtgtgaatatgactatgtgaaggtggagacagaggaccaggtgctggccaccttctgtggccgggagaccacagacacagagcagaccccaggccaggaggtggtgctgagccctggcagcttcatgagcatcaccttcagaagtgacttcagcaatgaggagcgcttcaccggctttgatgcccactacatggctgtggatgtggatgagtgcaaggagagagaagatgaggagctgagctgtgaccactactgccacaactacatcggcggctactactgcagctgccgcttcggctacatcctgcacacagacaacagaacctgccgggtggagtgcagcgacaacctcttcacccagaggactggagtcatcaccagcccagacttccccaacccctaccccaagagcagtgaatgtctgtacaccatcgagctggaggagggcttcatggtgaacctgcagtttgaggacatctttgatattgaggaccaccctgaggtgccctgcccctatgactacatcaagatcaaggtgggccccaaggtgctgggccccttctgtggggagaaggcccctgagcccatcagcacccagagccacagcgtgctgatcctcttccacagcgacaacagcggggagaacagaggctggaggctgagctacagagctgctggaaatgaatgtcctgagctgcagccccctgtgcacggcaagattgagcccagccaggccaagtacttcttcaaggaccaggtgctggtgtcctgtgacaccggctacaaggtgctgaaggacaacgtggagatggacaccttccagatcgagtgcctgaaggatggcacctggagcaacaagatccccacctgcaagaagaatgaaattgacctggagagcgagctgaagtctgagcaggtgacagaatag

SEQ ID NO: 158700 - DNA, 2187 bp, synthetic construct
  misc_feature 1..2187: note = Description of Artificial Sequence: Synthetic coding sequence
  source 1..2187: mol_type = other DNA
atgcgctggctgctgctgtactatgccctgtgcttcagcctgagcaaggccagcgcccacacagtggagctgaacaacatgtttggccagatccagagccctggctacccagacagctaccccagcgacagcgaggtgacctggaacatcaccgtgcctgatggcttccgcatcaagctgtacttcatgcacttcaacctggagagcagctacctgtgtgaatatgactatgtgaaggtggagacagaggaccaggtgctggccaccttctgtggccgggagaccacagacacagagcagaccccaggccaggaggtggtgctgagccctggcagcttcatgagcatcaccttcagaagtgacttcagcaatgaggagcgcttcaccggctttgatgcccactacatggctgtggatgtggatgagtgcaaggagagagaagatgaggagctgagctgtgaccactactgccacaactacatcggcggctactactgcagctgccgcttcggctacatcctgcacacagacaacagaacctgccgggtggagtgcagcgacaacctcttcacccagaggactggagtcatcaccagcccagacttccccaacccctaccccaagagcagtgaatgtctgtacaccatcgagctggaggagggcttcatggtgaacctgcagtttgaggacatctttgatattgaggaccaccctgaggtgccctgcccctatgactacatcaagatcaaggtgggccccaaggtgctgggccccttctgtggggagaaggcccctgagcccatcagcacccagagccacagcgtgctgatcctcttccacagcgacaacagcggggagaacagaggctggaggctgagctacagagctgctggaaatgaatgtcctgagctgcagccccctgtgcacggcaagattgagcccagccaggccaagtacttcttcaaggaccaggtgctggtgtcctgtgacaccggctacaaggtgctgaaggacaacgtggagatggacaccttccagatcgagtgcctgaaggatggcacctggagcaacaagatccccacctgcaagatcgtggactgccgggcccctggagagctggagcacggcctcatcaccttcagcaccaggaacaacctgaccacctacaagtctgagatcaagtacagctgccaggagccctactacaagatgctgaacaacaacacaggcatctacacctgcagcgcccagggcgtgtggatgaacaaggtgctgggccgcagcctgcccacctgcctgcctgaatgtggccagcccagccgcagcctgcccagcctggtgaagaggatcattggaggaagaaatgctgagcccggcctcttcccctggcaggccctgattgtggtggaggacaccagccgggtgcccaatgacaagtggtttggaagtggggccctgctgagcgcctcctggatcctgacagctgcccacgtgctgcggagccagaggcgggacaccaccgtcatccctgtgtccaaggagcacgtgacagtgtacctgggcctgcatgatgtgcgggacaagtctggagctgtgaacagcagcgctgcccgggtggtgctgcacccagacttcaacatccagaactacaaccacgacatcgccctggtgcagctgcaggagcctgtgcccctgggcccccacgtgatgcctgtgtgcctgccccggctggagcctgagggccctgccccccacatgctgggcctggtggccggctggggcatcagcaaccccaacgtgacagtggatgagatcatcagcagcggcaccaggaccctgagtgatgtgctgcagtatgtgaagctgcctgtggtgccccatgctgagtgcaagaccagctatgagagccgcagcggcaactacagcgtgacagagaacatgttctgtgccggctactatgaaggaggcaaggacacctgcctgggggacagcggcggggccttcgtcatctttgatgacctgagccagcgctgggtggtgcagggcctggtgtcctggggcggcccagaagaatgtggcagcaagcaggtgtatggagtgtacaccaaggtgagcaactacgtggactgggtgtgggagcagatgggcctgccccagagcgtggtggagccccaggtggagaggtag

SEQ ID NO: 158701 - DNA, 2100 bp, synthetic construct
  misc_feature 1..2100: note = Description of Artificial Sequence: Synthetic coding sequence
  source 1..2100: mol_type = other DNA
atgcgctggctgctgctgtactatgccctgtgcttcagcctgagcaaggccagcgcccacacagtggagctgaacaacatgtttggccagatccagagccctggctacccagacagctaccccagcgacagcgaggtgacctggaacatcaccgtgcctgatggcttccgcatcaagctgtacttcatgcacttcaacctggagagcagctacctgtgtgaatatgactatgtgaaggtggagacagaggaccaggtgctggccaccttctgtggccgggagaccacagacacagagcagaccccaggccaggaggtggtgctgagccctggcagcttcatgagcatcaccttcagaagtgacttcagcaatgaggagcgcttcaccggctttgatgcccactacatggctgtggatgtggatgagtgcaaggagagagaagatgaggagctgagctgtgaccactactgccacaactacatcggcggctactactgcagctgccgcttcggctacatcctgcacacagacaacagaacctgccgggtggagtgcagcgacaacctcttcacccagaggactggagtcatcaccagcccagacttccccaacccctaccccaagagcagtgaatgtctgtacaccatcgagctggaggagggcttcatggtgaacctgcagtttgaggacatctttgatattgaggaccaccctgaggtgccctgcccctatgactacatcaagatcaaggtgggccccaaggtgctgggccccttctgtggggagaaggcccctgagcccatcagcacccagagccacagcgtgctgatcctcttccacagcgacaacagcggggagaacagaggctggaggctgagctacagagctgctggaaatgaatgtcctgagctgcagccccctgtgcacggcaagattgagcccagccaggccaagtacttcttcaaggaccaggtgctggtgtcctgtgacaccggctacaaggtgctgaaggacaacgtggagatggacaccttccagatcgagtgcctgaaggatggcacctggagcaacaagatccccacctgcaagatcgtggactgccgggcccctggagagctggagcacggcctcatcaccttcagcaccaggaacaacctgaccacctacaagtctgagatcaagtacagctgccaggagccctactacaagatgctgaacaacaacacaggcatctacacctgcagcgcccagggcgtgtggatgaacaaggtgctgggccgcagcctgcccacctgcctgcctgtgtgtggcctgcccaagttcagcaggaagctgatggcccgcatcttcaacggccggcctgcccagaagggcaccaccccctggatcgccatgctgagccacctgaatggccagcccttctgtggcggcagcctgctgggcagctcctggatcgtgacagctgcccactgcctgcaccagagcctggaccctgaggaccccaccctgcgggacagcgacctgctgagccccagcgacttcaagatcatcctgggcaagcactggaggctgcggagtgatgaaaatgagcagcacctgggcgtgaagcacaccaccctgcacccccagtatgaccccaacacctttgaaaatgatgtggccctggtggagctgctggagagccctgtgctgaatgcctttgtgatgcccatctgcctgcctgagggcccccagcaggagggcgccatggtgattgtgtctggctggggcaagcagttcctgcagcgcttccctgagaccctgatggagattgagatccccatcgtggaccacagcacctgccagaaggcctatgcccccctgaagaagaaggtgacccgggacatgatctgtgccggggagaaggagggcggcaaggatgcctgtgccggggacagcggcggccccatggtgaccctgaaccgggagcggggccagtggtacctggtgggcaccgtgtcctggggagatgactgtgggaagaaggacagatatggagtgtacagctacatccaccacaacaaggactggatccagagggtgactggagtgaggaactag

SEQ ID NO: 158702 - DNA, 1848 bp, synthetic construct
  misc_feature 1..1848: note = Description of Artificial Sequence: Synthetic coding sequence
  source 1..1848: mol_type = other DNA
atgagcatcaccttcagaagtgacttcagcaatgaggagcgcttcaccggctttgatgcccactacatggctgtggatgtggatgagtgcaaggagcgggaggatgaggagctgagctgtgaccactactgccacaactacatcggcggctactactgcagctgccgcttcggctacatcctgcacacagacaacagaacctgccgggtggagtgcagcgacaacctcttcacccagaggactggagtcatcaccagcccagacttccccaacccctaccccaagagcagcgagtgcctgtacaccatcgagctggaggagggcttcatggtgaacctgcagtttgaggacatctttgatattgaggaccaccctgaggtgccctgcccctatgactacatcaagatcaaggtgggccccaaggtgctgggccccttctgtggggagaaggcccctgagcccatcagcacccagagccacagcgtgctgatcctcttccacagcgacaacagcggagaaaatagaggctggaggctgagctacagagctgctggaaatgaatgtcctgagctgcagccccctgtgcacggcaagattgagcccagccaggccaagtacttcttcaaggaccaggtgctggtgtcctgtgacaccggctacaaggtgctgaaggacaacgtggagatggacaccttccagattgaatgtctgaaggatggcacctggagcaacaagatccccacctgcaagatcgtggactgccgggcccctggagagctggagcacggcctcatcaccttcagcaccaggaacaacctgaccacctacaagtctgagatcaagtacagctgccaggagccctactacaagatgctgaacaacaacacaggcatctacacctgcagcgcccagggcgtgtggatgaacaaggtgctgggccgcagcctgcccacctgcctgcctgaatgtggccagcccagccgcagcctgcccagcctggtgaagaggatcatcggcggcagaaatgctgagcccggcctcttcccctggcaggccctgattgtggtggaggacaccagccgggtgcccaatgacaagtggtttggcagcggggccctgctgagcgcctcctggatcctgacagctgcccacgtgctgcggagccagaggcgggacaccaccgtcatccctgtgtccaaggagcacgtgacagtgtacctgggcctgcatgatgtgcgggacaagagcggggctgtgaacagcagcgctgcccgggtggtgctgcacccagacttcaacatccagaactacaaccacgacatcgccctggtgcagctgcaggagcctgtgcccctgggcccccacgtgatgcctgtgtgcctgccccggctggagcctgagggccctgccccccacatgctgggcctggtggccggctggggcatcagcaaccccaacgtgacagtggatgagatcatcagcagcggcaccaggaccctgagtgatgtgctgcagtatgtgaagctgcctgtggtgccccatgctgagtgcaagaccagctatgagagccgcagcggcaactacagcgtgacagagaacatgttctgtgccggctactatgagggcggcaaggacacctgcctgggggacagcggcggggcctttgtgatctttgatgacctgagccagcgctgggtggtgcagggcctggtgtcctggggcggccctgaggagtgtggcagcaagcaggtgtatggagtgtacaccaaggtgagcaactacgtggactgggtgtgggagcagatgggcctgccccagagcgtggtggagccccaggtggagaggtag

SEQ ID NO: 158703 - DNA, 249 bp, synthetic construct
  misc_feature 1..249: note = Description of Artificial Sequence: Synthetic coding sequence
  source 1..249: mol_type = other DNA
atgttctgtgccggctactatgaaggaggcaaggacacctgcctgggggacagcggcggggccttcgtcatctttgatgacctgagccagcgctgggtggtgcagggcctggtgtcctggggcggcccagaagaatgtggcagcaagcaggtgtatggagtgtacaccaaggtgagcaactacgtggactgggtgtgggagcagatgggcctgccccagagcgtggtggagccccaggtggagaggtag

SEQ ID NO: 158704 - DNA, 1443 bp, synthetic construct
  misc_feature 1..1443: note = Description of Artificial Sequence: Synthetic coding sequence
  source 1..1443: mol_type = other DNA
atgagcatcaccttcagaagtgacttcagcaatgaggagcgcttcaccggctttgatgcccactacatggctgtggatgtggatgagtgcaaggagcgggaggatgaggagctgagctgtgaccactactgccacaactacatcggcggctactactgcagctgccgcttcggctacatcctgcacacagacaacagaacctgccgggtggagtgcagcgacaacctcttcacccagaggactggagtcatcaccagcccagacttccccaacccctaccccaagagcagcgagtgcctgtacaccatcgagctggaggagggcttcatggtgaacctgcagtttgaggacatctttgatattgaggaccaccctgaggtgccctgcccctatgactacatcaagatcaaggtgggccccaaggtgctgggccccttctgtggggagaaggcccctgagcccatcagcacccagagccacagcgtgctgatcctcttccacagcgacaacagcggagaaaatagaggctggaggctgagctacagagctgctggaaatgaatgtcctgagctgcagccccctgtgcacggcaagattgagcccagccaggccaagtacttcttcaaggaccaggtgctggtgtcctgtgacaccggctacaaggtgctgaaggacaacgtggagatggacaccttccagattgaatgtctgaaggatggcacctggagcaacaagatccccacctgcaagatcgtggactgccgggcccctggagagctggagcacggcctcatcaccttcagcaccaggaacaacctgaccacctacaagtctgagatcaagtacagctgccaggagccctactacaagatgctgaacaacaacacaggcatctacacctgcagcgcccagggcgtgtggatgaacaaggtgctgggccgcagcctgcccacctgcctgcctgaatgtggccagcccagccgcagcctgcccagcctggtgaagaggatcatcggcggcagaaatgctgagcccggcctcttcccctggcaggccctgattgtggtggaggacaccagccgggtgcccaatgacaagtggtttggcagcggggccctgctgagcgcctcctggatcctgacagctgcccacgtgctgcggagccagaggcgggacaccaccgtcatccctgtgtccaaggagcacgtgacagtgtacctgggcctgcatgatgtgcgggacaagagcggggctgtgaacagcagcgctgcccgggtggtgctgcacccagacttcaacatccagaactacaaccacgacatcgccctggtgcagctgcaggagcctgtgcccctgggcccccacgtgatgcctgtgtgcctgccccggctggagcccccaggcggccgcctgggccacctgcagagccagtgtgacagctag

SEQ ID NO: 158705 - DNA, 2061 bp, synthetic construct
  misc_feature 1..2061: note = Description of Artificial Sequence: Synthetic coding sequence
  source 1..2061: mol_type = other DNA
atgaggctgctgaccctgctgggcctgctgtgtggctctgtggccacccccctgggccccaagtggccagagcctgtgtttggccgcctggccagccctggcttccctggagaatatgccaatgaccaggagcggcgctggaccctgacagcccctcctggctaccgcctgcggctgtacttcacccactttgacctggagctgagccacctgtgtgaatatgactttgtgaagctgagcagcggggccaaggtgctggccaccctgtgtggccaggagagcacagacacagagcgggcccctgggaaggacaccttctacagcctgggcagcagcctggacatcaccttcagaagtgactacagcaatgagaagcccttcaccggctttgaggccttctatgctgctgaagatattgatgagtgccaggtggcccctggagaggcccccacctgtgaccaccactgccacaaccacctgggcggcttctactgcagctgcagagctggctacgtgctgcacaggaacaagaggacctgcagcgccctgtgcagcggccaggtgttcacccagaggtctggagagctgagcagccctgagtacccccggccctaccccaagctgagcagctgcacctacagcatcagcctggaggagggcttcagcgtcatcctggactttgtggagagctttgatgtggagacccaccctgagaccctgtgcccctatgacttcctgaagatccagacagaccgggaggagcacggccccttctgtgggaagaccctgccccacagaattgagaccaagagcaacacagtgaccatcacctttgtgacagatgaaagtggggaccacacaggctggaagatccactacaccagcacagcccagccctgcccctaccccatggccccacccaacggccacgtgtcccctgtgcaggccaagtacatcctgaaggacagcttcagcatcttctgtgagaccggctatgagctgctgcagggccacctgcccctgaagagcttcaccgctgtgtgccagaaggatggctcctgggaccggcccatgcctgcctgcagcatcgtggactgtggccccccagatgacctgcccagcggccgggtggagtacatcactggacctggggtgaccacctacaaggccgtcatccagtacagctgtgaggagaccttctacaccatgaaggtgaatgatggcaagtatgtgtgtgaggctgatggcttctggaccagcagcaagggggagaagagcctgcctgtgtgtgagcctgtgtgtggcctgagcgcccggaccactggaggccgcatctacggcggccagaaggccaagccaggggacttcccctggcaggtgctgatcctgggcggcaccacagctgctggggccctgctgtatgacaactgggtgctgacagctgcccatgctgtgtatgagcagaagcatgatgccagcgccctggacatccgcatgggcaccctgaagaggctgagcccccactacacccaggcctggagcgaggccgtgttcatccacgagggctacacccatgatgctggctttgacaatgacatcgccctgatcaagctgaacaacaaggtggtgatcaacagcaacatcacccccatctgcctgcccaggaaggaggccgagagcttcatgaggacagatgacattggaacagccagcggctggggcctgacccagaggggcttcctggccaggaacctgatgtatgtggacatccccatcgtggaccaccagaagtgcacagctgcctatgagaagccaccctacccccggggctctgtgacagccaacatgctgtgtgccggcctggagagcggcggcaaggacagctgccgcggggacagcggcggggccctggtgttcctggacagcgagacagagcgctggtttgtgggcggcatcgtgtcctggggctccatgaactgtggggaggccggccagtatggagtgtacaccaaggtgatcaactacatcccctggattgagaacatcatcagtgacttctag

SEQ ID NO: 158706 - DNA, 558 bp, synthetic construct
  misc_feature 1..558: note = Description of Artificial Sequence: Synthetic coding sequence
  source 1..558: mol_type = other DNA
atgaggctgctgaccctgctgggcctgctgtgtggctctgtggccacccccctgggccccaagtggccagagcctgtgtttggccgcctggccagccctggcttccctggagaatatgccaatgaccaggagcggcgctggaccctgacagcccctcctggctaccgcctgcggctgtacttcacccactttgacctggagctgagccacctgtgtgaatatgactttgtgaagctgagcagcggggccaaggtgctggccaccctgtgtggccaggagagcacagacacagagcgggcccctgggaaggacaccttctacagcctgggcagcagcctggacatcaccttcagaagtgactacagcaatgagaagcccttcaccggctttgaggccttctatgctgctgaagatattgatgagtgccaggtggcccctggagaggcccccacctgtgaccaccactgccacaaccacctgggcggcttctactgcagctgcagagctggctacgtgctgcacaggaacaagaggacctgcagcgagcagagcctgtag

SEQ ID NO: 158707 - DNA, 1089 bp, synthetic construct
  misc_feature 1..1089: note = Description of Artificial Sequence: Synthetic coding sequence
  source 1..1089: mol_type = other DNA
atggccgcccccagggtcttccccctgagctgtgctgtgcagcagtatgcctggggcaagatgggcagcaacagcgaggtggcccggctgctggccagcagtgaccccctggcccagattgctgaggacaagccctatgcagagctgtggatgggcacccaccccagaggagatgccaagatcctggacaaccgcatcagccagaagaccctgagccagtggattgctgagaaccaggacagcctgggcagcaaggtgaaggacaccttcaatggaaacctgcccttcctgttcaaggtgctgtctgtggagacccccctgagcatccaggcccaccccaacaaggagctggccgagaagctgcacctgcaggccccccagcactacccagatgccaaccacaagccagagatggccatcgccctgacccccttccagggcctgtgtggcttccggcctgtggaggagatcgtgaccttcctgaagacagctgctggcaacaacatggaggacatctttggagagctgctgctgcagctgcaccagcagtacccaggggacatcggctgctttgccatctacttcctgaacctgctgaccctgaagccaggagaggccatgttcctggaggccaacgtgccccacgcctacctgaagggggactgtgtggagtgcatggcctgcagcgacaacacagtgcgggccggcctgacccccaagttcattgatgtgcccaccctgtgtgagatgctgagctacacccccagcagcagcaaggacaggctcttcctgcccaccaggagccaggaggacccctacctgagcatctatgacccccctgtgcctgacttcaccatcatgaagacagaggtgcccggctctgtgacagagtacaaggtgctggccctggacagcgccagcatcctgctgatggtgcagggcaccgtgattgccagcacccccaccacccagacccccatccccctgcagagaggaggagtgctcttcatcggggccaatgaatctgtgtccctgaagctgacagagcccaaggacctgctgatcttccgggcctgctgcctgctgtag

SEQ ID NO: 158708 - DNA, 1272 bp, synthetic construct
  misc_feature 1..1272: note = Description of Artificial Sequence: Synthetic coding sequence
  source 1..1272: mol_type = other DNA
atggccgcccccagggtcttccccctgagctgtgctgtgcagcagtatgcctggggcaagatgggcagcaacagcgaggtggcccggctgctggccagcagtgaccccctggcccagattgctgaggacaagccctatgcagagctgtggatgggcacccaccccagaggagatgccaagatcctggacaaccgcatcagccagaagaccctgagccagtggattgctgagaaccaggacagcctgggcagcaaggtgaaggacaccttcaatggaaacctgcccttcctgttcaaggtgctgtctgtggagacccccctgagcatccaggcccaccccaacaaggagctggccgagaagctgcacctgcaggccccccagcactacccagatgccaaccacaagccagagatggccatcgccctgacccccttccagggcctgtgtggcttccggcctgtggaggagatcgtgaccttcctgaagaaggtgcctgagttccagttcctgattggagatgaagctgccacccacctgaagcagaccatgagccatgacagccaggccgtggccagcagcctgcagagctgcttcagccacctgatgaagtctgagaagaaggtggtggtggagcagctgaacctgctggtgaagaggatcagccagcaggccgccgccggcaacaacatggaggacatctttggagagctgctgctgcagctgcaccagcagtacccaggggacatcggctgctttgccatctacttcctgaacctgctgaccctgaagccaggagaggccatgttcctggaggccaacgtgccccacgcctacctgaagggggactgtgtggagtgcatggcctgcagcgacaacacagtgcgggccggcctgacccccaagttcattgatgtgcccaccctgtgtgagatgctgagctacacccccagcagcagcaaggacaggctcttcctgcccaccaggagccaggaggacccctacctgagcatctatgacccccctgtgcctgacttcaccatcatgaagacagaggtgcccggctctgtgacagagtacaaggtgctggccctggacagcgccagcatcctgctgatggtgcagggcaccgtcatcgccagcacccccaccacccagacccccatccccctgcagagaggaggagtgctcttcatcggggccaatgaatctgtgtccctgaagctgacagagcccaaggacctgctgatcttccgggcctgctgcctgctgtag

SEQ ID NO: 158709 - DNA, 804 bp, synthetic construct
  misc_feature 1..804: note = Description of Artificial Sequence: Synthetic coding sequence
  source 1..804: mol_type = other DNA
atgggcagcaacagcgaggtggcccggctgctggccagcagtgaccccctggcccagattgctgaggacaagccctatgcagagctgtggatgggcacccaccccagaggagatgccaagatcctggacaaccgcatcagccagaagaccctgagccagtggattgctgagaaccaggacagcctgggcagcaaggtgaaggacaccttcaatggaaacctgcccttcctgttcaaggtgctgtctgtggagacccccctgagcatccaggcccaccccaacaaggagctggccgagaagctgcacctgcaggccccccagcactacccagatgccaaccacaagccagagatggccatcgccctgacccccttccagggcctgtgtggcttccggcctgtggaggagatcgtgaccttcctgaagaaggtgcctgagttccagttcctgattggagatgaagctgccacccacctgaagcagaccatgagccatgacagccaggccgtggccagcagcctgcagagctgcttcagccacctgatgaagtctgagaagaaggtggtggtggagcagctgaacctgctggtgaagaggatcagccagcaggccgccgccggcaacaacatggaggacatctttggagagctgctgctgcagctgcaccagcagtacccaggggacatcggctgctttgccatctacttcctgaacctgctgaccctgaagccaggagaggccatgttcctggaggccaacgtgccccacgcctacctgaagggcggcccctggctgtgccactag

SEQ ID NO: 158710 - DNA, 1122 bp, synthetic construct
  misc_feature 1..1122: note = Description of Artificial Sequence: Synthetic coding sequence
  source 1..1122: mol_type = other DNA
atgggcacccaccccagaggagatgccaagatcctggacaaccgcatcagccagaagaccctgagccagtggattgctgagaaccaggacagcctgggcagcaaggtgaaggacaccttcaatggaaacctgcccttcctgttcaaggtgctgtctgtggagacccccctgagcatccaggcccaccccaacaaggagctggccgagaagctgcacctgcaggccccccagcactacccagatgccaaccacaagccagagatggccatcgccctgacccccttccagggcctgtgtggcttccggcctgtggaggagatcgtgaccttcctgaagaaggtgcctgagttccagttcctgattggagatgaagctgccacccacctgaagcagaccatgagccatgacagccaggccgtggccagcagcctgcagagctgcttcagccacctgatgaagtctgagaagaaggtggtggtggagcagctgaacctgctggtgaagaggatcagccagcaggccgccgccggcaacaacatggaggacatctttggagagctgctgctgcagctgcaccagcagtacccaggggacatcggctgctttgccatctacttcctgaacctgctgaccctgaagccaggagaggccatgttcctggaggccaacgtgccccacgcctacctgaagggggactgtgtggagtgcatggcctgcagcgacaacacagtgcgggccggcctgacccccaagttcattgatgtgcccaccctgtgtgagatgctgagctacacccccagcagcagcaaggacaggctcttcctgcccaccaggagccaggaggacccctacctgagcatctatgacccccctgtgcctgacttcaccatcatgaagacagaggtgcccggctctgtgacagagtacaaggtgctggccctggacagcgccagcatcctgctgatggtgcagggcaccgtcatcgccagcacccccaccacccagacccccatccccctgcagagaggaggagtgctcttcatcggggccaatgaatctgtgtccctgaagctgacagagcccaaggacctgctgatcttccgggcctgctgcctgctgtag

SEQ ID NO: 158711 - DNA, 4371 bp, synthetic construct
  misc_feature 1..4371: note = Description of Artificial Sequence: Synthetic coding sequence
  source 1..4371: mol_type = other DNA
atgaggctgcccctgctgctggtgtttgccagcgtcatccctggagctgtgctgctgctggacacccggcagttcctgatctacaatgaagaccacaagagatgtgtggatgctgtgagccccagcgctgtgcagacagctgcctgcaaccaggatgctgagagccagaagttccgctgggtgtctgagagccagatcatgtctgtggccttcaagctgtgcctgggcgtgcccagcaagacagactgggtggccatcaccctgtatgcctgtgacagcaagtctgagttccagaagtgggagtgcaagaatgacaccctgctgggcatcaagggagaagatctcttcttcaactacggcaaccggcaggagaagaacatcatgctgtacaagggcagcggcctgtggagccgctggaagatctacggcaccacagacaacctgtgcagccggggctatgaggccatgtacaccctgctgggcaatgccaacggggccacctgtgccttccccttcaagtttgagaacaagtggtacgccgactgcaccagcgctggccgcagtgatggctggctgtggtgtggcaccaccacagattatgacacagacaagctgtttggctactgccccctgaagtttgagggcagcgagagcctgtggaacaaggaccccctgacctctgtgtcctaccagatcaacagcaagagcgccctgacctggcaccaggccaggaagagctgccagcagcagaatgctgagctgctgagcatcacagagatccacgagcagacctacctgaccggcctgaccagcagcctgaccagcggcctgtggattggcctgaacagcctgtccttcaacagcggctggcagtggagcgacaggagccccttccgctacctgaactggctgcccggcagccccagcgctgagcccgggaagagctgtgtgtccctgaaccctgggaagaatgccaagtgggagaacctggagtgtgtgcagaagctgggctacatctgcaagaagggcaacaccaccctgaacagctttgtgatccccagcgagagtgatgtgcccacccactgccccagccagtggtggccctatgccggccactgctacaagatccacagagatgagaagaagatccagagagatgccctgaccacctgcaggaaggagggcggggacctgaccagcatccacaccatcgaggagctggacttcatcatcagccagctgggctatgagcccaatgatgagctgtggattggcctgaatgacatcaagatccagatgtactttgagtggagcgatggcacccctgtgaccttcaccaagtggctgcggggggagcccagccatgagaacaaccggcaggaggactgtgtggtgatgaagggcaaggatggctactgggccgaccggggctgtgagtggcccctgggctacatctgcaagatgaagagccgcagccagggccctgagatcgtggaggtggagaagggctgcaggaagggctggaagaagcaccacttctactgctacatgattggccacaccctgagcacctttgctgaggccaaccagacctgcaacaatgaaaatgcctacctgaccaccattgaagatagatatgagcaggccttcctgaccagctttgtgggcctgcggcctgagaagtacttctggacaggcctgagtgacatccagaccaagggcaccttccagtggaccatcgaggaggaggtgcgcttcacccactggaacagcgacatgcctggcaggaagccaggctgtgtggccatgaggactggaattgctgggggcctgtgggatgtgctgaagtgtgatgagaaggccaagtttgtgtgcaagcactgggccgagggcgtgacccacccccccaagcccaccaccaccccagagcccaagtgcccagaggactggggcgccagcagcaggaccagcctgtgcttcaagctgtatgccaagggcaagcatgagaagaagacctggtttgagagccgggacttctgccgggccctgggcggggacctggccagcatcaacaacaaggaggagcagcagaccatctggaggctcatcacagccagcggcagctaccacaagctgttctggctgggcctgacctacggcagccccagcgagggcttcacctggagcgatggcagccctgtgtcctatgagaactgggcctatggagagcccaacaactaccagaatgtggagtactgtggggagctgaagggggaccccaccatgtcctggaatgacatcaactgtgagcacctgaacaactggatctgccagatccagaagggccagacccccaagccagagcccaccccagccccccaggacaacccccctgtgacagaagatggctgggtgatctacaaggactaccagtactacttcagcaaggagaaggagaccatggacaatgcccgggccttctgcaagaggaactttggagacctggtgtccatccagagcgagagcgagaagaagttcctgtggaagtatgtgaacagaaatgatgcccagagcgcctacttcatcggcctgctgatcagcctggacaagaagtttgcctggatggatggcagcaaggtggactatgtgtcctgggccactggagagcccaactttgccaatgaagatgagaactgtgtgaccatgtacagcaacagcggcttctggaatgacatcaactgtggctacccaaatgccttcatctgccagaggcacaacagcagcatcaatgccaccaccgtgatgcccaccatgcccagcgtgcccagcggctgcaaggagggctggaacttctacagcaacaagtgcttcaagatcttcggcttcatggaggaggagaggaagaactggcaggaggccaggaaggcctgcatcggctttggaggcaacctggtgtccatccagaatgagaaggagcaggccttcctgacctaccacatgaaggacagcaccttcagcgcctggacaggcctgaatgatgtgaacagcgagcacaccttcctgtggacagatggccggggcgtgcactacaccaactggggcaagggctacccaggcggcagaagaagcagcctgtcctatgaagatgctgactgtgtggtgatcatcggcggggccagcaatgaagctgggaagtggatggatgacacctgtgacagcaagaggggctacatctgccagaccaggagtgaccccagcctgaccaaccccccagccaccatccagacagatggctttgtgaagtatggcaagagcagctacagcctgatgaggcagaagttccagtggcatgaagctgagacctactgcaagctgcacaacagcctcatcgccagcatcctggacccctacagcaatgcctttgcctggctgcagatggagaccagcaatgaaagagtgtggatcgccctgaacagcaacctgacagacaaccagtacacctggacagacaagtggagggtgcgctacaccaactgggccgcagatgagcccaagctgaagagcgcctgtgtgtacctggacctggatggctactggaagacagcccactgcaatgaaagcttctacttcctgtgcaagagaagtgatgagatcccagccacagagcccccccagctgcccggccgctgcccagagagtgaccacacagcctggatccccttccacggccactgctactacatcgagagcagctacaccaggaactggggccaggccagcctggagtgcctgaggatgggcagcagcctggtgtccattgaatctgctgctgagagcagcttcctgagctacagagtggagcccctgaagagcaagaccaacttctggattggcctcttcagaaatgtggagggcacctggctgtggatcaacaacagccctgtgtcctttgtgaactggaacacaggagaccccagcggggagagaaatgactgtgtggccctgcacgccagcagcggcttctggagcaacatccactgcagcagctacaagggctacatctgcaagaggcccaagatcattgatgccaagcccacccatgagctgctgaccaccaaggctgacaccaggaagatggaccccagcaagcccagcagcaatgtggccggcgtggtgatcatcgtcatcctgctgatcctgactggagctggcctggccgcctacttcttctacaagaagagaagagtgcacctgccccaggagggcgcctttgagaacaccctgtacttcaacagccagagcagccctggcaccagtgacatgaaggacctggtgggcaacatcgagcagaatgagcacagcgtcatctag

SEQ ID NO: 158712 - DNA, 4440 bp, synthetic construct
  misc_feature 1..4440: note = Description of Artificial Sequence: Synthetic coding sequence
  source 1..4440: mol_type = other DNA
atgggccctggccggcctgccccagccccctggcccaggcacctgctgcgctgtgtgctgctgctgggctgcctgcacctgggccggcctggggcccctggagatgctgccctgcctgagcccaacgtgttcctgatcttcagccacggcctgcagggctgcctggaggcccagggcggccaggtgcgggtgaccccagcctgcaacaccagcctgcctgcccagcgctggaagtgggtgtccaggaacagactcttcaacctgggcaccatgcagtgcctgggcaccggctggccaggcaccaacaccacagccagcctgggcatgtatgaatgtgaccgggaggccctgaacctgcgctggcactgcaggaccctgggggaccagctgagcctgctgctgggcgcccggaccagcaacatcagcaagccaggcaccctggagcggggggaccagaccaggagcggccagtggaggatctacggcagcgaggaggacctgtgtgccctgccctaccacgaggtgtacaccatccagggcaacagccacggcaagccctgcaccatccccttcaagtatgacaaccagtggttccacggctgcaccagcactggaagagaagatggccacctgtggtgtgccaccacccaggactatggcaaggatgagcgctggggcttctgccccatcaagagcaatgactgtgagaccttctgggacaaggaccagctgacagacagctgctaccagttcaacttccagagcaccctgtcctggagggaggcctgggccagctgtgagcagcagggcgctgacctgctgagcatcacagagatccacgagcagacctacatcaatggcctgctgaccggctacagcagcaccctgtggattggcctgaatgacctggacaccagcggcggctggcagtggagcgacaacagccccctgaagtacctgaactgggagagtgaccagcctgacaaccccagcgaggagaactgtggggtcatcagaacagagagcagcggcggctggcagaacagagactgcagcatcgccctgccctacgtgtgcaagaagaagcccaatgccacagctgagcccaccccaccagaccgctgggccaacgtgaaggtggagtgtgagcccagctggcagcccttccagggccactgctaccgcctgcaggccgagaagaggtcctggcaggagagcaagaaggcctgcctgcggggcggcggggacctggtgtccatccacagcatggccgagctggagttcatcaccaagcagatcaagcaggaggtggaggagctgtggattggcctgaatgacctgaagctgcagatgaactttgagtggagcgatggcagcctggtgtccttcacccactggcacccctttgagcccaacaacttccgggacagcctggaggactgtgtgaccatctggggccctgagggccgctggaatgacagcccctgcaaccagagcctgcccagcatctgcaagaaggccggccagctgagccagggcgctgctgaagaagatcatggctgcaggaagggctggacctggcacagccccagctgctactggctgggggaggaccaggtgacctacagcgaggcccggcggctgtgcacagaccacggcagccagctggtgaccatcaccaacagatttgagcaggcctttgtgagcagcctcatctacaactgggagggggagtacttctggacagccctgcaggacctgaacagcacaggcagcttcttctggctgtctggagatgaggtgatgtacacccactggaacagagaccagcccggctacagccggggcggctgtgtggccctggccactggaagtgccatgggcctgtgggaggtgaagaactgcaccagcttccgggcccgctacatctgccggcagagcctgggcacccctgtgaccccagagctgcccggccctgaccccacccccagcctgaccggcagctgcccccagggctgggccagtgacaccaagctgcgctactgctacaaggtgttcagcagcgagcggctgcaggacaagaagtcctgggtgcaggcccagggcgcctgccaggagctgggcgcccagctgctgagcctggccagctatgaggaggagcactttgtggccaacatgctgaacaagatctttggagagagcgagcctgagatccacgagcagcactggttctggattggcctgaacagaagagacccccggggcggccagagctggcgctggagcgatggagtgggcttctcctaccacaactttgacaggagcagacatgatgatgatgacatccggggctgtgctgtgctggacctggccagcctgcagtgggtggccatgcagtgtgacacccagctggactggatctgcaagatcccccggggcacagatgtgcgggagccagatgacagcccccagggccggcgggagtggctgcgcttccaggaggccgagtacaagttctttgagcaccacagcacctgggcccaggcccagaggatctgcacctggttccaggccgagctgacctctgtgcacagccaggccgagctggacttcctgagccacaacctgcagaagttcagccgggcccaggagcagcactggtggattggcctgcacaccagcgagagtgatggccgcttccgctggacagatggcagcatcatcaacttcatctcctgggcccctgggaagcccaggcctgtgggcaaggacaagaagtgtgtgtacatgacagccagccgggaggactggggagaccagcgctgcctgacagccctgccctacatctgcaagaggagcaatgtgaccaaggagacccagcccccagacctgcccaccacagccctgggcggctgccccagcgactggatccagttcctgaacaagtgcttccaggtgcagggccaggagccccagagccgggtgaagtggagcgaggcccagttcagctgtgagcagcaggaggcccagctggtgaccatcaccaaccccctggagcaggccttcatcacagccagcctgcccaacgtgacctttgacctgtggattggcctgcacgccagccagagggacttccagtgggtggagcaggagcccctgatgtatgccaactgggcccctggagagcccagcggccccagccctgcccccagcggcaacaagcccaccagctgtgctgtggtgctgcacagccccagcgcccacttcaccggccgctgggatgacaggagctgcacagaggagacccacggcttcatctgccagaagggcacagaccccagcctgagccccagccctgctgccctgcccccagcccctggaacagagctgagctacctgaatggcaccttccggctgctgcagaagcccctgcgctggcatgatgccctgctgctgtgtgagagcagaaatgccagcctggcctacgtgcctgacccctacacccaggccttcctgacccaggccgcccggggcctgcggacccccctgtggattggcctggccggggaggagggcagccgccgctacagctgggtgtctgaggagcccctgaactacgtgggctggcaggatggagagccccagcagcccggcggctgcacctacgtggatgtggatggagcctggaggaccaccagctgtgacaccaagctgcagggcgctgtgtgtggggtgagcagcggccccccaccaccccggcgcatctcctaccacggcagctgcccccagggcctggccgacagcgcctggatccccttccgggagcactgctacagcttccacatggagctgctgctgggccacaaggaggcccggcagcgctgccagagagctgggggcgctgtgctgagcatcctggatgagatggagaatgtgtttgtgtgggagcacctgcagagctatgagggccagagcagaggagcctggctgggcatgaacttcaaccccaagggcggcaccctggtgtggcaggacaacacagctgtgaactacagcaactggggccccccaggcctgggccccagcatgctgagccacaacagctgctactggatccagagcaacagcggcctgtggaggcctggggcctgcaccaacatcaccatgggcgtggtgtgcaagctgcccagggctgagcagagcagcttcagccccagcgccctgcctgagaacccagctgccctggtggtggtgctgatggctgtgctgctgctgctggccctgctgacagctgccctgatcctgtacagaagacggcagagcattgaaagaggagcctttgaaggagcccgctacagccgcagcagcagcagccccacagaggccacagagaagaacatcctggtgtctgacatggagatgaatgagcagcaggagtag

SEQ ID NO: 158713 - DNA, 1038 bp, synthetic construct
  misc_feature 1..1038: note = Description of Artificial Sequence: Synthetic coding sequence
  source 1..1038: mol_type = other DNA
atgcccaccggccacctgggcagccccctggccctggccctgctgcctgtggccaccaacagacctgctgtgcagtggagctgcacagccccccagcccaccagcctggccgccggcaccatcggggccgcccggcggcggcccatggccagcagcgcccggcgggcccggggcagccgccgctacagctgggtgtctgaggagcccctgaactacgtgggctggcaggatggagagccccagcagcccggcggctgcacctacgtggatgtggatggagcctggaggaccaccagctgtgacaccaagctgcagggcgctgtgtgtggggtgagcagcggccccccaccaccccggcgcatctcctaccacggcagctgcccccagggcctggccgacagcgcctggatccccttccgggagcactgctacagcttccacatggagctgctgctgggccacaaggaggcccggcagcgctgccagagagctgggggcgctgtgctgagcatcctggatgagatggagaatgtgtttgtgtgggagcacctgcagagctatgagggccagagcagaggagcctggctgggcatgaacttcaaccccaagggcggcaccctggtgtggcaggacaacacagctgtgaactacagcaactggggccccccaggcctgggccccagcatgctgagccacaacagctgctactggatccagagcaacagcggcctgtggaggcctggggcctgcaccaacatcaccatgggcgtggtgtgcaagctgcccagggctgagcagagcagcttcagccccagcgccctgcctgagaacccagctgccctggtggtggtgctgatggctgtgctgctgctgctggccctgctgacagctgccctgatcctgtacagaagacggcagagcattgaaagaggagcctttgaaggagcccgctacagccgcagcagcagcagccccacagaggccacagagaagaacatcctggtgtctgacatggagatgaatgagcagcaggagtag

SEQ ID NO: 158714 - DNA, 834 bp, synthetic construct
  misc_feature 1..834: note = Description of Artificial Sequence: Synthetic coding sequence
  source 1..834: mol_type = other DNA
atgttccccttctacagctgctggaggacaggcctgctgctgctgctgctggccgtggccgtgcgggagagctggcagacagaggagaagacctgtgacctggtgggggagaagggcaaggagagcgagaaggagctggccctggtgaagaggctgaagcccctcttcaacaagagctttgagagcacagtgggccagggcagtgacacctacatctacatcttccgggtgtgccgggaggccggcaaccacaccagcggggccggcctggtgcagatcaacaagagcaatggcaaggagaccgtggtgggccgcctgaatgagacccacatcttcaacggcagcaactggatcatgctgatctacaagggaggagatgaatatgacaaccactgtgggaaggagcagaggagagctgtggtgatgatcagctgcaacagacacaccctggccgacaacttcaaccctgtgtctgaggagcggggcaaggtgcaggactgcttctacctgtttgagatggacagcagcctggcctgcagccctgagatcagccacctgtctgtgggcagcatcctgctggtgacctttgccagcctggtggccgtgtatgtggtgggcggcttcctgtaccagaggctggtggtgggcgccaagggcatggagcagttcccccacctggccttctggcaggacctgggcaacctggtggctgatggctgtgactttgtgtgccgcagcaagcccagaaatgtgcctgctgcctacagaggagtgggagatgaccagctgggggaggagagcgaggagagagatgaccacctgctgcccatgtag

SEQ ID NO: 158715 - DNA, 279 bp, synthetic construct
  misc_feature 1..279: note = Description of Artificial Sequence: Synthetic coding sequence
  source 1..279: mol_type = other DNA
atgttccccttctacagctgctggaggacaggcctgctgctgctgctgctggccgtggccgtgcgggagagctggcagacagaggagaagacctgtgacctggtgggggagaagggcaaggagagcgagaaggagctggccctggtgaagaggctgaagcccctcttcaacaagagctttgagagcacagtgggccagggcagtgacacctacatctacatcttccgggtgtgccgggaggccggcaaccacaccagcggggccggcctggtgcagtag

SEQ ID NO: 158716 - DNA, 330 bp, synthetic construct
  misc_feature 1..330: note = Description of Artificial Sequence: Synthetic coding sequence
  source 1..330: mol_type = other DNA
atgttccccttctacagctgctggaggacaggcctgctgctgctgctgctggccgtggccgtgcgggagagctggcagacagaggagaagacctgtgacctggtgggggagaagggcaaggagagcgagaaggagctggccctggtgaagaggctgaagcccctcttcaacaagagctttgagagcacagtgggccagggcagtgacacctacatctacatcttccgggtgtgccgggaggccggcaaccacaccagcggggccggcctggtgcagatcaacaagagcaatggcaaggagaccgtggtgggccgcctgaatgagacctag

SEQ ID NO: 158717 - DNA, 747 bp, synthetic construct
  misc_feature 1..747: note = Description of Artificial Sequence: Synthetic coding sequence
  source 1..747: mol_type = other DNA
atgagcctcttccccagcctgcccctgctgctgctgtccatggtggccgccagctacagcgagaccgtgacctgtgaagatgcccagaagacctgcccagctgtgattgcctgcagcagccctggcatcaatggcttccctgggaaggatggaagagatggcaccaagggggagaagggggagcccggccagggcctgcggggcctgcagggccccccaggcaagctgggccccccaggcaaccctggccccagcggcagccctggccccaagggccagaagggggaccccgggaagagcccagatggagacagcagcctggccgccagcgagaggaaggccctgcagacagagatggcccgcatcaagaagtggctgaccttcagcctgggcaagcaggtgggcaacaagttcttcctgaccaacggggagatcatgacctttgagaaggtgaaggccctgtgtgtgaagttccaggcctctgtggccaccccaagaaatgctgctgaaaatggagccatccagaacctgatcaaggaggaggccttcctgggcatcacagatgagaagacagagggccagtttgtggacctgactggaaaccggctgacctacaccaactggaatgaaggagagcccaacaatgccggcagtgatgaggactgtgtgctgctgctgaagaatggccagtggaatgatgtgccctgcagcaccagccacctggccgtgtgtgagttccccatctag

SEQ ID NO: 158718 - DNA, 744 bp, synthetic construct
  misc_feature 1..744: note = Description of Artificial Sequence: Synthetic coding sequence
  source 1..744: mol_type = other DNA
atggctgctgaggctgatggccccctgaagaggctgctggtgcccatcctgctgcctgagaagtgctatgaccagctgtttgtgcagtgggacctgctgcacgtgccctgcctgaagatcctgctgagcaagggcctgggcctgggcatcgtggccggcagcctgctggtgaagctgccccaggtgttcaagatcctgggcgccaagtctgctgagggcctgagcctgcagagcgtgatgctggagctggtggccctgaccggcaccatggtgtacagcatcaccaacaacttccccttcagctcctggggcgaggccctcttcctgatgctgcagaccatcaccatctgcttcctggtgatgcactaccggggccagacagtgaagggcgtggccttcctggcctgctacggcctggtgctgctggtgctgctgagccccctgacccccctgactgtggtgaccctgctgcaggccagcaatgtgcctgctgtggtggtgggccgcctgctgcaggccgccaccaactaccacaacggccacacaggccagctgagcgccatcaccgtcttcctgctgtttggaggcagcctggcccgcatcttcaccagcatccaggagaccggggaccccctgatggccggcacctttgtggtgagcagcctgtgcaatggcctgattgctgcccagctgctcttctactggaatgccaagccaccccacaagcagaagaaggcccagtag

SEQ ID NO: 158719 - DNA, 381 bp, synthetic construct
  misc_feature 1..381: note = Description of Artificial Sequence: Synthetic coding sequence
  source 1..381: mol_type = other DNA
atggctgctgaggctgatggccccctgaagaggctgctggtgcccatcctgctgcctgagaagtgctatgaccagctgtttgtgcagtgggacctgctgcacgtgccctgcctgaagatcctgctgagcaagggcctgggcctgggcatcgtggccggcagcctgctggtgaagctgccccaggtgttcaagatcctgggcgccaagtctgctgctggcctgaagaaggaggatgaggcccggcctgtgcgcagcgcctccatgagggtgcggggcggcctgggcgcctggggccaccagcagggcgagggctgcatggagtgggagagccagggcgccggcagcggctaccgctgggccgctgtgcccccaggggcctag

SEQ ID NO: 158720 - DNA, 900 bp, synthetic construct
  misc_feature 1..900: note = Description of Artificial Sequence: Synthetic coding sequence
  source 1..900: mol_type = other DNA
atggctgctgaggctgatggccccctgaagaggctgctggtgcccatcctgctgcctgagaagtgctatgaccagctgtttgtgcagtgggacctgctgcacgtgccctgcctgaagatcctgctgagcaagggcctgggcctgggcatcgtggccggcagcctgctggtgaagctgccccaggtgttcaagatcctgggcgccaagtctgctgagggcctgagcctgcagagcgtgatgctggagctggtggccctgaccggcaccatggtgtacagcatcaccaacaacttccccttcagctcctggggcgaggccctcttcctgatgctgcagaccatcaccatctgcttcctggtgatgcactaccggggccagacagtgaagggcgtggccttcctggcctgctacggcctggtgctgctggtgctgctgagccccctgacccccctgactgtggtgccctgcagcggcctgcagtgtgcctgctgcggcggcggggaggccagccctggcagccaccagctgccccagagggcccacaggcctgccctgagccaccacagcctgcctgctgtgtggggcctgcccggccccaacctgcacttccacagcggcaacagaagaagcccagatggctgggacctgtgtggcctgctgagcctgcagaggccccacagaagacctgctgccctgctgctggagtgcaaggccagcccccaggccgagaagggagctgtggagcccgccactggagtcatccccttccccctcatccaccccaccagcggcttcagccccagcgagcccgcctgctggtgtgacctgctgatcctgcacagcagcgccctggccgacttcctgagccagggcttcctgctggtggagaccaacggctag

SEQ ID NO: 158721 - DNA, 636 bp, synthetic construct
  misc_feature 1..636: note = Description of Artificial Sequence: Synthetic coding sequence
  source 1..636: mol_type = other DNA
atggctgctgaggctgatggccccctgaagaggctgctggtgcccatcctgctgcctgagaagtgctatgaccagctgtttgtgcagtgggacctgctgcacgtgccctgcctgaagatcctgctgagcaagggcctgggcctgggcatcgtggccggcagcctgctggtgaagctgccccaggtgttcaagatcctgggcgccaagtctgctgagggcctgagcctgcagagcgtgatgctggagctggtggccctgaccggcaccatggtgtacagcatcaccaacaacttccccttcagctcctggggcgaggccctcttcctgatgctgcagaccatcaccatctgcttcctggtgatgcactaccggggccagacagtgaagggcgtggccttcctggcctgctacggcctggtgctgctggtgctgctgagccccctgacccccctgactgtggtgaccctgctgcaggccagcaatgtgcctgctgtggtggtgggccgcctgctgcaggccgccaccaacaccaccaccggcacccaggccagcagccagcccagccagagcagctgctgcctgggcgccccctggccagagagcagcctgcccttcaggaagccagagatcccctag

SEQ ID NO: 158722 - DNA, 561 bp, synthetic construct
  misc_feature 1..561: note = Description of Artificial Sequence: Synthetic coding sequence
  source 1..561: mol_type = other DNA
atggctgctgaggctgatggccccctgaagaggctgctggtgcccatcctgctgcctgagaagtgctatgaccagctgtttgtgcagtgggacctgctgcacgtgccctgcctgaagatcctgctgagcaagggcctgggcctgggcatcgtggccggcagcctgctggtgaagctgccccaggtgttcaagatcctgggcgccaagtctgctgagggcctgagcctgcagagcgtgatgctggagctggtggccctgaccggcaccatggtgtacagcatcaccaacaacttccccttccgctgccgcttcccccggctgctgcggcccggccctgctggggccagcctgaccagtgatgccctggactgcagccacccagcccctggcctgcagtgtgcctgctgcggcggcggggaggccagccctggcagccaccagctgccccagagggcccacaggcctgccctgagccaccacagcctgcctgctgtgtggggcctgcccggccccaacctgcacttccacagcggcgtgtccatccccttcagccagctgtag

SEQ ID NO: 158723 - DNA, 2826 bp, synthetic construct
  misc_feature 1..2826: note = Description of Artificial Sequence: Synthetic coding sequence
  source 1..2826: mol_type = other DNA
atggctgctgccccagccctgaagcactggaggaccaccctggagcgggtggagaagtttgtgagccccctgtacttcacagactgcaacctgcggggccgcctgtttggagccagctgccctgtggccgtgctgagcagcttcctgaccccagagcggctgccctaccaggaggccgtgcagagggacttccggcctgcccaggtgggggacagctttggccccacctggtggacctgctggttccgggtggagctgaccatccctgaggcctgggtgggccaggaggtgcacctgtgctgggagagtgatggagagggcctggtgtggagagatggagagcctgtgcagggcctgaccaaggagggggagaagaccagctatgtgctgacagaccggctgggggagcgggaccccaggagcctgaccctgtatgtggaggtggcctgcaatggcctgctgggcgctgggaagggctccatgattgctgccccagaccctgagaagatgttccagctgagcagagctgagctggccgtgttccacagagatgtgcacatgctgctggtggacctggagctgctgctgggcatcgccaaggcccagcagctggagtgggtgaagagccgctacccaggcctgtacagccgcatccaggagtttgcctgccggggccagtttgtgcctgtgggcggcacctgggtggagatggatggcaacctgcccagcggggaggccatggtgcggcagttcctgcagggccagaacttcttcctgcaggagtttgggaagatgtgcagcgagttctggctgcctgacaccttcggctacagcgcccagctgccccagatcatgcacggctgcggcatccgccgcttcctgacccagaagctgtcctggaacctggtgaacagcttcccccaccacaccttcttctgggagggcctggatggcagccgggtgctggtgcacttccccccaggggacagctatggcatgcagggctctgtggaggaggtgctgaagacagtggccaacaacagagacaagggccgggccaaccacagcgccttcctgtttggatttggagatggcggcggcggccccacccagaccatgctggaccggctgaagaggctgagcaacacagatggcctgccccgggtgcagctgagcagcccccggcagctgttcagcgccctggagagtgacagcgagcagctgtgcacctgggtgggggagctgttcctggagctgcacaacggcacctacaccacccacgcccagatcaagaagggcaaccgggagtgtgagcgcatcctgcatgatgtggagctgctgagcagcctggccctggcccggagcgcccagttcctgtacccagctgcccagctgcagcacctgtggaggctgctgctgctgaaccagttccatgatgtggtgacaggcagctgcatccagatggtggccgaggaggccatgtgccactatgaggacatccgcagccacggcaacaccctgctgtctgctgctgctgctgccctgtgtgccggggagcccggccctgagggcctgctgattgtgaacaccctgccctggaagagaattgaggtgatggccctgcccaagccaggaggagcccacagcctggccctggtgacagtgcccagcatgggctacgcccctgtgcccccacccaccagcctgcagcccctgctgccccagcagcctgtgtttgtggtgcaggagacagatggctctgtgaccctggacaatggcatcatccgggtgaagctggaccccaccggccgcctgaccagcctggtgctggtggccagcggccgggaggccatcgccgagggcgctgtgggcaaccagtttgtgctgtttgatgatgtgcccctgtactgggatgcctgggatgtgatggactaccacctggagaccaggaagcctgtgctgggccaggccggcaccctggccgtgggcacagagggcggcctgcggggcagcgcctggttcctgctgcagatcagccccaacagccggctgagccaggaggtggtgctggatgtgggctgcccctacgtgcgcttccacacagaggtgcactggcatgaggcccacaagttcctgaaggtggagttccctgcccgggtgcgcagcagccaggccacctatgagatccagtttggccacctgcagaggcccacccactacaacacctcctgggactgggccaggtttgaggtgtgggcccaccgctggatggacctgtctgagcacggcttcggcctggccctgctgaatgactgcaagtacggggcctctgtgcggggcagcatcctgagcctgagcctgctgcgggcccccaaggccccagatgccacagctgacaccggcagacatgagttcacctacgccctgatgccccacaagggcagcttccaggatgctggggtcatccaggccgcctacagcctgaacttccccctgctggccctgcctgcccccagccctgccccagccacctcctggagcgccttctctgtgagcagccctgctgtggtgctggagaccgtgaagcaggccgagagcagcccccagaggaggagcctggtgctgcggctgtatgaggcccacggcagccacgtggactgctggctgcacctgagcctgcctgtgcaggaggccatcctgtgtgacctgctggagaggccagaccctgctggccacctgaccctgcgggacaaccggctgaagctgaccttcagccccttccaggtgctgagcctgctgctggtgctgcagcccccaccccactag

SEQ ID NO: 158724 - DNA, 3174 bp, synthetic construct
  misc_feature 1..3174: note = Description of Artificial Sequence: Synthetic coding sequence
  source 1..3174: mol_type = other DNA
atggctgctgccccagccctgaagcactggaggaccaccctggagcgggtggagaagtttgtgagccccctgtacttcacagactgcaacctgcggggccgcctgtttggagccagctgccctgtggccgtgctgagcagcttcctgaccccagagcggctgccctaccaggaggccgtgcagagggacttccggcctgcccaggtgggggacagctttggccccacctggtggacctgctggttccgggtggagctgaccatccctgaggcctgggtgggccaggaggtgcacctgtgctgggagagtgatggagagggcctggtgtggagagatggagagcctgtgcagggcctgaccaaggagggggagaagaccagctatgtgctgacagaccggctgggggagcgggaccccaggagcctgaccctgtatgtggaggtggcctgcaatggcctgctgggcgctgggaagggctccatgattgctgccccagaccctgagaagatgttccagctgagcagagctgagctggccgtgttccacagagatgtgcacatgctgctggtggacctggagctgctgctgggcatcgccaagggcctgggcaaggacaaccagaggagcttccaggccctgtacacagccaaccagatggtgaatgtgtgtgaccctgcccagcctgagaccttccctgtggcccaggccctggccagccgcttcttcggccagcacggcggggagagccagcacaccatccacgccaccggccactgccacatcgacacagcctggctgtggcccttcaaggagaccgtgaggaaatgtgcccgctcctgggtgacagccctgcagctgatggagagaaatcctgagttcatctttgcctgcagccaggcccagcagctggagtgggtgaagagccgctacccaggcctgtacagccgcatccaggagtttgcctgccggggccagtttgtgcctgtgggcggcacctgggtggagatggatggcaacctgcccagcggggaggccatggtgcggcagttcctgcagggccagaacttcttcctgcaggagtttgggaagatgtgcagcgagttctggctgcctgacaccttcggctacagcgcccagctgccccagatcatgcacggctgcggcatccgccgcttcctgacccagaagctgtcctggaacctggtgaacagcttcccccaccacaccttcttctgggagggcctggatggcagccgggtgctggtgcacttccccccaggggacagctatggcatgcagggctctgtggaggaggtgctgaagacagtggccaacaacagagacaagggccgggccaaccacagcgccttcctgtttggatttggagatggcggcggcggccccacccagaccatgctggaccggctgaagaggctgagcaacacagatggcctgccccgggtgcagctgagcagcccccggcagctgttcagcgccctggagagtgacagcgagcagctgtgcacctgggtgggggagctgttcctggagctgcacaacggcacctacaccacccacgcccagatcaagaagggcaacagagaatgtgagcgcatcctgcatgatgtggagctgctgagcagcctggccctggcccggagcgcccagttcctgtacccagctgcccagctgcagcacctgtggaggctgctgctgctgaaccagttccatgatgtggtgacaggcagctgcatccagatggtggccgaggaggccatgtgccactatgaggacatccgcagccacggcaacaccctgctgtctgctgctgctgctgccctgtgtgccggggagcccggccctgagggcctgctgattgtgaacaccctgccctggaagagaattgaggtgatggccctgcccaagccaggaggagcccacagcctgggcctgacccccagccctggggacagcgcccagcacggcctgtgcagctgcagcagcccccacctgacagctgccccagctgccccagctgcctgtgtgcgcagcgcccgggcccccacagattctgccagccggcccccacccaccaagacagatggctctgtgaccctggacaatggcatcatccgggtgaagctggaccccaccggccgcctgaccagcctggtgctggtggccagcggccgggaggccatcgccgagggcgctgtgggcaaccagtttgtgctgtttgatgatgtgcccctgtactgggatgcctgggatgtgatggactaccacctggagaccaggaagcctgtgctgggccaggccggcaccctggccgtgggcacagagggcggcctgcggggcagcgcctggttcctgctgcagatcagccccaacagccggctgagccaggaggtggtgctggatgtgggctgcccctacgtgcgcttccacacagaggtgcactggcatgaggcccacaagttcctgaaggtggagttccctgcccgggtgcgcagcagccaggccacctatgagatccagtttggccacctgcagaggcccacccactacaacacctcctgggactgggccaggtttgaggtgtgggcccaccgctggatggacctgtctgagcacggcttcggcctggccctgctgaatgactgcaagtacggggcctctgtgcggggcagcatcctgagcctgagcctgctgcgggcccccaaggccccagatgccacagctgacaccggcagacatgagttcacctacgccctgatgccccacaagggcagcttccaggatgctggggtcatccaggccgcctacagcctgaacttccccctgctggccctgcctgcccccagccctgccccagccacctcctggagcgccttctctgtgagcagccctgctgtggtgctggagaccgtgaagcaggccgagagcagcccccagaggaggagcctggtgctgcggctgtatgaggcccacggcagccacgtggactgctggctgcacctgagcctgcctgtgcaggaggccatcctgtgtgacctgctggagaggccagaccctgctggccacctgaccctgcgggacaaccggctgaagctgaccttcagccccttccaggtgctgagcctgctgctggtgctgcagcccccaccccactag

SEQ ID NO: 158725 - DNA, 3054 bp, synthetic construct
  misc_feature 1..3054: note = Description of Artificial Sequence: Synthetic coding sequence
  source 1..3054: mol_type = other DNA
atggctgctgccccagccctgaagcactggaggaccaccctggagcgggtggagaagtttgtgagccccctgtacttcacagactgcaacctgcggggccgcctgtttggagccagctgccctgtggccgtgctgagcagcttcctgaccccagagcggctgccctaccaggaggccgtgcagagggacttccggcctgcccaggtgggggacagctttggccccacctggtggacctgctggttccgggtggagctgaccatccctgaggcctgggtgggccaggaggtgcacctgtgctgggagagtgatggagagggcctggtgtggagagatggagagcctgtgcagggcctgaccaaggagggggagaagaccagctatgtgctgacagaccggctgggggagcgggaccccaggagcctgaccctgtatgtggaggtggcctgcaatggcctgctgggcgctgggaagggctccatgattgctgccccagaccctgagaagatgttccagctgagcagagctgagctggccgtgttccacagagatgtgcacatgctgctggtggacctggagctgctgctgggcatcgccaagggcctgggcaaggacaaccagaggagcttccaggccctgtacacagccaaccagatggtgaatgtgtgtgaccctgcccagcctgagaccttccctgtggcccaggccctggccagccgcttcttcggccagcacggcggggagagccagcacaccatccacgccaccggccactgccacatcgacacagcctggctgtggcccttcaaggagaccgtgaggaaatgtgcccgctcctgggtgacagccctgcagctgatggagagaaatcctgagttcatctttgcctgcagccaggcccagcagctggagtgggtgaagagccgctacccaggcctgtacagccgcatccaggagtttgcctgccggggccagtttgtgcctgtgggcggcacctgggtggagatggatggcaacctgcccagcggggaggccatggtgcggcagttcctgcagggccagaacttcttcctgcaggagtttgggaagatgtgcagcgagttctggctgcctgacaccttcggctacagcgcccagctgccccagatcatgcacggctgcggcatccgccgcttcctgacccagaagctgtcctggaacctggtgaacagcttcccccaccacaccttcttctgggagggcctggatggcagccgggtgctggtgcacttccccccaggggacagctatggcatgcagggctctgtggaggaggtgctgaagacagtggccaacaacagagacaagggccgggccaaccacagcgccttcctgtttggatttggagatggcggcggcggccccacccagaccatgctggaccggctgaagaggctgagcaacacagatggcctgccccgggtgcagctgagcagcccccggcagctgttcagcgccctggagagtgacagcgagcagctgtgcacctgggtgggggagctgttcctggagctgcacaacggcacctacaccacccacgcccagatcaagaagggcaacagagaatgtgagcgcatcctgcatgatgtggagctgctgagcagcctggccctggcccggagcgcccagttcctgtacccagctgcccagctgcagcacctgtggaggctgctgctgctgaaccagttccatgatgtggtgacaggcagctgcatccagatggtggccgaggaggccatgtgccactatgaggacatccgcagccacggcaacaccctgctgtctgctgctgctgctgccctgtgtgccggggagcccggccctgagggcctgctgattgtgaacaccctgccctggaagagaattgaggtgatggccctgcccaagccaggaggagcccacagcctggccctggtgacagtgcccagcatgggctacgcccctgtgcccccacccaccagcctgcagcccctgctgccccagcagcctgtgtttgtggtgcaggagacagatggctctgtgaccctggacaatggcatcatccgggtgaagctggaccccaccggccgcctgaccagcctggtgctggtggccagcggccgggaggccatcgccgagggcgctgtgggcaaccagtttgtgctgtttgatgatgtgcccctgtactgggatgcctgggatgtgatggactaccacctggagaccaggaagcctgtgctgggccaggccggcaccctggccgtgggcacagaaggaggcctgcggggcagcgcctggttcctgctgcagatcagccccaacagccggctgagccaggaggtggtgctggatgtgggctgcccctacgtgcgcttccacacagaggtgcactggcatgaggcccacaagttcctgaaggtggagttccctgcccgggtgcgcagcagccaggccacctatgagatccagtttggccacctgcagaggcccacccactacaacacctcctgggactgggccaggtttgaggtgtgggcccaccgctggatggacctgtctgaacatggcttcggcctggccctgctgaatgactgcaagtatggagcctctgtgcggggcagcatcctgagcctgagcctgctgcgggcccccaaggccccagatgccacagctgacaccggcagacatgagttcacctacgccctgatgccccacaaggcccccagccctgccccagccacctcctggagcgccttctctgtgagcagccctgctgtggtgctggagaccgtgaagcaggccgagagcagcccccagaggaggagcctggtgctgcggctgtatgaggcccacggcagccacgtggactgctggctgcacctgagcctgcctgtgcaggaggccatcctgtgtgacctgctggagaggccagaccctgctggccacctgaccctgcgggacaaccggctgaagctgaccttcagccccttccaggtgctgagcctgctgctggtgctgcagcccccaccccactag

SEQ ID NO: 158726 - DNA, 1104 bp, synthetic construct
  misc_feature 1..1104: note = Description of Artificial Sequence: Synthetic coding sequence
  source 1..1104: mol_type = other DNA
atgcctgtgggcggcctgctgcccctcttcagcagccctgctgggggcgtgctgggcggcggcctgggcggcggcggcggcaggaaaggaagtggccctgctgccctgcggctgacagagaagtttgtgctgctgctggtgttttctgccttcatcaccctgtgcttcggggccatcttcttcctgcctgacagcagcaagctgctgagcggcgtgctcttccacagcagccctgccctgcagcctgctgctgaccacaagccaggccctggggcccgggcagaagatgctgctgagggccgggcccggcggcgggaggagggcgcccctggggaccctgaggccgccctggaggacaacctggcccgcatccgggagaaccacgagcgggccctgcgggaggccaaggagaccctgcagaagctgcctgaggagatccagagggacatcctgctggagaagaagaaggtggcccaggaccagctgcgggacaaggcccccttccggggcctgccccctgtggactttgtgccccccatcggcgtggagagccgggagccagcagatgctgccatccgggagaagagggccaagatcaaggaggagattgaggccaggaagggccaggccaactgccccggcagcagcagcagctgtgaggtggagatccagatgatgaagcacgcctggaacaactacaagggctacgcctggggcctgaatgagctgaagcccatcagcaagggcggccacagcagcagcctgtttggaaacatcaagggggccaccatcgtggatgccctggacaccctcttcatcatggagatgaagcatgaatttgaggaggccaagtcctgggtggaggagaacctggacttcaacgtgaatgctgagatctctgtgtttgaggtgaacatccgctttgtgggcggcctgctgagcgcctactacctgtctggagaggagatcttcaggaagaaggctgtggagctgggcgtgaagctgctgcctgccttccacaccccatctggcatcccctgggccctgctgaacatgaagcgctggatgtgcaacatcccccgggccatggaggccaccatctag

SEQ ID NO: 158727 - DNA, 1962 bp, synthetic construct
  misc_feature 1..1962: note = Description of Artificial Sequence: Synthetic coding sequence
  source 1..1962: mol_type = other DNA
atgcctgtgggcggcctgctgcccctcttcagcagccctgctgggggcgtgctgggcggcggcctgggcggcggcggcggcaggaaaggaagtggccctgctgccctgcggctgacagagaagtttgtgctgctgctggtgttttctgccttcatcaccctgtgcttcggggccatcttcttcctgcctgacagcagcaagctgctgagcggcgtgctcttccacagcagccctgccctgcagcctgctgctgaccacaagccaggccctggggcccgggcagaagatgctgctgagggccgggcccggcggcgggaggagggcgcccctggggaccctgaggccgccctggaggacaacctggcccgcatccgggagaaccacgagcgggccctgcgggaggccaaggagaccctgcagaagctgcctgaggagatccagagggacatcctgctggagaagaagaaggtggcccaggaccagctgcgggacaaggcccccttccggggcctgccccctgtggactttgtgccccccatcggcgtggagagccgggagccagcagatgctgccatccgggagaagagggccaagatcaaggagatgatgaagcacgcctggaacaactacaagggctacgcctggggcctgaatgagctgaagcccatcagcaaaggaggccacagcagcagcctgtttggaaacatcaagggggccaccatcgtggatgccctggacaccctcttcatcatggagatgaagcatgaatttgaggaggccaagtcctgggtggaggagaacctggacttcaacgtgaatgctgagatctctgtgtttgaggtgaacatccgctttgtgggcggcctgctgagcgcctactacctgagcggggaggagatcttcaggaagaaggctgtggagctgggcgtgaagctgctgcctgccttccacacccccagcggcatcccctgggccctgctgaacatgaagtctggaattggaagaaactggccctgggccagcggcggcagcagcatcctggccgagtttggcaccctgcacctggagttcatgcacctgagccacctgagcggcaaccccatctttgctgagaaggtgatgaacatcagaacagtgctgaacaagctggagaagccccagggcctgtaccccaactacctgaaccccagcagcggccagtggggccagcaccacgtgtctgtgggcggcctgggggacagcttctatgagtacctgctgaaggcctggctgatgtctgacaagacagacctggaggccaagaagatgtactttgatgctgtgcaggccatcgagacccacctgatcaggaagagcagcagcggcctgacctacatcgccgagtggaagggcggcctgctggagcacaagatgggccacctgacctgctttgctgggggcatgtttgccctgggcgcagatgctgcccctgagggcatggcccagcactacctggagctgggcgctgagatcgcccggacctgccacgagagctacaacagaaccttcatgaagctgggccctgaggccttccgctttgatggaggagtggaggccatcgccacccggcagaatgagaagtactacatcctgcggcctgaggtgatggagacctacatgtacatgtggaggctgacccatgaccccaagtacaggaagtgggcctgggaggccgtggaggccctggagaaccactgccgggtgaatggaggctacagcggcctgagagatgtgtacctgctgcacgagagctatgatgatgtgcagcagagcttcttcctggccgagaccctgaagtacctgtacctgatcttcagtgatgatgacctgctgcccctggagcactggatcttcaacagcgaggcccacctgctgcccatcctgcccaaggacaagaaggaggtggagatccgggaggagtag

SEQ ID NO: 158728 - DNA, 579 bp, synthetic construct
  misc_feature 1..579: note = Description of Artificial Sequence: Synthetic coding sequence
  source 1..579: mol_type = other DNA
atgtttgccctgggcgcagatggcagcagagctgacaaggccggccactacctggagctgggcgctgagatcgcccggacctgccacgagagctatgacagaacagccctgaagctgggccctgagagcttcaagtttgatggagctgtggaggccgtggccgtgcggcaggccgagaagtactacatcctgcggcctgaggtgattgagacctactggtacctgtggaggttcacccatgacccccgctaccggcagtggggctgggaggccgccctggccatcgagaagtactgccgggtgaatggaggcttcagcggcgtgaaggatgtgtacagcagcacccccacccatgatgatgtgcagcagagcttcttcctggccgagaccctgaagtacctgtacctgctcttctctggagatgacctgctgcccctggaccactgggtgttcaacacagaggcccaccccctgcctgtgctgcacctggccaacaccaccctgagcggcaccagccagggcatgaggcggcagaacccctacttccaggtgctgtacctgtactacccagatgactag

SEQ ID NO: 158729 - DNA, 1926 bp, synthetic construct
  misc_feature 1..1926: note = Description of Artificial Sequence: Synthetic coding sequence
  source 1..1926: mol_type = other DNA
atgaccaccccagccctgctgcccctgagcggccgccgcatcccccccctgaacctgggccccccatccttcccccaccaccgggccaccctgcggctgtctgagaagttcatcctgctgctgatcctgagcgccttcatcaccctgtgctttggagccttcttcttcctgcctgacagcagcaagcacaagagatttgacctgggcctggaggatgtgctgatcccccacgtggatgctgggaagggggccaagaaccctggggtcttcctgattcatggcccagatgagcaccgccaccgggaggaggaggagcggctgaggaacaagatccgggctgaccacgagaaggccctggaggaggccaaggagaagctgaggaagagccgggaggagatccgggcagagatccagacagagaagaacaaggtggtgcaggagatgaagatcaaggagaacaagcccctgccccctgtgcccatccccaacctggtgggcatccggggcggggaccctgaagataatgacatccgggagaagcgggagaagatcaaggagatgatgaagcacgcctgggacaactaccgcacctacggctggggccacaatgagctgcggcccatcgccaggaagggccacagccccaacatcttcggcagcagccagatgggcgccaccatcgtggatgccctggacaccctgtacatcatgggcctgcatgatgagttcctggatggccagcgctggattgaggacaacctggacttctctgtgaacagcgaggtgtctgtgtttgaggtgaacatccgcttcatcggcggcctgctggccgcctactacctgagcggggaggagatcttcaagatcaaggctgtgcagctggccgagaagctgctgcctgccttcaacacccccaccggcatcccctgggccatggtgaacctgaagtctggagtgggcaggaactggggctgggccagcgctggcagcagcatcctggccgagtttggcaccctgcacatggagttcatccacctgagctacctgaccggggacctgacctactacaagaaggtgatgcacatcaggaagctgctgcagaagatggaccggcccaacggcctgtaccccaactacctgaaccccaggacaggccgctggggccagtaccacacctctgtgggcggcctgggggacagcttctatgagtacctgctgaaggcctggctgatgtctgacaagacagaccacgaggccaggaagatgtatgatgatgccatcgaggccatcgagaagcacctgatcaagaagagccggggcggcctgaccttcatcggggagtggaagaatggccacctggagaagaagatgggccacctggcctgctttgctgggggcatgtttgccctgggcgcagatggcagcagagctgacaaggccggccactacctggagctgggcgctgagatcgcccggacctgccacgagagctatgacagaacagccctgaagctgggccctgagagcttcaagtttgatggagctgtggaggccgtggccgtgcggcaggccgagaagtactacatcctgcggcctgaggtgattgagacctactggtacctgtggaggttcacccatgacccccgctaccggcagtggggctgggaggccgccctggccatcgagaagtactgccgggtgaatggaggcttcagcggcgtgaaggatgtgtacagcagcacccccacccatgatgatgtgcagcagagcttcttcctggccgagaccctgaagtacctgtacctgctcttctctggagatgacctgctgcccctggaccactgggtgttcaacacagaggcccaccccctgcctgtgctgcacctggccaacaccaccctgagcggcaacccagctgtgaggtag

SEQ ID NO: 158730 - DNA, 1128 bp, synthetic construct
  misc_feature 1..1128: note = Description of Artificial Sequence: Synthetic coding sequence
  source 1..1128: mol_type = other DNA
atgggcctgcatgatgagttcctggatggccagcgctggattgaggacaacctggacttctctgtgaacagcgaggtgtctgtgtttgaggtgaacatccgcttcatcggcggcctgctggccgcctactacctgagcggggaggagatcttcaagatcaaggctgtgcagctggccgagaagctgctgcctgccttcaacacccccaccggcatcccctgggccatggtgaacctgaagtctggagtgggcaggaactggggctgggccagcgctggcagcagcatcctggccgagtttggcaccctgcacatggagttcatccacctgagctacctgaccggggacctgacctactacaagaaggtgatgcacatcaggaagctgctgcagaagatggaccggcccaacggcctgtaccccaactacctgaaccccaggacaggccgctggggccagtaccacacctctgtgggcggcctgggggacagcttctatgagtacctgctgaaggcctggctgatgtctgacaagacagaccacgaggccaggaagatgtatgatgatgccatcgaggccatcgagaagcacctgatcaagaagagccggggcggcctgaccttcatcggggagtggaagaatggccacctggagaagaagatgggccacctggcctgctttgctgggggcatgtttgccctgggcgcagatggcagcagagctgacaaggccggccactacctggagctgggcgctgagatcgcccggacctgccacgagagctatgacagaacagccctgaagctgggccctgagagcttcaagtttgatggagctgtggaggccgtggccgtgcggcaggccgagaagtactacatcctgcggcctgaggtgattgagacctactggtacctgtggaggttcacccatgacccccgctaccggcagtggggctgggaggccgccctggccatcgagaagtactgccgggtgaatggaggcttcagcggcgtgaaggatgtgtacagcagcacccccacccatgatgatgtgcagcagagcttcttcctggccgagaccctgaagctggccagctaccacgagaggacagtgtttcctgctggatag

SEQ ID NO: 158731 - DNA, 615 bp, synthetic construct
  misc_feature 1..615: note = Description of Artificial Sequence: Synthetic coding sequence
  source 1..615: mol_type = other DNA
tgaatcaagaagagcagaggaggcctgaccttcatcggggagtggaagaatggccacctggagaagaagatgggccacctggcctgctttgctgggggcatgtttgccctgggcgcagatggcagcagagctgacaaggccggccactacctggagctgggcgctgagatcgcccggacctgccacgagagctatgacagaacagccctgaagctgggccctgagagcttcaagtttgatggagctgtggaggccgtggccgtgcggcaggccgagaagtactacatcctgcggcctgaggtgattgagacctactggtacctgtggaggttcacccatgacccccgctaccggcagtggggctgggaggccgccctggccatcgagaagtactgccgggtgaatggaggcttctctggagtgaaggatgtgtacagcagcacccccacccatgatgatgtgcagcagagcttcttcctggccgagaccctgaagtacctgtacctgctcttctctggagatgacctgctgcccctggaccactgggtgttcaacacagaggcccaccccctgcctgtgctgcacctggccaacaccaccctgtctgagagctag

SEQ ID NO: 158732 - DNA, 294 bp, synthetic construct
  misc_feature 1..294: note = Description of Artificial Sequence: Synthetic coding sequence
  source 1..294: mol_type = other DNA
gagaagtactgccgggtgaatggaggcttctctggagtgaaggatgtgtacagcagcacccccacccatgatgatgtgcagcagagcttcttcctggccgagaccctgaagtacctgtacctgctcttctctggagatgacctgctgcccctggaccactgggtgttcaacacagaggcccaccccctgcctgtgctgcacctggccaacaccaccctgagcggcaccagccagggcatgaggcggcagaacccctacttccaggtgctgtacctgtactacccagatgactag

SEQ ID NO: 158733 - DNA, 1035 bp, synthetic construct
  misc_feature 1..1035: note = Description of Artificial Sequence: Synthetic coding sequence
  source 1..1035: mol_type = other DNA
tgaatccgcttcatcggcggcctgctggccgcctactacctgtctggagaggagatcttcaagatcaaggctgtgcagctggccgagaagctgctgcctgccttcaacacccccaccggcatcccctgggccatggtgaacctgaagagcggcgtgggcaggaactggggctgggccagcgctggcagcagcatcctggccgagtttggcaccctgcacatggagttcatccacctgagctacctgactggagacctgacctactacaagaaggtgatgcacatcaggaagctgctgcagaagatggaccggcccaacggcctgtaccccaactacctgaaccccaggacaggccgctggggccagtaccacacctctgtgggcggcctgggggacagcttctatgagtacctgctgaaggcctggctgatgtctgacaagacagaccacgaggccaggaagatgtatgatgatgccatcgaggccatcgagaagcacctgatcaagaagagcagaggaggcctgaccttcatcggggagtggaagaatggccacctggagaagaagatgggccacctggcctgctttgctgggggcatgtttgccctgggcgcagatggcagcagagctgacaaggccggccactacctggagctgggcgctgagatcgcccggacctgccacgagagctatgacagaacagccctgaagctgggccctgagagcttcaagtttgatggagctgtggaggccgtggccgtgcggcaggccgagaagtactacatcctgcggcctgaggtgattgagacctactggtacctgtggaggttcacccatgacccccgctaccggcagtggggctgggaggccgccctggccatcgagaagtactgccgggtgaatggaggcttctctggagtgaaggatgtgtacagcagcacccccacccatgatgatgtgcagcagagcttcttcctggccgagaccctgaagctggccagctaccacgagaggacagtgtttcctgctggatag

SEQ ID NO: 158734 - DNA, 2100 bp, synthetic construct
  misc_feature 1..2100: note = Description of Artificial Sequence: Synthetic coding sequence
  source 1..2100: mol_type = other DNA
atggccgcctgtgagggcagaagaagtggggccctgggcagcagccagagcgacttcctgaccccacctgtgggcggggccccctgggccgtggccaccaccgtggtgatgtacccacctcctcctcctccaccccaccgggacttcatctctgtgaccctgagctttggagagaactatgacaacagcaagtcctggaggcggcgcagctgctggaggaagtggaagcagctgagccggctgcagaggaacatgatcctcttcctgctggccttcctgctcttctgtggcctgctcttctacatcaacctggccgaccactggaaggccctggccttccggctggaggaggagcagaagatgaggcctgagattgctggcctgaagccagccaacccccctgtgctgcctgccccccagaaggctgacacagatcctgagaacctgcctgagatcagcagccagaagacccagaggcacatccagaggggccccccccacctgcagatccggccccccagccaggacctgaaggatggcacccaggaggaggccaccaagaggcaggaggcccctgtggaccccaggcctgagggggacccccagaggacagtcatctcctggagaggagctgtgattgagcctgagcagggcacagagctgcccagccggcgggcagaggtgcccaccaagccacccctgcccccagcccggacccagggcacccctgtgcacctgaactaccggcagaagggcgtgattgatgtgttcctgcacgcctggaagggctacaggaagtttgcctggggccatgatgagctgaagcctgtgagccgctccttcagcgagtggtttggcctgggcctgaccctgattgatgccctggacaccatgtggatcctgggcctgaggaaggagtttgaggaggccaggaagtgggtgtccaagaagctgcactttgagaaggatgtggatgtgaacctgtttgagagcaccatccgcatcctgggcggcctgctgagcgcctaccacctgagcggggacagcctcttcctgaggaaggccgaggactttggaaaccggctgatgcctgccttccgcacccccagcaagatcccctacagtgatgtgaacattggaactggagtggcccaccccccacgctggaccagtgacagcacagtggccgaggtgaccagcatccagctggagttccgggagctgagccggctgaccggggacaagaagttccaggaggccgtggagaaggtgacccagcacatccacggcctgagcggcaagaaggatggcctggtgcccatgttcatcaacacccacagcggcctcttcacccacctgggcgtcttcaccctgggcgcccgggctgacagctactatgagtacctgctgaagcagtggatccagggcggcaagcaggagacccagctgctggaggactatgtggaggccattgaaggagtgaggacccacctgctgcggcacagcgagcccagcaagctgacctttgtgggggagctggcccacggccgcttcagcgccaagatggaccacctggtgtgcttcctgcccggcaccctggccctgggcgtgtaccacggcctgcctgccagccacatggagctggcccaggagctgatggagacctgctaccagatgaaccggcagatggagaccggcctgagccctgagatcgtgcacttcaacctgtacccccagcccggcagaagagatgtggaggtgaagccagctgacagacacaacctgctgcggcctgagaccgtggagagcctcttctacctgtacagagtgactggagacaggaagtaccaggactggggctgggagatcctgcagagcttcagccgcttcaccagggtgcccagcggcggctacagcagcatcaacaacgtgcaggacccccagaagccagagccccgggacaagatggagagcttcttcctgggggagaccctgaagtacctgttcctgctcttcagtgatgaccccaacctgctgagcctggatgcctacgtgttcaacacagaggcccaccccctgcccatctggaccccagcctag

SEQ ID NO: 158735 - DNA, 1209 bp, synthetic construct
  misc_feature 1..1209: note = Description of Artificial Sequence: Synthetic coding sequence
  source 1..1209: mol_type = other DNA
atgtggatcctgggcctgaggaaggagtttgaggaggccaggaagtgggtgtccaagaagctgcactttgagaaggatgtggatgtgaacctgtttgagagcaccatccgcatcctgggcggcctgctgagcgcctaccacctgagcggggacagcctcttcctgaggaaggcagaagattttggaaaccggctgatgcctgccttccgcacccccagcaagatcccctacagtgatgtgaacatcggcaccggggtggcccaccccccacgctggaccagtgacagcacagtggccgaggtgaccagcatccagctggagttccgggagctgagccggctgactggagacaagaagttccaggaggccgtggagaaggtgacccagcacatccacggcctgagcggcaagaaggatggcctggtgcccatgttcatcaacacccacagcggcctcttcacccacctgggcgtcttcaccctgggcgcccgggctgacagctactatgagtacctgctgaagcagtggatccagggcggcaagcaggagacccagctgctggaggactatgtggaggccatcgagggcgtgaggacccacctgctgcggcacagcgagcccagcaagctgacctttgtgggggagctggcccacggccgcttcagcgccaagatggaccacctggtgtgcttcctgcccggcaccctggccctgggcgtgtaccacggcctgcctgccagccacatggagctggcccaggagctgatggagacctgctaccagatgaaccggcagatggagaccggcctgagccctgagatcgtgcacttcaacctgtacccccagcctggaagaagagatgtggaggtgaagccagctgacagacacaacctgctgcggcctgagaccgtggagagcctcttctacctgtacagagtgactggagacaggaagtaccaggactggggctgggagatcctgcagagcttcagccgcttcaccagggtgcccagcggcggctacagcagcatcaacaacgtgcaggacccccagaagccagagccccgggacaagatggagagcttcttcctgggggagaccctgaagtacctgttcctgctcttcagtgatgaccccaacctgctgagcctggatgcctacgtgttcaacacagaggcccaccccctgcccatctggaccccagcctag

SEQ ID NO: 158736 - DNA, 2118 bp, synthetic construct
  misc_feature 1..2118: note = Description of Artificial Sequence: Synthetic coding sequence
  source 1..2118: mol_type = other DNA
tgaccctgggccgtggccaccaccgtggtgatgtacccacctcctcctcctccaccccaccgggacttcatctctgtgaccctgagctttggagagaactatgacaacagcaagtcctggaggcggcgcagctgctggaggaagtggaagcagctgagccggctgcagaggaacatgatcctcttcctgctggccttcctgctcttctgtggcctgctcttctacatcaacctggccgaccactggaaggccctggccttccggctggaggaggagcagaagatgaggcctgagattgctggcctgaagccagccaacccccctgtgctgcctgccccccagaaggctgacacagatcctgagaacctgcctgagatcagcagccagaagacccagaggcacatccagaggggccccccccacctgcagatccggccccccagccaggacctgaaggatggcacccaggaggaggccaccaagaggcaggaggcccctgtggaccccaggcctgagggggacccccagaggacagtcatctcctggagaggagctgtgattgagcctgagcagggcacagagctgcccagccggcgggcagaggtgcccaccaagccacccctgcccccagcccggacccagggcacccctgtgcacctgaactaccggcagaagggcgtgattgatgtgttcctgcacgcctggaagggctacaggaagtttgcctggggccatgatgagctgaagcctgtgagccgctccttcagcgagtggtttggcctgggcctgaccctgattgatgccctggacaccatgtggatcctgggcctgaggaaggagtttgaggaggccaggaagtgggtgtccaagaagctgcactttgagaaggatgtggatgtgaacctgtttgagagcaccatccgcatcctgggcggcctgctgagcgcctaccacctgagcggggacagcctcttcctgaggaaggccgaggactttggaaaccggctgatgcctgccttccgcacccccagcaagatcccctacagtgatgtgaacattggaactggagtggcccaccccccacgctggaccagtgacagcacagtggccgaggtgaccagcatccagctggagttccgggagctgagccggctgaccggggacaagaagttccaggaggccgtggagaaggtgacccagcacatccacggcctgagcggcaagaaggatggcctggtgcccatgttcatcaacacccacagcggcctcttcacccacctgggcgtcttcaccctgggcgcccgggctgacagctactatgagtacctgctgaagcagtggatccagggcggcaagcaggagacccagctgctggaggactatgtggaggccattgaaggagtgaggacccacctgctgcggcacagcgagcccagcaagctgacctttgtgggggagctggcccacggccgcttcagcgccaagatggaccacctggtgtgcttcctgcccggcaccctggccctgggcgtgtaccacggcctgcctgccagccacatggagctggcccaggagctgatggagacctgctaccagatgaaccggcagatggagaccggcctgagccctgagatcgtgcacttcaacctgtacccccagcccggcagaagagatgtggaggtgaagccagctgacagacacaacctgctgcggcctgagaccgtggagagcctcttctacctgtacagagtgactggagacaggaagtaccaggactggggctgggagatcctgcagagcttcagccgcttcaccagggtgtccacctgccccaggcctgcctggagccggcccccaggccacagacatggctgggccgtgggcctgcggctggcccccctgctggtggtggccgtgacctggatccgggagggccgggcctgccgcagcctgggcgtggccaccctgcagctgggcggccctggcatccccatccccacagagctgcacggctgcggcacccagagcacctggaggggctgggcccccctcatcttcatcagccagggcctgagccgggagggcctgtgctgcggccccagcatcccccctgtgtag

SEQ ID NO: 158737 - DNA, 3435 bp, synthetic construct
  misc_feature 1..3435: note = Description of Artificial Sequence: Synthetic coding sequence
  source 1..3435: mol_type = other DNA
atgaagctgagccggcagttcaccgtgtttggcagcgccatcttctgtgtggtgatcttcagcctgtacctgatgctggaccggggccacctggactaccccaggaacccccggcgggagggcagcttcccccagggccagctgtccatgctgcaggagaagattgaccacctggagcggctgctggccgagaacaatgagatcatcagcaacatccgggacagcgtcatcaacctgtctgagagcgtggaggatggccccaagagcagccagagcaacttcagccagggcgccggcagccacctgctgcccagccagctgagcctgtctgtggacacagctgactgcctgtttgccagccagagcggcagccacaacagtgatgtgcagatgctggatgtgtacagcctcatcagctttgacaacccagatggcggcgtgtggaagcagggctttgacatcacctatgagagcaatgagtgggacacagagcccctgcaggtgtttgtggtgccccacagccacaatgaccccggctggctgaagaccttcaatgactacttccgggacaagacccagtacatcttcaacaacatggtgctgaagctgaaggaggacagcaggaggaagttcatctggagcgagatctcctacctgagcaagtggtgggacatcatcgacatccagaagaaggatgctgtgaagagcctgattgaaaatggccagctggagatcgtgactggaggctgggtgatgccagatgaggccaccccccactactttgccctgattgaccagctgattgagggccaccagtggctggagaacaacatcggcgtgaagcccaggagcggctgggccatcgaccccttcggccacagccccaccatggcctacctgctgaacagagctggcctgagccacatgctgatccagagggtgcactatgctgtgaagaagcactttgccctgcacaagaccctggagttcttctggaggcagaactgggacctgggctctgtgacagacatcctgtgccacatgatgcccttctacagctatgacatcccccacacctgtggccctgaccccaagatctgctgccagtttgacttcaagaggctgcccggcggccgcttcggctgcccctggggcgtgcccccagagaccatccaccctggaaatgtgcagagccgggccaggatgctgctggaccagtacaggaagaagagcaagctgttccgcaccaaggtgctgctggcccccctgggagatgacttccgctactgtgagtacacagagtgggacctgcagttcaagaactaccagcagctgtttgactacatgaacagccagagcaagttcaaggtgaagatccagtttggcaccctgagtgacttctttgatgccctggacaaggcagatgagacccagagggacaagggccagagcatgtttcctgtgctgagcggggacttcttcacctatgctgacagagatgaccactactggagcggctacttcaccagccggcccttctacaagaggatggaccgcatcatggagagccacctgcgggctgctgagatcctgtactactttgccctgcggcaggcccacaagtacaagatcaacaagttcctgagcagcagcctgtacacagccctgacagaggcccggaggaacctgggcctcttccagcaccatgatgccatcactggaacagccaaggactgggtggtggtggactatggcaccaggctcttccacagcctgatggtgctggagaagatcatcggcaacagcgccttcctgctgatcctgaaggacaagctgacctatgacagctacagcccagacaccttcctggagatggacctgaagcagaagagccaggacagcctgccccagaagaacatcatccggctgtctgctgagccccgctacctggtggtgtacaaccccctggagcaggaccgcatcagcctggtgtctgtgtatgtgagcagccccaccgtgcaggtgttttctgccagcggcaagcctgtggaggtgcaggtgtctgctgtgtgggacacagccaacaccatcagcgagacagcctatgagatctccttccgggcccacatcccccccctgggcctgaaggtgtacaagatcctggagagcgccagcagcaacagccacctggccgactatgtgctgtacaagaacaaggtggaggacagcggcatcttcaccatcaagaacatgatcaacacagaggagggcatcaccctggagaacagctttgtgctgctgcgctttgaccagacaggcctgatgaagcagatgatgaccaaggaggatggcaagcaccacgaggtgaatgtgcagttctcctggtacggcaccaccatcaagagggacaagagcggggcctacctgttcctgcctgatggaaatgccaagccctacgtgtacaccaccccaccatttgtgcgggtgacccacggccgcatctacagcgaggtgacctgcttctttgaccacgtgacccaccgggtgcggctgtaccacatccagggcatcgagggccagagcgtggaggtgagcaacatcgtggacatcaggaaggtgtacaaccgggagatcgccatgaagatcagcagtgacatcaagagccagaaccgcttctacacagacctgaatggctaccagatccagcccaggatgaccctgagcaagctgcccctgcaggccaacgtgtaccccatgaccaccatggcctacatccaggatgccaagcaccggctgaccctgctgagcgcccagagcctgggcgtgagcagcctgaacagcggccagatcgaggtgatcatggaccggcggctgatgcaggatgacaacagaggcctggagcagggcatccaggacaacaagatcacagccaacctcttccgcatcctgctggagaagaggtctgctgtgaacacagaggaggagaagaagtctgtgtcctaccccagcctgctgagccacatcaccagcagcctgatgaaccaccctgtgatccccatggccaacaagttcagcagccccaccctggagctgcagggcgagttcagccccctgcagagcagcctgccctgtgacatccacctggtgaacctgcggaccatccagagcaaggtgggcaatggccacagcaatgaggccgccctgatcctgcacaggaaaggatttgactgccgcttcagcagcaagggcaccggcctcttctgcagcaccacccagggcaagatcctggtgcagaagctgctgaacaagttcatcgtggagagcctgacccccagcagcctgagcctgatgcacagccccccaggcacccagaacatcagcgagatcaacctgagccccatggagatcagcaccttccgcatccagctgaggtag

SEQ ID NO: 158738 - DNA, 3453 bp, synthetic construct
  misc_feature 1..3453: note = Description of Artificial Sequence: Synthetic coding sequence
  source 1..3453: mol_type = other DNA
atgaagctgaagaagcaggtgacagtgtgtggggccgccatcttctgtgtggccgtgttcagcctgtacctgatgctggacagagtgcagcacgaccccaccaggcaccagaatggaggcaacttccccaggagccagatctctgtgctgcagaaccgcatcgagcagctggagcagctgctggaggagaaccacgagatcatcagccacatcaaggacagcgtgctggagctgacagccaatgctgagggccccccagccatgctgccctactacacagtgaatggctcctgggtggtgcccccagagccccggcccagcttcttcagcatcagcccccaggactgccagtttgccctgggcggccggggccagaagccagagctgcagatgctgactgtgtctgaggagctgccctttgacaacgtggatggcggcgtgtggaggcagggctttgacatctcctatgacccccatgactgggatgctgaggacctgcaggtgtttgtggtgccccacagccacaatgaccccggctggatcaagacctttgacaagtactacacagagcagacccagcacatcctgaacagcatggtgtccaagctgcaggaggacccccggcggcgcttcctgtgggccgaggtgtccttctttgccaagtggtgggacaacatcaacgtgcagaagagagctgctgtgcggcggctggtgggcaatggccagctggagatcgccactggaggctgggtgatgccagatgaggccaacagccactactttgccctgattgaccagctgattgagggccaccagtggctggagaggaacctgggcgccacccccaggagcggctgggccgtggaccccttcggctacagcagcaccatgccctacctgctgcggcgggccaacctgacctccatgctgatccagagggtgcactacgccatcaagaagcactttgctgccacccacagcctggagttcatgtggaggcagacctgggacagcgacagcagcacagacatcttctgccacatgatgcccttctacagctatgatgtgccccacacctgtggccctgaccccaagatctgctgccagtttgacttcaagaggctgcccggcggccgcatcaactgcccctggaaggtgcccccccgggccatcacagaggccaacgtggccgagcgggccgccctgctgctggaccagtacaggaagaagagccagctgttccgcagcaatgtgctgctggtgcccctgggagatgacttccgctatgacaagccccaggagtgggatgcccagttcttcaactaccagaggctgtttgacttcttcaacagccggcccaacctgcacgtgcaggcccagtttggcaccctgagtgactactttgatgccctgtacaagaggactggagtggagcccggggcccggcccccaggcttccctgtgctgagcggggacttcttctcctatgctgaccgggaggaccactactggacaggctactacaccagccggcccttctacaagagcctggacagagtgctggaggcccacctgcggggagctgaggtgctgtacagcctggccgccgcccacgcccggcgcagcggcctggccggccgctaccccctgagtgacttcaccctgctgacagaggcccggaggaccctgggcctcttccagcaccatgatgccatcactggaacagccaaggaggccgtggtggtggactatggagtgcggctgctgcggagcctggtgaacctgaagcaggtgatcatccacgccgcccactacctggtgctgggggacaaggagacctaccactttgatcctgaggcccccttcctgcaggtggatgacacccggctgagccatgatgccctgcctgagaggacagtcatccagctggacagcagccccaggtttgtggtgctcttcaaccccctggagcaggagcgcttctccatggtgtccctgctggtgaacagcccccgggtgcgggtgctgtctgaggagggccagcccctggccgtgcagatcagcgcccactggagcagcgccacagaagctgtgcctgatgtgtaccaggtgtctgtgcctgtgcggctgcctgccctgggcctgggcgtgctgcagctgcagctgggcctggatggccacaggaccctgcccagctctgtgcgcatctacctgcacggccggcagctgtctgtgtccagacatgaggccttccccctgcgggtcatcgacagcggcaccagtgactttgccctgagcaaccgctacatgcaggtgtggttcagcggcctgaccggcctgctgaagagcatcagaagagtggatgaggagcacgagcagcaggtggacatgcaggtgctggtgtatggcaccaggaccagcaaggacaagagcggggcctacctgttcctgcctgatggagaggccaagccctacgtgcccaaggagccccctgtgctgcgggtgacagagggccccttcttcagcgaggtggtggcctactatgagcacatccaccaggccgtgcggctgtacaacctgcccggggtggagggcctgagcctggacatcagcagcctggtggacatccgggactatgtgaacaaggagctggccctgcacatccacacagacatcgacagccagggcatcttcttcacagacctgaatggcttccaggtgcagccccggcgctacctgaagaagctgcccctgcaggccaacttctaccccatgcctgtgatggcctacatccaggatgcccagaagaggctgaccctgcacacagcccaggccctgggcgtgagcagcctgaaggatggccagctggaggtgatcctggaccggcggctgatgcaggatgacaacagaggcctgggccagggcctgaaggacaacaagaggacctgcaaccgcttccggctgctgctggagaggagaacagtgggcagcgaggtgcaggacagccacagcaccagctaccccagcctgctgagccacctgacctccatgtacctgaatgccccagccctggccctgcctgtggccaggatgcagctgcccggccctggcctgcggagcttccaccccctggccagcagcctgccctgtgacttccacctgctgaacctgcggaccctgcaggccgaggaggacaccctgcccagcgctgagacagccctgatcctgcacaggaaaggatttgactgtggcctggaggccaagaacctgggcttcaactgcaccaccagccagggcaaggtggccctgggcagcctcttccacggcctggatgtggtgttcctgcagcccaccagcctgaccctgctgtaccccctggccagccccagcaacagcacagatgtgtacctggagcccatggagatcgccaccttccggctgcggctgggctag

SEQ ID NO: 158739 - DNA, 1023 bp, synthetic construct
  misc_feature 1..1023: note = Description of Artificial Sequence: Synthetic coding sequence
  source 1..1023: mol_type = other DNA
atgcaggtgtggttcagcggcctgaccggcctgctgaagccctacgtgcccaaggagccccctgtgctgcgggtgacagagggccccttcttcagcgaggtggtggcctactatgagcacatccaccaggccgtgcggctgtacaacctgcccggggtggagggcctgagcctggacatcagcagcctggtggacatccgggactatgtgaacaaggagctggccctgcacatccacacagacatcgacagccagggcatcttcttcacagacctgaatggcttccaggtgcagccccggcgctacctgaagaagctgcccctgcaggccaacttctaccccatgcctgtgatggcctacatccaggatgcccagaagaggctgaccctgcacacagcccaggccctgggcgtgagcagcctgaaggatggccagctggaggtgatcctggaccggcggctgatgcaggatgacaacagaggcctgggccagggcctgaaggacaacaagaggacctgcaaccgcttccggctgctgctggagaggagaacagtgggcagcgaggtgcaggacagccacagcaccagctaccccagcctgctgagccacctgacctccatgtacctgaatgccccagccctggccctgcctgtggccaggatgcagctgcccggccctggcctgcggagcttccaccccctggccagcagcctgccctgtgacttccacctgctgaacctgcggaccctgcaggccgaggaggacaccctgcccagcgctgagacagccctgatcctgcacaggaaaggatttgactgtggcctggaggccaagaacctgggcttcaactgcaccaccagccagggcaaggtggccctgggcagcctcttccacggcctggatgtggtgttcctgcagcccaccagcctgaccctgctgtaccccctggccagccccagcaacagcacagatgtgtacctggagcccatggagatcgccaccttccggctgcggctgggctag

SEQ ID NO: 158740 - DNA, 1977 bp, synthetic construct
  misc_feature 1..1977: note = Description of Artificial Sequence: Synthetic coding sequence
  source 1..1977: mol_type = other DNA
atgaccagtgacatgaccagccccaggagcggcatgcccagcagcagcaccaccaacggcagcctgaccagcagcacagctggcctgacctccatgtgccgcggggctgaggtgctgtacagcctggccgccgcccacgcccggcgcagcggcctggccggccgctaccccctgagtgacttcaccctgctgacagaggcccggaggaccctgggcctcttccagcaccatgatgccatcactggaacagccaaggaggccgtggtggtggactatggagtgcggctgctgcggagcctggtgaacctgaagcaggtgatcatccacgccgcccactacctggtgctgggggacaaggagacctaccactttgatcctgaggcccccttcctgcaggtggatgacacccggctgagccatgatgccctgcctgagaggacagtcatccagctggacagcagccccaggtttgtggtgctcttcaaccccctggagcaggagcgcttctccatggtgtccctgctggtgaacagcccccgggtgcgggtgctgtctgaggagggccagcccctggccgtgcagatcagcgcccactggagcagcgccacagaagctgtgcctgatgtgtaccaggtgtctgtgcctgtgcggctgcctgccctgggcctgggcgtgctgcagctgcagctgggcctggatggccacaggaccctgcccagctctgtgcgcatctacctgcacggccggcagctgtctgtgtccagacatgaggccttccccctgcgggtcatcgacagcggcaccagtgactttgccctgagcaaccgctacatgcaggtgtggttcagcggcctgaccggcctgctgaagagcatcagaagagtggatgaggagcacgagcagcaggtggacatgcaggtgctggtgtatggcaccaggaccagcaaggacaagagcggggcctacctgttcctgcctgatggagaggccaagccctacgtgcccaaggagccccctgtgctgcgggtgacagagggccccttcttcagcgaggtggtggcctactatgagcacatccaccaggccgtgcggctgtacaacctgcccggggtggagggcctgagcctggacatcagcagcctggtggacatccgggactatgtgaacaaggagctggccctgcacatccacacagacatcgacagccagggcatcttcttcacagacctgaatggcttccaggtgcagccccggcgctacctgaagaagctgcccctgcaggccaacttctaccccatgcctgtgatggcctacatccaggatgcccagaagaggctgaccctgcacacagcccaggccctgggcgtgagcagcctgaaggatggccagctggaggtgatcctggaccggcggctgatgcaggatgacaacagaggcctgggccagggcctgaaggacaacaagaggacctgcaaccgcttccggctgctgctggagaggagaacagtgggcagcgaggtgcaggacagccacagcaccagctaccccagcctgctgagccacctgacctccatgtacctgaatgccccagccctggccctgcctgtggccaggatgcagctgcccggccctggcctgcggagcttccaccccctggccagcagcctgccctgtgacttccacctgctgaacctgcggaccctgcaggccgaggaggacaccctgcccagcgctgagacagccctgatcctgcacaggaaaggatttgactgtggcctggaggccaagaacctgggcttcaactgcaccaccagccagggcaaggtggccctgggcagcctcttccacggcctggatgtggtgttcctgcagcccaccagcctgaccctgctgtaccccctggccagccccagcaacagcacagatgtgtacctggagcccatggagatcgccaccttccggctgcggctgggctag

SEQ ID NO: 158741 - DNA, 219 bp, synthetic construct
  misc_feature 1..219: note = Description of Artificial Sequence: Synthetic coding sequence
  source 1..219: mol_type = other DNA
atgaagctgaagaagcaggtgacagtgtgtggggccgccatcttctgtgtggccgtgttcagcctgtacctgatgctggacagagtgcagcacgaccccaccaggcaccagaatggaggcaacttccccaggagccagatctctgtgctgcagaaccgcatcgagcagctggagcagctgctggaggagaaccacgagatcatcagccacatcaagtag

SEQ ID NO: 158742 - DNA, 153 bp, synthetic construct
  misc_feature 1..153: note = Description of Artificial Sequence: Synthetic coding sequence
  source 1..153: mol_type = other DNA
atgaagctgaagaagcaggtgacagtgtgtggggccgccatcttctgtgtggccgtgttcagcctgtacctgatgctggacagagtgcagcacgaccccaccaggcaccagaatggaggcaacttccccaggagccagatctctgtgctgtag

SEQ ID NO: 158743 - DNA, 3192 bp, synthetic construct
  misc_feature 1..3192: note = Description of Artificial Sequence: Synthetic coding sequence
  source 1..3192: mol_type = other DNA
atgctgccctactacacagtgaatggctcctgggtggtgcccccagagccccggcccagcttcttcagcatcagcccccaggactgccagtttgccctgggcggccggggccagaagccagagctgcagatgctgactgtgtctgaggagctgccctttgacaacgtggatggaggagtgtggaggcagggctttgacatctcctatgacccccatgactgggatgctgaggacctgcaggtgtttgtggtgccccacagccacaatgaccccggctggatcaagacctttgacaagtactacacagagcagacccagcacatcctgaacagcatggtgtccaagctgcaggaggacccccggcggcgcttcctgtgggccgaggtgtccttctttgccaagtggtgggacaacatcaacgtgcagaagagagctgctgtgcggcggctggtgggcaatggccagctggagatcgccaccggcggctgggtgatgccagatgaggccaacagccactactttgccctgattgaccagctgattgagggccaccagtggctggagaggaacctgggcgccacccccaggagcggctgggccgtggaccccttcggctacagcagcaccatgccctacctgctgcggcgggccaacctgacctccatgctgatccagagggtgcactacgccatcaagaagcactttgctgccacccacagcctggagttcatgtggaggcagacctgggacagcgacagcagcacagacatcttctgccacatgatgcccttctacagctatgatgtgccccacacctgtggccctgaccccaagatctgctgccagtttgacttcaagaggctgcccggcggccgcatcaactgcccctggaaggtgcccccccgggccatcacagaggccaacgtggccgagagagctgccctgctgctggaccagtacaggaagaagagccagctgttccgcagcaatgtgctgctggtgcccctgggagatgacttccgctatgacaagccccaggagtgggatgcccagttcttcaactaccagaggctgtttgacttcttcaacagccggcccaacctgcacgtgcaggcccagtttggcaccctgagtgactactttgatgccctgtacaagaggactggagtggagcccggggcccggcccccaggcttccctgtgctgagcggggacttcttctcctatgctgaccgggaggaccactactggacaggctactacaccagccggcccttctacaagagcctggacagagtgctggaggcccacctgcggggagctgaggtgctgtacagcctggccgccgcccacgccaggagaagtggcctggccggccgctaccccctgagtgacttcaccctgctgacagaggcccggaggaccctgggcctcttccagcaccatgatgccatcaccggcacagccaaggaggccgtggtggtggactatggagtgcggctgctgcggagcctggtgaacctgaagcaggtgatcatccatgctgcccactacctggtgctgggggacaaggagacctaccactttgatcctgaggcccccttcctgcaggtggatgacacccggctgagccatgatgccctgcctgagaggacagtcatccagctggacagcagccccaggtttgtggtgctcttcaaccccctggagcaggagcgcttctccatggtgtccctgctggtgaacagcccccgggtgcgggtgctgtctgaggagggccagcccctggccgtgcagatcagcgcccactggagcagcgccacagaggccgtgcctgatgtgtaccaggtgtctgtgcctgtgcggctgcctgccctgggcctgggcgtgctgcagctgcagctgggcctggatggccacaggaccctgcccagctctgtgcgcatctacctgcacggccggcagctgtctgtgtccagacatgaggccttccccctgcgggtgattgattctggcaccagtgactttgccctgagcaaccgctacatgcaggtgtggttcagcggcctgaccggcctgctgaagagcatccggcgggtggatgaggagcacgagcagcaggtggacatgcaggtgctggtgtatggcaccaggaccagcaaggacaagagcggggcctacctgttcctgcctgatggagaggccaagccctacgtgcccaaggagccccctgtgctgcgggtgacagagggccccttcttcagcgaggtggtggcctactatgagcacatccaccaggccgtgcggctgtacaacctgcccggggtggagggcctgagcctggacatcagcagcctggtggacatccgggactatgtgaacaaggagctggccctgcacatccacacagacatcgacagccagggcatcttcttcacagacctgaatggcttccaggtgcagccccggcgctacctgaagaagctgcccctgcaggccaacttctaccccatgcctgtgatggcctacatccaggatgcccagaagaggctgaccctgcacacagcccaggccctgggcgtgagcagcctgaaggatggccagctggaggtgatcctggaccggcggctgatgcaggatgacaacagaggcctgggccagggcctgaaggacaacaagaggacctgcaaccgcttccggctgctgctggagaggagaacagtgggcagcgaggtgcaggacagccacagcaccagctaccccagcctgctgagccacctgacctccatgtacctgaatgccccagccctggccctgcctgtggccaggatgcagctgcccggccctggcctgcgctccttccaccccctggccagcagcctgccctgtgacttccacctgctgaacctgcggaccctgcaggccgaggaggacaccctgcccagcgctgagacagccctgatcctgcacaggaagggctttgactgtggcctggaggccaagaacctgggcttcaactgcaccaccagccagggcaaggtggccctgggcagcctcttccacggcctggatgtggtgttcctgcagcccaccagcctgaccctgctgtaccccctggccagccccagcaacagcacagatgtgtacctggagcccatggagatcgccaccttccggctgcggctgggctag

SEQ ID NO: 158744 - DNA, 231 bp, synthetic construct
  misc_feature 1..231: note = Description of Artificial Sequence: Synthetic coding sequence
  source 1..231: mol_type = other DNA
atgaagctgaagaagcaggtgacagtgtgtggggccgccatcttctgtgtggccgtgttcagcctgtacctgatgctggacagagtgcagcacgaccccaccaggcaccagaatggaggcaacttccccaggagccagatctctgtgctgcagaaccgcatcgagcagctggagcagctgctggaggagaaccacgagatcatcagccacatcaaggacagcgtgctgtag

SEQ ID NO: 158745 - DNA, 363 bp, synthetic construct
  misc_feature 1..363: note = Description of Artificial Sequence: Synthetic coding sequence
  source 1..363: mol_type = other DNA
atgaagctgaagaagcaggtgacagtgtgtggggccgccatcttctgtgtggccgtgttcagcctgtacctgatgctggacagagtgcagcacgaccccaccaggcaccagaatggaggcaacttccccaggagccagatctctgtgctgcagaaccgcatcgagcagctggagcagctgctggaggagaaccacgagatcatcagccacatcaaggacagcgtgctggagctgacagccaatgctgagggccccccagccatgctgccctactacacagtgaatggctcctgggtggtgcccccagagccccggcccagcttcttcagcatcagcccccaggactgccagtttgccctgtag

SEQ ID NO: 158746 - DNA, 3123 bp, synthetic construct
  misc_feature 1..3123: note = Description of Artificial Sequence: Synthetic coding sequence
  source 1..3123: mol_type = other DNA
atggctgctgccccagccctgaagcactggaggaccaccctggagcgggtggagaagtttgtgagccccctgtacttcacagactgcaacctgcggggccgcctgtttggagccagctgccctgtggccgtgctgagcagcttcctgaccccagagcggctgccctaccaggaggccgtgcagagggacttccggcctgcccaggtgggggacagctttggccccacctggtggacctgctggttccgggtggagctgaccatccctgaggcctgggtgggccaggaggtgcacctgtgctgggagagtgatggagagggcctggtgtggagagatggagagcctgtgcagggcctgaccaaggagggggagaagaccagctatgtgctgacagaccggctgggggagcgggaccccaggagcctgaccctgtatgtggaggtggcctgcaatggcctgctgggcgctgggaagggctccatgattgctgccccagaccctgagaagatgttccagctgagcagagctgagctggccgtgttccacagagatgtgcacatgctgctggtggacctggagctgctgctgggcatcgccaagggcctgggcaaggacaaccagaggagcttccaggccctgtacacagccaaccagatggtgaatgtgtgtgaccctgcccagcctgagaccttccctgtggcccaggccctggccagccgcttcttcggccagcacggcggggagagccagcacaccatccacgccaccggccactgccacatcgacacagcctggctgtggcccttcaaggagaccgtgaggaaatgtgcccgctcctgggtgacagccctgcagctgatggagagaaatcctgagttcatctttgcctgcagccaggcccagcagctggagtgggtgaagagccgctacccaggcctgtacagccgcatccaggagtttgcctgccggggccagtttgtgcctgtgggcggcacctgggtggagatggatggcaacctgcccagcggggaggccatggtgcggcagttcctgcagggccagaacttcttcctgcaggagtttgggaagatgtgcagcgagttctggctgcctgacaccttcggctacagcgcccagctgccccagatcatgcacggctgcggcatccgccgcttcctgacccagaagctgtcctggaacctggtgaacagcttcccccaccacaccttcttctgggagggcctggatggcagccgggtgctggtgcacttccccccaggggacagctatggcatgcagggctctgtggaggaggtgctgaagacagtggccaacaacagagacaagggccgggccaaccacagcgccttcctgtttggatttggagatggcggcggcggccccacccagaccatgctggaccggctgaagaggctgagcaacacagatggcctgccccgggtgcagctgagcagcccccggcagctgttcagcgccctggagagtgacagcgagcagctgtgcacctgggtgggggagctgttcctggagctgcacaacggcacctacaccacccacgcccagatcaagaagggcaacagagaatgtgagcgcatcctgcatgatgtggagctgctgagcagcctggccctggcccggagcgcccagttcctgtacccagctgcccagctgcagcacctgtggaggctgctgctgctgaaccagttccatgatgtggtgacaggcagctgcatccagatggtggccgaggaggccatgtgccactatgaggacatccgcagccacggcaacaccctgctgtctgctgctgctgctgccctgtgtgccggggagcccggccctgagggcctgctgattgtgaacaccctgccctggaagagaattgaggtgatggccctgcccaagccaggaggagcccacagcctggccctggtgacagtgcccagcatgggctacgcccctgtgcccccacccaccagcctgcagcccctgctgccccagcagcctgtgtttgtggtgcaggagacagatggctctgtgaccctggacaatggcatcatccgggtgaagctggaccccaccggccgcctgaccagcctggtgctggtggccagcggccgggaggccatcgccgagggcgctgtgggcaaccagtttgtgctgtttgatgatgtgcccctgtactgggatgcctgggatgtgatggactaccacctggagaccaggaagcctgtgctgggccaggccggcaccctggccgtgggcacagaaggaggcctgcggggcagcgcctggttcctgctgcagatcagccccaacagccggctgagccaggaggtggtgctggatgtgggctgcccctacgtgcgcttccacacagaggtgcactggcatgaggcccacaagttcctgaaggtggagttccctgcccgggtgcgcagcagccaggccacctatgagatccagtttggccacctgcagaggcccacccactacaacacctcctgggactgggccaggtttgaggtgtgggcccaccgctggatggacctgtctgaacatggcttcggcctggccctgctgaatgactgcaagtatggagcctctgtgcggggcagcatcctgagcctgagcctgctgcgggcccccaaggccccagatgccacagctgacaccggcagacatgagttcacctacgccctgatgccccacaagggcagcttccaggatgctggggtcatccaggccgcctacagcctgaacttccccctgctggccctgcctgcccccagccctgccccagccacctcctggagcgccttctctgtgagcagccctgctgtggtgctggagaccgtgaagcaggccgagagcagcccccagaggaggagcctggtgctgcggctgtatgaggcccacggcagccacgtggactgctggctgcacctgagcctgcctgtgcaggaggccatcctgtgtgacctgctggagaggccagaccctgctggccacctgaccctgcgggacaaccggctgaagctgaccttcagccccttccaggtgctgagcctgctgctggtgctgcagcccccaccccactag

SEQ ID NO: 158747 - DNA, 630 bp, synthetic construct
  misc_feature 1..630: note = Description of Artificial Sequence: Synthetic coding sequence
  source 1..630: mol_type = other DNA
atggctgctgccccagccctgaagcactggaggaccaccctggagcgggtggagaagtttgtgagccccctgtacttcacagactgcaacctgcggggccgcctgtttggagccagctgccctgtggccgtgctgagcagcttcctgaccccagagcggctgccctaccaggaggccgtgcagagggacttccggcctgcccaggtgggggacagctttggccccacctggtggacctgctggttccgggtggagctgaccatccctgaggcctgggtgggccaggaggtgcacctgtgctgggagagtgatggagagggcctggtgtggagagatggagagcctgtgcagggcctgaccaaggagggggagaagaccagctatgtgctgacagaccggctgggggagcgggaccccaggagcctgaccctgtatgtggaggtggcctgcaatggcctgctgggcgctgggaagggctccatgattgctgccccagaccctgagaagatgttccagctgagcagagctgagctggccgtgttccacagagatgtgcacatgctgctggtggacctggagctgctgctgggcatcgccaagccaggcttcggccccagcaagaggctgtag

SEQ ID NO: 158748 - DNA, 2910 bp, synthetic construct
  misc_feature 1..2910: note = Description of Artificial Sequence: Synthetic coding sequence
  source 1..2910: mol_type = other DNA
atggctgaagatgacccctacctgggccggcctgagcagatgttccacctggaccccagcctgacccacaccatcttcaaccctgaggtgttccagccccagatggccctgcccacagcagatggcccctacctgcagatcctggagcagcccaagcagaggggcttccgcttccgctacgtgtgtgagggccccagccatggaggcctgcccggggccagcagcgagaagaacaagaagagctacccccaggtgaagatctgcaactacgtgggccctgccaaggtgattgtgcagctggtgaccaacgggaagaacatccacctgcacgcccacagcctggtgggcaagcactgtgaagatggcatctgcaccgtgacagctggccccaaggacatggtggtgggctttgccaacctgggcatcctgcacgtgaccaagaagaaggtgtttgagaccctggaggccaggatgacagaggcctgcatccggggctacaaccctggcctgctggtgcacccagacctggcctacctgcaggccgagggcggcggggaccggcagctgggggaccgggagaaggagctgatccggcaggccgccctgcagcagaccaaggagatggacctgtctgtggtgcggctgatgttcaccgccttcctgcctgacagcacaggcagcttcacccggcggctggagcctgtggtgtctgatgccatctatgacagcaaggccccaaatgccagcaacctgaagatcgtgaggatggacagaacagctggctgtgtgactggaggagaggagatctacctgctgtgtgacaaggtgcagaaggatgacatccagatccgcttctatgaggaggaggagaatggaggagtgtgggagggctttggagacttcagccccacagatgtgcaccggcagtttgccatcgtgttcaagacccccaagtacaaggacatcaacatcaccaagccagcctctgtgtttgtgcagctgcggaggaagagtgacctggagaccagcgagcccaagcccttcctgtactacccagagatcaaggacaaggaggaggtgcagaggaagaggcagaagctgatgcccaacttcagtgacagctttggaggcggcagcggggccggggccggcggcggcggcatgtttggaagtggcggcggcggcggcggcaccggcagcactggacctggctacagcttcccccactacggcttccccacctatggaggcatcaccttccaccctggcaccaccaagagcaatgccggcatgaagcacggcaccatggacacagagagcaagaaggaccctgagggctgtgacaagagtgatgacaagaacacagtgaacctgtttgggaaggtgattgagaccacagagcaggaccaggagcccagcgaggccaccgtgggcaatggagaggtgaccctgacctacgccaccggcaccaaggaggagagcgctggggtgcaggacaacctcttcctggagaaggccatgcagctggccaagagacatgccaatgccctgtttgattatgctgtgactggagatgtgaagatgctgctggccgtgcagaggcacctgacagctgtgcaggatgaaaatggagacagcgtgctgcacctggccatcatccacctgcacagccagctggtgcgggacctgctggaggtgaccagcggcctcatcagtgatgacatcatcaacatgagaaatgacctgtaccagacccccctgcacctggccgtcatcaccaagcaggaggatgtggtggaggacctgctgcgggccggggctgacctgagcctgctggaccggctgggcaacagcgtgctgcacctggccgccaaggagggccatgacaaggtgctgagcatcctgctgaagcacaagaaggccgccctgctgctggaccaccccaatggagatggcctgaatgccatccacctggccatgatgagcaacagcctgccctgcctgctgctgctggtggccgccggggctgatgtgaatgcccaggagcagaagagcggccgcacagccctgcacctggccgtggagcatgacaacatcagcctggccggctgcctgctgctggagggagatgcccacgtggacagcaccacctatgatggcaccacccccctgcacatcgccgccggccggggcagcacccggctggccgccctgctgaaggccgccggggctgaccccctggtggagaactttgagcccctgtatgacctggatgacagctgggagaatgctggggaggatgaaggagtggtgcccggcaccacccccctggacatggccacctcctggcaggtgtttgacatcctgaatggcaagccctatgagcctgagttcaccagtgatgacctgctggcccagggcgacatgaagcagctggccgaggatgtgaagctgcagctgtacaagctgctggagatcccagaccctgacaagaactgggccaccctggcccagaagctgggcctgggcatcctgaacaatgccttccggctgagccctgcccccagcaagaccctgatggacaactatgaggtgtctgggggcaccgtgcgggagctggtggaggccctgcggcagatgggctacacagaggccatcgaggtgatccaggccgccagcagccctgtgaagaccaccagccaggcccacagcctgcccctgagccctgccagcacccggcagcagattgatgagctgcgggacagcgacagcgtgtgtgacagcggcgtggagaccagcttcaggaagctgtccttcacagagagcctgaccagcggggccagcctgctgaccctgaacaagatgcctcatgactatggccaggagggccccctggagggcaagatctag

SEQ ID NO: 158749 - DNA, 1389 bp, synthetic construct
  misc_feature 1..1389: note = Description of Artificial Sequence: Synthetic coding sequence
  source 1..1389: mol_type = other DNA
atggccaagttcagaagaaggacctgcatcatcctggccctcttcatcctcttcatcttcagcctgatgatgggcctgaagatgctgcggcccaacacagccaccttcggggcccccttcggcctggacctgctgcctgagctgcaccagaggaccatccacctgggcaagaactttgacttccagaagagtgaccgcatcaacagcgagaccaacaccaagaacctgaagtctgtggagatcaccatgaagcccagcaaggccagcgagctgaacctggatgagctgccccccctgaacaactacctgcacgtgttctactacagctggtacggcaacccccagtttgatggcaagtacatccactggaaccaccctgtgctggagcactgggaccccagaattgccaagaactacccccagggccgccacaaccccccagatgacatcggcagcagcttctacccagagctgggcagctacagcagccgggaccccagcgtgattgagacccacatgaggcagatgaggtctgccagcattggagtgctggccctgtcctggtaccccccagatgtgaatgatgaaaatggagagcccacagacaacctggtgcccaccatcctggacaaggcccacaagtacaacctgaaggtgaccttccacatcgagccctacagcaacagagatgaccagaacatgtacaagaatgtgaagtacatcatcgacaagtatggcaaccacccagccttctaccgctacaagaccaagacaggaaatgccctgcccatgttctacgtgtatgacagctacatcaccaagccagagaagtgggccaacctgctgaccaccagcggcagccgcagcatccggaacagcccctatgatggcctcttcatcgccctgctggtggaggagaagcacaagtatgacatcctgcagagcggctttgatggcatctacacctactttgccaccaacggcttcacctacggcagcagccaccagaactgggccagcctgaagctgttctgtgacaagtacaacctgatcttcatccccagcgtgggccctggctacatcgacaccagcatccggccctggaacacccagaacaccaggaaccgcatcaacgggaagtactatgagatcggcctgtctgctgccctgcagacccggcccagcctcatcagcatcaccagcttcaatgagtggcatgagggcacccagatcgagaaggctgtgcccaagaggaccagcaacacagtgtacctggactaccggccccacaagccaggcctgtacctggagctgaccaggaagtggagcgagaagtacagcaaggagcgggccacctacgccctggaccggcagctgcctgtgtcctag

SEQ ID NO: 158750 - DNA, 597 bp, synthetic construct
  misc_feature 1..597: note = Description of Artificial Sequence: Synthetic coding sequence
  source 1..597: mol_type = other DNA
atggccaagttcagaagaaggacctgcatcatcctggccctcttcatcctcttcatcttcagcctgatgatgggcctgaagatgctgcggcccaacacagccaccttcggggcccccttcggcctggacctgctgcctgagctgcaccagaggaccatccacctgggcaagaactttgacttccagaagagtgaccgcatcaacagcgagaccaacaccaagaacctgaagtctgtggagatcaccatgaagcccagcaaggccagcgagctgaacctggatgagctgccccccctgaacaactacctgcacgtgttctactacagctggtacggcaacccccagtttgatggcaagtacatccactggaaccaccctgtgctggagcactgggaccccagaattgccaagaactacccccagggccgccacaaccccccagatgacatcggcagcagcttctacccagagctgggcagctacagcagccgggaccccagcgtgattgagacccacatgaggcagatgaggtctgccagcatcggcaactactgcatctacatctacgtgtgcctgtgcctgtacatctgcatctag

SEQ ID NO: 158751 - DNA, 624 bp, synthetic construct
  misc_feature 1..624: note = Description of Artificial Sequence: Synthetic coding sequence
  source 1..624: mol_type = other DNA
atggccaagttcagaagaaggacctgcatcatcctggccctcttcatcctcttcatcttcagcctgatgatgggcctgaagatgctgcggcccaacacagccaccttcggggcccccttcggcctggacctgctgcctgagctgcaccagaggaccatccacctgggcaagaactttgacttccagaagagtgaccgcatcaacagcgagaccaacaccaagaacctgaagtctgtggagatcaccatgaagcccagcaaggccagcgagctgaacctggatgagctgccccccctgaacaactacctgcacgtgttctactacagctggtacggcaacccccagtttgatggcaagtacatccactggaaccaccctgtgctggagcactgggaccccagaattgccaagaactacccccagggccgccacaaccccccagatgacatcggcagcagcttctacccagagctgggcagctacagcagccgggaccccagcgtgattgagacccacatgaggcagatgaggtctgccagcatcggcaactactgcatctacatctgtgtgtttgtgtctgtgtacatgcacatcaatgacttcctgtgcaacttcaccagctag

SEQ ID NO: 158752 - DNA, 2379 bp, synthetic construct
  misc_feature 1..2379: note = Description of Artificial Sequence: Synthetic coding sequence
  source 1..2379: mol_type = other DNA
atgatcaccgtgaacccagatggcaagatcatggtgcggcgctgcctggtgaccctgcggcccttccggctgtttgtgctgggcatcggcttcttcaccctgtgcttcctgatgaccagcctgggcggccagttcagcgcccggcggctgggggacagccccttcaccatcagaacagaggtgatgggcggccctgagagcagaggagtgctgaggaagatgtctgacctgctggagctgatggtgaagaggatggatgccctggcccggctggagaacagcagcgagctgcaccgggccggcggggacctgcacttccctgctgacaggatgcctcctggagctggcctgatggagcgcatccaggccatcgcccagaatgtgtctgacattgctgtgaaggtggaccagatcctgcggcacagcctgctgctgcacagcaaggtgtctgagggcagaagagaccagtgtgaggcccccagcgaccccaagttcccagactgcagcggcaaggtggagtggatgagggcccgctggaccagtgacccctgctacgccttcttcggcgtggatggaacagagtgcagcttcctgatctacctgtctgaggtggagtggttctgcccccccctgccctggaggaaccagacagctgcccagagggcccccaagcccctgcccaaggtgcaggccgtgttccgcagcaacctgagccacctgctggacctgatgggcagcggcaaggagagcctcatcttcatgaagaagaggaccaagaggctgacagcccagtgggccctggccgcccagaggctggcccagaagctgggcgccacccagagggaccagaagcagatcctggtgcacatcggcttcctgacagaggagagcggagatgtgttcagcccccgggtgctgaagggcggccccctgggggagatggtgcagtgggccgacatcctgacagccctgtatgtgctgggccacggcctgcgggtgacagtgtccctgaaggagctgcagagcaacctgggcgtgcccccaggccggggcagctgccccctgaccatgcccctgccctttgacctgatctacacagactaccacggcctgcagcagatgaagaggcacatgggcctgtccttcaagaagtaccgctgccgcatccgggtcatcgacacctttggaacagagcccgcctacaaccacgaggagtatgccaccctgcacggctaccgcaccaactggggctactggaacctgaaccccaagcagttcatgaccatgttcccccacaccccagacaacagcttcatgggctttgtgtctgaggagctgaatgaaacagagaagaggctcatcaagggcggcaaggccagcaacatggctgtggtgtatggcaaggaggccagcatctggaagctgcagggcaaggagaagttcctgggcatcctgaacaagtacatggagatccacggcaccgtgtactatgagagccagaggcctcctgaggtgcctgcctttgtgaagaaccacggcctgctgccccagcctgagttccagcagctgctgaggaaggccaagctgttcatcggcttcggcttcccctatgagggccctgcccccctggaggccatcgccaacggctgcatcttcctgcagagccgcttcagccccccccacagcagcctgaaccacgagttcttccggggcaagcccaccagccgggaggtgttcagccagcacccctatgcagagaacttcatcggcaagccccacgtgtggacagtggactacaacaacagcgaggagtttgaagctgccatcaaggccatcatgaggacccaggtggacccctacctgccctatgagtacacctgtgagggcatgctggagcgcatccacgcctacatccagcaccaggacttctgccgggccccagaccctgccctgcctgaggcccacgccccccagagcccctttgtgctggccccaaatgccacccacctggagtgggccaggaacaccagcctggcccctggggcctggcccccagcccacgccctgcgggcctggctggccgtgcccggccgggcctgcacagacacctgcctggaccacggcctcatctgtgagcccagcttcttccccttcctgaacagccaggatgccttcctgaagctgcaggtgccctgtgacagcacagaaagtgagatgaaccacctgtacccagcctttgcccagcccggccaggagtgctacctgcagaaggagcccctgctcttcagctgtgccggcagcaacaccaagtaccgccgcctgtgcccctgccgggacttcaggaagggccaggtggccctgtgccagggctgcctgtag

SEQ ID NO: 158753 - DNA, 1338 bp, synthetic construct
  misc_feature 1..1338: note = Description of Artificial Sequence: Synthetic coding sequence
  source 1..1338: mol_type = other DNA
atgctgaagaagcagagcgctggcctggtgctgtggggcgccatcctgtttgtggcctggaatgccctgctgctgctcttcttctggaccaggcctgcccctggccggcccccatctgtgtctgccctggatggagaccctgccagcctgacccgggaggtgatccggctggcccaggatgctgaggtggagctggagcggcagaggggcctgctgcagcagattggagatgccctgagcagccagaggggccgggtgcccacagctgcccccccagcccagccccgggtgcctgtgaccccagccccagctgtgatccccatcctggtgattgcctgtgacaggagcacagtgcggcgctgcctggacaagctgctgcactaccggcccagcgctgagctgttccccatcatcgtgtcccaggactgtggccacgaggagacagcccaggccatcgccagctatggcagcgctgtgacccacatccggcagcctgacctgagcagcattgctgtgcccccagaccacaggaagttccagggctactacaagatcgcccggcactaccgctgggccctgggccaggtgttccggcagttccgcttccctgctgctgtggtggtggaggatgacctggaggtggccccagacttctttgagtacttccgggccacctaccccctgctgaaggctgaccccagcctgtggtgtgtgtctgcctggaatgacaacgggaaggagcagatggtggatgccagcaggcctgagctgctgtacagaacagacttcttccctggcctgggctggctgctgctggccgagctgtgggccgagctggagcccaagtggcccaaggccttctgggatgactggatgagaagacctgagcagaggcagggccgggcctgcatccggcctgagatcagcaggaccatgaccttcggcaggaaaggagtgagccacggccagttctttgaccagcacctgaagttcatcaagctgaaccagcagtttgtgcacttcacccagctggacctgagctacctgcagcgggaggcctatgaccgggacttcctggcccgggtgtatggagccccccagctgcaggtggagaaggtgaggaccaatgacaggaaggagctgggggaggtgcgggtgcagtacacaggccgggacagcttcaaggcctttgccaaggccctgggcgtgatggatgacctgaagtctggagtgccccgggccggctaccggggcatcgtgaccttccagttccggggcagaagagtgcacctggccccacccctgacctgggagggctatgaccccagctggaactag

SEQ ID NO: 158754 - DNA, 1338 bp, synthetic construct; identical to SEQ ID NO: 158753
  misc_feature 1..1338: note = Description of Artificial Sequence: Synthetic coding sequence
  source 1..1338: mol_type = other DNA

SEQ ID NO: 158755 - DNA, 1338 bp, synthetic construct; identical to SEQ ID NO: 158753
  misc_feature 1..1338: note = Description of Artificial Sequence: Synthetic coding sequence
  source 1..1338: mol_type = other DNA

SEQ ID NO: 158756 - DNA, 1338 bp, synthetic construct; identical to SEQ ID NO: 158753
  misc_feature 1..1338: note = Description of Artificial Sequence: Synthetic coding sequence
  source 1..1338: mol_type = other DNA

SEQ ID NO: 158757 - DNA, 1338 bp, synthetic construct; identical to SEQ ID NO: 158753
  misc_feature 1..1338: note = Description of Artificial Sequence: Synthetic coding sequence
  source 1..1338: mol_type = other DNA

SEQ ID NO: 158758 - DNA, 909 bp, synthetic construct
  misc_feature 1..909: note = Description of Artificial Sequence: Synthetic coding sequence
  source 1..909: mol_type = other DNA
atgctgaagaagcagagcgctggcctggtgctgtggggcgccatcctgtttgtggcctggaatgccctgctgctgctcttcttctggaccaggcctgcccctggccggcccccatctgtgtctgccctggatggagaccctgccagcctgaccagggtcttccggcagttccgcttccctgctgctgtggtggtggaggatgacctggaggtggccccagacttctttgagtacttccgggccacctaccccctgctgaaggctgaccccagcctgtggtgtgtgtctgcctggaatgacaatggcaaggagcagatggtggatgccagcaggcctgagctgctgtacagaacagacttcttccctggcctgggctggctgctgctggccgagctgtgggccgagctggagcccaagtggcccaaggccttctgggatgactggatgaggaggcctgagcagaggcagggccgggcctgcatccggcctgagatcagcaggaccatgacctttggaaggaagggcgtgagccacggccagttctttgaccagcacctgaagttcatcaagctgaaccagcagtttgtgcacttcacccagctggacctgagctacctgcagcgggaggcctatgaccgggacttcctggcccgggtgtatggagccccccagctgcaggtggagaaggtgaggaccaatgacaggaaggagctgggggaggtgcgggtgcagtacacaggccgggacagcttcaaggcctttgccaaggccctgggcgtgatggatgacctgaagagcggcgtgcccagggctggctaccggggcatcgtgaccttccagttccggggccggcgggtgcacctggccccacccctgacctgggagggctatgaccccagctggaactag

SEQ ID NO: 158759 - DNA, 312 bp, synthetic construct
  misc_feature 1..312: note = Description of Artificial Sequence: Synthetic coding sequence
  source 1..312: mol_type = other DNA
atgctgaagaagcagagcgctggcctggtgctgtggggcgccatcctgtttgtggcctggaatgccctgctgctgctcttcttctggaccaggcctgcccctggccggcccccatctgtgtctgccctggatggagaccctgccagcctgacccgggaggtgatccggctggcccaggatgctgaggtggagctggagcggcagaggggcctgctgcagcagattggagatgccctgagcagccagaggggccgggtgcccacagctgcccccccagcccagccccgggtgcctgtgaccccagccccctag

SEQ ID NO: 158760 - DNA, 600 bp, synthetic construct
  misc_feature 1..600: note = Description of Artificial Sequence: Synthetic coding sequence
  source 1..600: mol_type = other DNA
atgctgaagaagcagagcgctggcctggtgctgtggggcgccatcctgtttgtggcctggaatgccctgctgctgctcttcttctggaccaggcctgcccctggccggcccccatctgtgtctgccctggatggagaccctgccagcctgacccgggaggtgatccggctggcccaggatgctgaggtggagctggagcggcagaggggcctgctgcagcagattggagatgccctgagcagccagaggggccgggtgcccacagctgcccccccagcccagccccgggtgcctgtgaccccagccccagctgtgatccccatcctggtgattgcctgtgacaggagcacagtgcggcgctgcctggacaagctgctgcactaccggcccagcgctgagctgttccccatcatcgtgtcccaggactgtggccacgaggagacagcccaggccatcgccagctatggcagcgctgtgacccacatccggcagcctgacctgagcagcattgctgtgcccccagaccacaggaagttccagggctactacaagatcgcccggcactaccgctgggccctgggccaggtgttccggcagtag

SEQ ID NO: 158761 - DNA, 336 bp, synthetic construct
  misc_feature 1..336: note = Description of Artificial Sequence: Synthetic coding sequence
  source 1..336: mol_type = other DNA
atgctgaagaagcagagcgctggcctggtgctgtggggcgccatcctgtttgtggcctggaatgccctgctgctgctcttcttctggaccaggcctgcccctggccggcccccatctgtgtctgccctggatggagaccctgccagcctgacccgggaggtgatccggctggcccaggatgctgaggtggagctggagcggcagaggggcctgctgcagcagattggagatgccctgagcagccagaggggccgggtgcccacagctgcccccccagcccagccccgggtgcctgtgaccccagccccagctgtgatccccatcctggtgatctag

SEQ ID NO: 158762 - DNA, 465 bp, synthetic construct
  misc_feature 1..465: note = Description of Artificial Sequence: Synthetic coding sequence
  source 1..465: mol_type = other DNA
atgctgaagaagcagagcgctggcctggtgctgtggggcgccatcctgtttgtggcctggaatgccctgctgctgctcttcttctggaccaggcctgcccctggccggcccccatctgtgtctgccctggatggagaccctgccagcctgacccgggaggtgatccggctggcccaggatgctgaggtggagctggagcggcagaggggcctgctgcagcagattggagatgccctgagcagccagaggggccgggtgcccacagctgcccccccagcccagccccgggtgcctgtgaccccagccccagctgtgatccccatcctggtgattgcctgtgacaggagcacagtgcggcgctgcctggacaagctgctgcactaccggcccagcgctgagctgttccccatcatcgtgtcccaggactgtggccacgaggagacagcccaggccatcgccagctag

SEQ ID NO: 158763 - DNA, 105 bp, synthetic construct
  misc_feature 1..105: note = Description of Artificial Sequence: Synthetic coding sequence
  source 1..105: mol_type = other DNA
atgctgaagaagcagagcgctggcctggtgctgtggggcgccatcctgtttgtggcctggaatgccctgctgctgctcttcttctggaccaggcctgccccctag

SEQ ID NO: 158764 - DNA, 348 bp, synthetic construct
  misc_feature 1..348: note = Description of Artificial Sequence: Synthetic coding sequence
  source 1..348: mol_type = other DNA
atgctgaagaagcagagcgctggcctggtgctgtggggcgccatcctgtttgtggcctggaatgccctgctgctgctcttcttctggaccaggcctgcccctggccggcccccatctgtgtctgccctggatggagaccctgccagcctgacccgggaggtgatccggctggcccaggatgctgaggtggagctggagcggcagaggggcctgctgcagcagattggagatgccctgagcagccagaggggccgggtgcccacagctgcccccccagcccagccccgggtgcctgtgaccccagccccagctgtgatccccatcctggtgattgcctgtgacagatag

SEQ ID NO: 158765 - DNA, 288 bp, synthetic construct
  misc_feature 1..288: note = Description of Artificial Sequence: Synthetic coding sequence
  source 1..288: mol_type = other DNA
atgctgaagaagcagagcgctggcctggtgctgtggggcgccatcctgtttgtggcctggaatgccctgctgctgctcttcttctggaccaggcctgcccctggccggcccccatctgtgtctgccctggatggagaccctgccagcctgacccgggaggtgatccggctggcccaggatgctgaggtggagctggagcggcagaggggcctgctgcagcagattggagatgccctgagcagccagaggggccgggtgcccacagctgcccccccagcccagccctag

SEQ ID NO: 158766 - DNA, 384 bp, synthetic construct
  misc_feature 1..384: note = Description of Artificial Sequence: Synthetic coding sequence
  source 1..384: mol_type = other DNA
atgctgaagaagcagagcgctggcctggtgctgtggggcgccatcctgtttgtggcctggaatgccctgctgctgctcttcttctggaccaggcctgcccctggccggcccccatctgtgtctgccctggatggagaccctgccagcctgacccgggaggtgatccggctggcccaggatgctgaggtggagctggagcggcagaggggcctgctgcagcagattggagatgccctgagcagccagaggggccgggtgcccacagctgcccccccagcccagccccgggtgcctgtgaccccagccccagctgtgatccccatcctggtgattgcctgtgacaggagcacagtgcggcgctgcctggacaagctgctgcactag

SEQ ID NO: 158767 - DNA, 318 bp, synthetic construct
  misc_feature 1..318: note = Description of Artificial Sequence: Synthetic coding sequence
  source 1..318: mol_type = other DNA
atgctgaagaagcagagcgctggcctggtgctgtggggcgccatcctgtttgtggcctggaatgccctgctgctgctcttcttctggaccaggcctgcccctggccggcccccatctgtgtctgccctggatggagaccctgccagcctgacccgggaggtgatccggctggcccaggatgctgaggtggagctggagcggcagaggggcctgctgcagcagattggagatgccctgagcagccagaggggccgggtgcccacagctgcccccccagcccagccccgggtgcctgtgaccccagccccagctgtgtag

SEQ ID NO: 158768 - DNA, 1608 bp, synthetic construct
  misc_feature 1..1608: note = Description of Artificial Sequence: Synthetic coding sequence
  source 1..1608: mol_type = other DNA
atgaggctgagaaatggaacagtggccacagccctggccttcatcaccagcttcctgaccctgtcctggtacaccacctggcagaatggcaaggagaagctgattgcctaccagcgggagttcctggccctgaaggagcggctgagaattgctgagcaccgcatcagccagaggagcagcgagctgaacaccatcgtgcagcagttcaagagggtgggcgctgagaccaacggcagcaaggatgccctgaacaagttcagtgacaacaccctgaagctgctgaaggagctgaccagcaagaagagcctgcaggtgcccagcatctactaccacctgccccacctgctgaagaatgaaggcagcctgcagcctgctgtgcagattggaaatggccgcactggagtgtccatcgtgatgggcatccccaccgtgaagcgggaggtgaagagctacctgattgagaccctgcacagcctgattgacaacctgtacccagaggagaagctggactgtgtgattgtggtgttcatcggggagacagacatcgactatgtgcacggcgtggtggccaacctggagaaggagttcagcaaggagatcagcagcggcctggtggaggtgatcagccccccagagagctactacccagacctgaccaacctgaaggagacctttggagacagcaaggagcgggtgcgctggaggaccaagcagaacctggactactgcttcctgatgatgtatgcccaggagaagggcatctactacatccagctggaggatgacatcatcgtgaagcagaactacttcaacaccatcaagaactttgccctgcagctgagcagcgaggagtggatgatcctggagttcagccagctgggcttcatcggcaagatgttccaggccccagacctgaccctcatcgtggagttcatcttcatgttctacaaggagaagcccatcgactggctgctggaccacatcctgtgggtgaaggtgtgcaaccctgagaaggatgccaagcactgtgaccggcagaaggccaacctgcgcatccgcttccggcccagcctcttccagcacgtgggcctgcacagcagcctgagcggcaagatccagaagctgacagacaaggactacatgaagcccctgctgctgaagatccacgtgaaccccccagctgaggtgtccaccagcctgaaggtgtaccagggccacaccctggagaagacctacatgggagaggacttcttctgggccatcacccccatcgccggggactacatcctcttcaagtttgacaagcctgtgaatgtggagagctacctgttccacagcggcaaccaggagcaccctggggacatcctgctgaacaccaccgtggaggtgctgcccttcaagtctgagggcctggagatcagcaaggagaccaaggacaagaggctggaggatggctacttcagaattggcaagtttgaaaatggagtggccgagggcatggtggaccccagcctgaaccccatcagcgccttccggctgagcgtcatccagaacagcgctgtgtgggccatcctgaatgagatccacatcaagaaggccaccaactag

SEQ ID NO: 158769 - DNA, 1608 bp, synthetic construct; identical to SEQ ID NO: 158768
  misc_feature 1..1608: note = Description of Artificial Sequence: Synthetic coding sequence
  source 1..1608: mol_type = other DNA

SEQ ID NO: 158770 - DNA, 1608 bp, synthetic construct; identical to SEQ ID NO: 158768
  misc_feature 1..1608: note = Description of Artificial Sequence: Synthetic coding sequence
  source 1..1608: mol_type = other DNA

SEQ ID NO: 158771 - DNA, 1272 bp, synthetic construct
  misc_feature 1..1272: note = Description of Artificial Sequence: Synthetic coding sequence
  source 1..1272: mol_type = other DNA
atgaactacagcatcaccgtgtccatcgtgatgggcatccccaccgtgaagcgggaggtgaagagctacctgattgagaccctgcacagcctgattgacaacctgtacccagaggagaagctggactgtgtgattgtggtgttcatcggggagacagacatcgactatgtgcacggcgtggtggccaacctggagaaggagttcagcaaggagatcagcagcggcctggtggaggtgatcagccccccagagagctactacccagacctgaccaacctgaaggagacctttggagacagcaaggagcgggtgcgctggaggaccaagcagaacctggactactgcttcctgatgatgtatgcccaggagaagggcatctactacatccagctggaggatgacatcatcgtgaagcagaactacttcaacaccatcaagaactttgccctgcagctgagcagcgaggagtggatgatcctggagttcagccagctgggcttcatcggcaagatgttccaggccccagacctgaccctcatcgtggagttcatcttcatgttctacaaggagaagcccatcgactggctgctggaccacatcctgtgggtgaaggtgtgcaaccctgagaaggatgccaagcactgtgaccggcagaaggccaacctgcgcatccgcttccggcccagcctcttccagcacgtgggcctgcacagcagcctgagcggcaagatccagaagctgacagacaaggactacatgaagcccctgctgctgaagatccacgtgaaccccccagctgaggtgtccaccagcctgaaggtgtaccagggccacaccctggagaagacctacatgggagaggacttcttctgggccatcacccccatcgccggggactacatcctcttcaagtttgacaagcctgtgaatgtggagagctacctgttccacagcggcaaccaggagcaccctggggacatcctgctgaacaccaccgtggaggtgctgcccttcaagtctgagggcctggagatcagcaaggagaccaaggacaagaggctggaggatggctacttcagaattggcaagtttgaaaatggagtggccgagggcatggtggaccccagcctgaaccccatcagcgccttccggctgagcgtcatccagaacagcgctgtgtgggccatcctgaatgagcagagggtcttcagcggctggtggcagaagagccgggacaaggccgagggcccccaggcccccctgctcttctag

SEQ ID NO: 158772 - DNA, 1647 bp, synthetic construct
  misc_feature 1..1647: note = Description of Artificial Sequence: Synthetic coding sequence
  source 1..1647: mol_type = other DNA
atgaggctgagaaatggcaccttcctgaccctgctgctcttctgcctgtgtgccttcctgagcctgtcctggtacgccgccctgagcggccagaagggagatgtggtggatgtgtaccagcgggagttcctggccctgcgggaccggctgcacgccgctgagcaggagagcctgaagaggagcaaggagctgaacctggtgctggatgagatcaagagagctgtgtctgagcggcaggccctgagagatggagatggcaacagaacctggggccgcctgacagaggacccccggctgaagccctggaatggcagccaccgccacgtgctgcacctgcccaccgtcttccaccacctgccccacctgctggccaaggagagcagcctgcagcctgctgtgcgggtgggccagggccgcactggagtgtctgtggtgatgggcatccccagcgtgcggcgggaggtgcacagctacctgacagacaccctgcacagcctcatcagcgagctgagcccccaggagaaggaggacagcgtcatcgtggtgctgattgctgagacagacagccagtacaccagcgctgtgacagagaacatcaaggccctcttccccacagagatccacagcggcctgctggaggtgatcagccccagcccccacttctacccagacttcagccggctgcgggagagctttggagaccccaaggagcgggtgcgctggaggaccaagcagaacctggactactgcttcctgatgatgtatgcccagagcaagggcatctactacgtgcagctggaggatgacatcgtggccaagcccaactacctgagcaccatgaagaactttgccctgcagcagcccagcgaggactggatgatcctggagttcagccagctgggcttcatcggcaagatgttcaagagcctggacctgagcctgattgtggagttcatcctgatgttctacagagacaagcccatcgactggctgctggaccacatcctgtgggtgaaggtgtgcaaccctgagaaggatgccaagcactgtgaccggcagaaggccaacctgcgcatccgcttcaagcccagcctcttccagcacgtgggcacccacagcagcctggccggcaagatccagaagctgaaggacaaggactttgggaagcaggccctgaggaaggagcacgtgaaccccccagctgaggtgtccaccagcctgaagacctaccagcacttcaccctggagaaggcctacctgcgggaggacttcttctgggccttcaccccagctgctggggacttcatccgcttccgcttcttccagcccctgcggctggagcgcttcttcttccgcagcggcaacatcgagcaccctgaggacaagctgttcaacacctctgtggaggtgctgccctttgacaacccccagagcgacaaggaggccctgcaggagggccgcacagccaccctgcgctaccccaggagcccagatggctacctgcagatcggcagcttctacaagggcgtggccgagggggaggtggaccctgccttcggccccctggaggccctgcggctgagcatccagacagacagccctgtgtgggtgatcctgtctgagatcttcctgaagaaggctgactag

SEQ ID NO: 158773 - DNA, 1692 bp, synthetic construct
  misc_feature 1..1692: note = Description of Artificial Sequence: Synthetic coding sequence
  source 1..1692: mol_type = other DNA
atgagccgggtggccggcaccaggacagatgtgaatgagctgctgcagcgctggaccccccgctgtgtgcgctggcacactggaggagccaggagagtggccctggaccggcccctggtgacagcctgcctgcccccagctggagatgtggtggatgtgtaccagcgggagttcctggccctgcgggaccggctgcatgctgctgagcaggagagcctgaagaggagcaaggagctgaacctggtgctggatgagatcaagagagctgtgtctgagcggcaggccctgagagatggagatggcaacagaacctggggccgcctgacagaggacccccggctgaagccctggaatggcagccacagacatgtgctgcacctgcccaccgtcttccaccacctgccccacctgctggccaaggagagcagcctgcagcctgctgtgcgggtgggccagggccgcactggagtgtctgtggtgatgggcatccccagcgtgagaagagaggtgcacagctacctgacagacaccctgcacagcctcatcagcgagctgagcccccaggagaaggaggacagcgtgattgtggtgctgattgctgagacagacagccagtacaccagcgctgtgacagagaacatcaaggccctcttccccacagagatccacagcggcctgctggaggtgatcagccccagcccccacttctacccagacttcagccggctgcgggagagctttggagaccccaaggagcgggtgcgctggaggaccaagcagaacctggactactgcttcctgatgatgtatgcccagagcaagggcatctactacgtgcagctggaggatgacatcgtggccaagcccaactacctgagcaccatgaagaactttgccctgcagcagcccagcgaggactggatgatcctggagttcagccagctgggcttcatcggcaagatgttcaagagcctggacctgagcctcatcgtggagttcatcctgatgttctacagagacaagcccatcgactggctgctggaccacatcctgtgggtgaaggtgtgcaaccctgagaaggatgccaagcactgtgaccggcagaaggccaacctgcgcatccgcttcaagcccagcctcttccagcacgtgggcacccacagcagcctggccggcaagatccagaagctgaaggacaaggactttgggaagcaggccctgaggaaggagcacgtgaaccccccagctgaggtgtccaccagcctgaagacctaccagcacttcaccctggagaaggcctacctgcgggaggacttcttctgggccttcaccccagctgctggggacttcatccgcttccgcttcttccagcccctgcggctggagcgcttcttcttccgcagcggcaacatcgagcaccctgaggacaagctgttcaacacctctgtggaggtgctgccctttgacaacccccagagcgacaaggaggccctgcaggagggccgcacagccaccctgcgctaccccaggagcccagatggctacctgcagatcggcagcttctacaagggcgtggccgagggggaggtggaccctgccttcggccccctggaggccctgcggctgagcatccagacagacagccctgtgtgggtgatcctgtctgagatcttcctgaagaaggctgactag

SEQ ID NO: 158774 - DNA, 1344 bp, synthetic construct
  misc_feature 1..1344: note = Description of Artificial Sequence: Synthetic coding sequence
  source 1..1344: mol_type = other DNA
atgaggttccgcatctacaagaggaaggtgctgatcctgaccctggtggtggccgcctgtggctttgtgctgtggagcagcaatggccggcagaggaagaatgaggccctggccccacccctgctggatgctgagcccgcccggggggccggcggccggggcggggaccaccccagcgtggccgtgggcatcagaagagtgtccaatgtgtctgctgccagcctggtgcctgctgtgccccagcctgaggccgacaacctgaccctgcgctaccgcagcctggtgtaccagctgaactttgaccagaccctgagaaatgtggacaaggccggcacctgggccccccgggagctggtgctggtggtgcaggtgcacaacagacctgagtacctgcggctgctgctggacagcctgaggaaggcccagggcatcgacaacgtgctggtgatcttcagccatgacttctggagcacagagatcaaccagctgattgctggggtgaacttctgccctgtgctgcaggtgttcttccccttcagcatccagctgtacccaaatgagttccctggcagtgacccccgggactgcccccgggacctgcccaagaatgctgccctgaagctgggctgcatcaatgctgagtacccagacagctttggccactaccgggaggccaagttcagccagaccaagcaccactggtggtggaagctgcactttgtgtgggagcgggtgaagatcctgcgggactatgccggcctcatcctcttcctggaggaggaccactacctggccccagacttctaccacgtgttcaagaagatgtggaagctgaagcagcaggagtgcccagaatgtgatgtgctgagcctgggcacctacagcgccagccgctccttctacggcatggctgacaaggtggatgtgaagacctggaagagcacagagcacaacatgggcctggccctgaccagaaatgcctaccagaagctgattgaatgtacagacaccttctgcacctatgatgactacaactgggactggaccctgcagtacctgactgtgtcctgcctgcccaagttctggaaggtgctggtgccccagatcccccgcatcttccacgccggggactgtggcatgcaccacaagaagacctgccggcccagcacccagagcgcccagatcgagagcctgctgaacaacaacaagcagtacatgtttcctgagaccctgaccatcagcgagaagttcaccgtggtggccatcagcccccccaggaagaatggaggctggggagacatccgggaccacgagctgtgcaagagctaccgccgcctgcagtag

SEQ ID NO: 158775 - DNA, 1362 bp, synthetic construct
  misc_feature 1..1362: note = Description of Artificial Sequence: Synthetic coding sequence
  source 1..1362: mol_type = other DNA
atggagaggacagagaccatgaggttccgcatctacaagaggaaggtgctgatcctgaccctggtggtggccgcctgtggctttgtgctgtggagcagcaatggccggcagaggaagaatgaggccctggccccacccctgctggatgctgagcccgcccggggggccggcggccggggcggggaccaccccagcgtggccgtgggcatcagaagagtgtccaatgtgtctgctgccagcctggtgcctgctgtgccccagcctgaggccgacaacctgaccctgcgctaccgcagcctggtgtaccagctgaactttgaccagaccctgagaaatgtggacaaggccggcacctgggccccccgggagctggtgctggtggtgcaggtgcacaacagacctgagtacctgcggctgctgctggacagcctgaggaaggcccagggcatcgacaacgtgctggtgatcttcagccatgacttctggagcacagagatcaaccagctgattgctggggtgaacttctgccctgtgctgcaggtgttcttccccttcagcatccagctgtacccaaatgagttccctggcagtgacccccgggactgcccccgggacctgcccaagaatgctgccctgaagctgggctgcatcaatgctgagtacccagacagctttggccactaccgggaggccaagttcagccagaccaagcaccactggtggtggaagctgcactttgtgtgggagcgggtgaagatcctgcgggactatgccggcctcatcctcttcctggaggaggaccactacctggccccagacttctaccacgtgttcaagaagatgtggaagctgaagcagcaggagtgcccagaatgtgatgtgctgagcctgggcacctacagcgccagccgctccttctacggcatggctgacaaggtggatgtgaagacctggaagagcacagagcacaacatgggcctggccctgaccagaaatgcctaccagaagctgattgaatgtacagacaccttctgcacctatgatgactacaactgggactggaccctgcagtacctgactgtgtcctgcctgcccaagttctggaaggtgctggtgccccagatcccccgcatcttccacgccggggactgtggcatgcaccacaagaagacctgccggcccagcacccagagcgcccagatcgagagcctgctgaacaacaacaagcagtacatgtttcctgagaccctgaccatcagcgagaagttcaccgtggtggccatcagcccccccaggaagaatggaggctggggagacatccgggaccacgagctgtgcaagagctaccgccgcctgcagtag

SEQ ID NO: 158776 - DNA, 2373 bp, synthetic construct
  misc_feature 1..2373: note = Description of Artificial Sequence: Synthetic coding sequence
  source 1..2373: mol_type = other DNA
atgatcaccgtgaacccagatggcaagatcatggtgcggcgctgcctggtgaccctgcggcccttccggctgtttgtgctgggcatcggcttcttcaccctgtgcttcctgatgaccagcctgggcggccagttcagcgcccggcggctgggggacagccccttcaccatcagaacagaggtgatgggcggccctgagagcagaggagtgctgaggaagatgtctgacctgctggagctgatggtgaagaggatggatgccctggcccggctggagaacagcagcgagctgcaccgggccggcggggacctgcacttccctgctgacaggatgcctcctggagctggcctgatggagcgcatccaggccatcgcccagaatgtgtctgacattgctgtgaaggtggaccagatcctgcggcacagcctgctgctgcacagcaaggtgtctgagggcagaagagaccagtgtgaggcccccagcgaccccaagttcccagactgcagcggcaaggtggagtggatgagggcccgctggaccagtgacccctgctacgccttcttcggcgtggatggaacagagtgcagcttcctgatctacctgtctgaggtggagtggttctgcccccccctgccctggaggaaccagacagctgcccagagggcccccaagcccctgcccaaggtgcaggccgtgttccgcagcaacctgagccacctgctggacctgatgggcagcggcaaggagagcctcatcttcatgaagaagaggaccaagaggctgacagcccagtgggccctggccgcccagaggctggcccagaagctgggcgccacccagagggaccagaagcagatcctggtgcacatcggcttcctgacagaggagagcggagatgtgttcagcccccgggtgctgaagggcggccccctgggggagatggtgcagtgggccgacatcctgacagccctgtatgtgctgggccacggcctgcgggtgacagtgtccctgaaggagctgcagagcaacctgggcgtgcccccaggccggggcagctgccccctgaccatgcccctgccctttgacctgatctacacagactaccacggcctgcagcagatgaagaggcacatgggcctgtccttcaagaagtaccgctgccgcatccgggtcatcgacacctttggaacagagcccgcctacaaccacgaggagtatgccaccctgcacggctaccgcaccaactggggctactggaacctgaaccccaagcagttcatgaccatgttcccccacaccccagacaacagcttcatgggctttgtgtctgaggagctgaatgaaacagagaagaggctcatcaagggcggcaaggccagcaacatggctgtggtgtatggcaaggaggccagcatctggaagggcaaggagaagttcctgggcatcctgaacaagtacatggagatccacggcaccgtgtactatgagagccagaggcctcctgaggtgcctgcctttgtgaagaaccacggcctgctgccccagcctgagttccagcagctgctgaggaaggccaagctgttcatcggcttcggcttcccctatgagggccctgcccccctggaggccatcgccaacggctgcatcttcctgcagagccgcttcagccccccccacagcagcctgaaccacgagttcttccggggcaagcccaccagccgggaggtgttcagccagcacccctatgcagagaacttcatcggcaagccccacgtgtggacagtggactacaacaacagcgaggagtttgaagctgccatcaaggccatcatgaggacccaggtggacccctacctgccctatgagtacacctgtgagggcatgctggagcgcatccacgcctacatccagcaccaggacttctgccgggccccagaccctgccctgcctgaggcccacgccccccagagcccctttgtgctggccccaaatgccacccacctggagtgggccaggaacaccagcctggcccctggggcctggcccccagcccacgccctgcgggcctggctggccgtgcccggccgggcctgcacagacacctgcctggaccacggcctcatctgtgagcccagcttcttccccttcctgaacagccaggatgccttcctgaagctgcaggtgccctgtgacagcacagaaagtgagatgaaccacctgtacccagcctttgcccagcccggccaggagtgctacctgcagaaggagcccctgctcttcagctgtgccggcagcaacaccaagtaccgccgcctgtgcccctgccgggacttcaggaagggccaggtggccctgtgccagggctgcctgtag

SEQ ID NO: 158777 - DNA, 1185 bp, synthetic construct
  misc_feature 1..1185: note = Description of Artificial Sequence: Synthetic coding sequence
  source 1..1185: mol_type = other DNA
atgatcaccgtgaacccagatggcaagatcatggtgcggcgctgcctggtgaccctgcggcccttccggctgtttgtgctgggcatcggcttcttcaccctgtgcttcctgatgaccagcctgggcggccagttcagcgcccggcggctgggggacagccccttcaccatcagaacagaggtgatgggcggccctgagagcagaggagtgctgaggaagatgtctgacctgctggagctgatggtgaagaggatggatgccctggcccggctggagaacagcagcgagctgcaccgggccggcggggacctgcacttccctgctgacaggatgcctcctggagctggcctgatggagcgcatccaggccatcgcccagaatgtgtctgacattgctgtgaaggtggaccagatcctgcggcacagcctgctgctgcacagcaaggtgtctgagggcagaagagaccagtgtgaggcccccagcgaccccaagttcccagactgcagcggcaaggtggagtggatgagggcccgctggaccagtgacccctgctacgccttcttcggcgtggatggaacagagtgcagcttcctgatctacctgtctgaggtggagtggttctgcccccccctgccctggaggaaccagacagctgcccagagggcccccaagcccctgcccaaggtgcaggccgtgttccgcagcaacctgagccacctgctggacctgatgggcagcggcaaggagagcctcatcttcatgaagaagaggaccaagaggctgacagcccagtgggccctggccgcccagaggctggcccagaagctgggcgccacccagagggaccagaagcagatcctggtgcacatcggcttcctgacagaggagagcggagatgtgttcagcccccgggtgctgaagggcggccccctgggggagatggtgcagtgggccgacatcctgacagccctgtatgtgctgggccacggcctgcgggtgacagtgtccctgaaggagctgcagaggcagaggcggctgcggagcagccaggagcaggcccgctgtggggtgatgggcgcctgtgagaagatgctgctggagggagatgtggccagcaacaccctgctgattgagaagcccagcaagaaggagacagagaagtgccccaagaacctggtgacctag

SEQ ID NO: 158778 - DNA, 2406 bp, synthetic construct
  misc_feature 1..2406: note = Description of Artificial Sequence: Synthetic coding sequence
  source 1..2406: mol_type = other DNA
atgcacagctttgtgaagcacctgtgcagccgctacgtggtggagcggcagggcaccatggccctgcctgccctgctgacccggctgctgcccctgcggcggctgtttgtgctgggcatcggcttcttcaccctgtgcttcctgatgaccagcctgggcggccagttcagcgcccggcggctgggggacagccccttcaccatcagaacagaggtgatgggcggccctgagagccggggcgtgctgaggaagatgtctgacctgctggagctgatggtgaagaggatggatgccctggcccggctggagaacagcagcgagctgcacagagctggaggagacctgcacttccctgctgacaggatgcctcctggggccggcctgatggagcgcatccaggccatcgcccagaatgtgtctgacattgctgtgaaggtggaccagatcctgcggcacagcctgctgctgcacagcaaggtgtctgagggccggcgggaccagtgtgaggcccccagcgaccccaagttcccagactgcagcggcaaggtggagtggatgagggcccgctggaccagtgacccctgctacgccttctttggagtggatggaacagaatgttccttcctgatctacctgtctgaggtggagtggttctgcccccccctgccctggaggaaccagacagctgcccagagggcccccaagcccctgcccaaggtgcaggccgtgttccgcagcaacctgagccacctgctggacctgatgggcagcggcaaggagagcctcatcttcatgaagaagaggaccaagaggctgacagcccagtgggccctggccgcccagaggctggcccagaagctgggcgccacccagagggaccagaagcagatcctggtgcacatcggcttcctgacagaggagagcggagatgtgttcagcccccgggtgctgaagggcggccccctgggggagatggtgcagtgggccgacatcctgacagccctgtatgtgctgggccacggcctgcgggtgacagtgtccctgaaggagctgcagagcaacctgggcgtgcccccaggccggggcagctgccccctgaccatgcccctgccctttgacctgatctacacagactaccacggcctgcagcagatgaagaggcacatgggcctgtccttcaagaagtaccgctgccgcatccgggtgattgacaccttcggcacagagcccgcctacaaccacgaggagtatgccaccctgcacggctaccgcaccaactggggctactggaacctgaaccccaagcagttcatgaccatgttcccccacaccccagacaacagcttcatgggctttgtgtctgaggagctgaatgaaacagagaagaggctcatcaagggcggcaaggccagcaacatggctgtggtgtatggcaaggaggccagcatctggaagggcaaggagaagttcctgggcatcctgaacaagtacatggagatccatggaacagtgtactatgagagccagaggcctcctgaggtgcctgcctttgtgaagaaccacggcctgctgccccagcctgagttccagcagctgctgaggaaggccaagctgttcatcggcttcggcttcccctatgagggccctgcccccctggaggccatcgccaacggctgcatcttcctgcagagccgcttcagccccccccacagcagcctgaaccacgagttcttccggggcaagcccaccagccgggaggtgttcagccagcacccctatgcagagaacttcatcggcaagccccacgtgtggacagtggactacaacaacagcgaggagtttgaggccgccatcaaggccatcatgaggacccaggtggacccctacctgccctatgagtacacctgtgagggcatgctggagcgcatccacgcctacatccagcaccaggacttctgccgggccccagaccctgccctgcctgaggcccacgccccccagagcccctttgtgctggccccaaatgccacccacctggagtgggccaggaacaccagcctggcccctggggcctggcccccagcccacgccctgcgggcctggctggccgtgcccggccgggcctgcacagacacctgcctggaccacggcctcatctgtgagcccagcttcttccccttcctgaacagccaggatgccttcctgaagctgcaggtgccctgtgacagcacagagagcgagatgaaccacctgtacccagcctttgcccagcccggccaggagtgctacctgcagaaggagcccctgctcttcagctgtgccggcagcaacaccaagtacagaaggctgtgcccctgccgggacttcaggaagggccaggtggccctgtgccagggctgcctgtag

SEQ ID NO: 158779 - DNA, 1602 bp, synthetic construct
  misc_feature 1..1602: note = Description of Artificial Sequence: Synthetic coding sequence
  source 1..1602: mol_type = other DNA
atgaagatgaggcgctacaagctgttcctgatgttctgcatggccggcctgtgcctgatctccttcctgcacttcttcaagaccctgtcctatgtgaccttcccccgggagctggccagcctgagccccaacctggtgagcagcttcttctggaacaatgcccctgtgaccccccaggccagccctgagcccggcggccctgacctgctgcggacccccctgtacagccacagccccctgctgcagcccctgccccccagcaaggctgctgaggagctgcaccgggtggacctggtgctgcctgaggacaccacagagtactttgtgaggaccaaggccggcggcgtgtgcttcaagccaggcaccaagatgctggagcggcccccacctggccggcctgaggagaagccagagggcgccaacggcagcagcgcccggcggcccccacgctacctgctgagcgcccgggagaggactggaggccgcggggcccggaggaagtgggtggagtgtgtgtgcctgcccggctggcacggccccagctgtggggtgcccaccgtggtgcagtacagcaacctgcccaccaaggagcggctggtgccccgggaggtgccccggcgggtcatcaatgccatcaacgtgaaccacgagtttgacctgctggatgtgcgcttccacgagctgggagatgtggtggatgcctttgtggtgtgtgagagcaacttcaccgcctatggagagccccggcccctgaagttccgggagatgctgaccaacggcacctttgagtacatccgccacaaggtgctgtatgtgttcctggaccacttccccccaggcggccggcaggacggctggattgctgatgactacctgcggaccttcctgacccaggatggagtgtcccggctgaggaacctgcggccagatgatgtgttcatcattgatgatgctgatgagatcccagccagagatggagtgctcttcctgaagctgtatgatggctggacagagccctttgccttccacatgaggaagagcctgtatggcttcttctggaagcagcccggcaccctggaggtggtgtctggctgcaccgtggacatgctgcaggccgtgtatggcctggatggcatccggctgcggcggcggcagtactacaccatgcccaacttccggcagtatgagaacagaacaggccacatcctggtgcagtggagcctgggcagccccctgcactttgctggctggcactgctcctggtgcttcaccccagagggcatctacttcaagctggtgtctgcccagaatggagacttcccccgctggggagactatgaggacaagagggacctgaactacatccggggcctcatcagaactggaggctggtttgatggcacccagcaggagtacccacctgctgaccccagcgagcacatgtatgcccccaagtacctgctgaagaactatgaccgcttccactacctgctggacaacccctaccaggagcccaggagcacagctgctgggggctggaggcaccggggccctgagggccggcccccagcccggggcaagctggatgaagctgaggtgtag

SEQ ID NO: 158780 - DNA, 327 bp, synthetic construct
  misc_feature 1..327: note = Description of Artificial Sequence: Synthetic coding sequence
  source 1..327: mol_type = other DNA
atggagagctgcagctgccaccctggcagcggcgtgcagtggagggaccacggcagcctgcagctgcccccacctggcttcaagatgaagatgaggcgctacaagctgttcctgatgttctgcatggccggcctgtgcctgatctccttcctgcacttcttcaagaccctgtcctatgtgaccttcccccgggagctggccagcctgagccccaacctggtgagcagcttcttctggaacaatgcccctgtgaccccccaggccagccctgagcccggcggccctgacctgctgcggacccccctgtacagccacagccccctgtag

SEQ ID NO: 158781 - DNA, 486 bp, synthetic construct
  misc_feature 1..486: note = Description of Artificial Sequence: Synthetic coding sequence
  source 1..486: mol_type = other DNA
atgaagatgaggcgctacaagctgttcctgatgttctgcatggccggcctgtgcctgatctccttcctgcacttcttcaagaccctgtcctatgtgaccttcccccgggagctggccagcctgagccccaacctggtgagcagcttcttctggaacaatgcccctgtgaccccccaggccagccctgagcccggcggccctgacctgctgcggacccccctgtacagccacagccccctgctgcagcccctgccccccagcaaggctgctgaggagctgcaccgggtggacctggtgctgcctgaggacaccacagagtactttgtgaggaccaaggccggcggcgtgtgcttcaagccaggcaccaagatgctggagcggcccccacctggccggcctgaggagaagccagagggcgccaacggcagcagcgcccggcggcccccacgctacctgctgagcgcccgggagaggactggaggatag

SEQ ID NO: 158782 - DNA, 1044 bp, synthetic construct
  misc_feature 1..1044: note = Description of Artificial Sequence: Synthetic coding sequence
  source 1..1044: mol_type = other DNA
atggtgagcagccagaagctggagaagcccatcgagatgggcagcagcgagcccctgcccatcgcagatggagacagaagaaggaagaagaagaggcggggccgggccacagacagcctgcccgggaagtttgaggacatgtacaagctgaccagcgagctgctgggggagggcgcctatgccaaggtgcagggcgctgtgtccctgcagaatggcaaggagtatgctgtgaagatcatcgagaagcaggccggccacagccgcagcagggtcttccgggaggtggagaccctgtaccagtgccagggcaacaagaacatcctggagctgattgagttctttgaagatgacacccgcttctacctggtgtttgagaagctgcagggcggcagcatcctggcccacatccagaagcagaagcacttcaatgaaagagaggccagccgggtggtgagagatgtggccgccgccctggacttcctgcacaccaagggcatcgcccaccgggacctgaagccagagaacatcctgtgtgagagccctgagaaggtgtcccctgtgaagatctgtgactttgacctgggcagcggcatgaagctgaacaacagctgcacccccatcaccaccccagagctgaccaccccctgtggcagcgctgagtacatggcccctgaggtggtggaggtgttcacagaccaggccaccttctatgacaagagatgtgacctgtggagcctgggcgtggtgctgtacatcatgctgagcggctaccccccatttgtgggccactgtggggctgactgtggctgggacagaggagaggtgtgccgggtgtgccagaacaagctgtttgagagcatccaggagggcaagtatgagttcccagacaaggactgggcccacatcagcagcgaggccaaggacctgatcagcaagctgctggtgagagatgccaagcagaggctgtctgctgcccaggtgctgcagcacccctgggtgcagggcgagcagcagcacaacggcccagatgccctgcggagctag

SEQ ID NO: 158783 - DNA, 990 bp, synthetic construct
  misc_feature 1..990: note = Description of Artificial Sequence: Synthetic coding sequence
  source 1..990: mol_type = other DNA
atggccaagtccatgcccagcaagagcagcaggaacaagcagggcaccgtgggcgtgggctgctttgagcgctggaggcgctgcatctctgtgcgggagaccagcagcatcctggcccacatccagaagcagaagcacttcaatgaaagagaggccagccgggtggtgagagatgtggccgccgccctggacttcctgcacaccaagggcatcgcccaccgggacctgaagccagagaacatcctgtgtgagagccctgagaaggtgtcccctgtgaagatctgtgactttgacctgggcagcggcatgaagctgaacaacagctgcacccccatcaccaccccagagctgaccaccccctgtggcagcgctgagtacatggcccctgaggtggtggaggtgttcacagaccaggccaccttctatgacaagagatgtgacctgtggagcctgggcgtggtgctgtacatcatgctgagcggctaccccccatttgtgggccactgtggggctgactgtggctgggacagaggagaggtgtgccgggtgtgccagaacaagctgtttgagagcatccaggagggcaagtatgagttcccagacaaggactgggcccacatcagcagcgaggccaaggacctgatcagcaagctgctggtgagagatgccaagcagaggctgtctgctgcccaggtgctgcagcacccctgggtgcagggccaggcccctgagaagggcctgcccaccccccaggtgctgcagaggaacagcagcaccatggacctgaccctgtttgctgctgaggccatcgccctgaaccggcagctgagccagcatgaagaaaatgagctggccgaggagcctgaggccctggctgatggcctgtgcagcatgaagctgagccccccctgcaagagccggctggccaggagaagagccctggcccaggccggcagaggagaagatagaagccccccaacagccctgtag

SEQ ID NO: 158784 - DNA, 1275 bp, synthetic construct
  misc_feature 1..1275: note = Description of Artificial Sequence: Synthetic coding sequence
  source 1..1275: mol_type = other DNA
atggtgagcagccagaagctggagaagcccatcgagatgggcagcagcgagcccctgcccatcgcagatggagacagaagaaggaagaagaagaggcggggccgggccacagacagcctgcccgggaagtttgaggacatgtacaagctgaccagcgagctgctgggggagggcgcctatgccaaggtgcagggcgctgtgtccctgcagaatggcaaggagtatgctgtgaagatcatcgagaagcaggccggccacagccgcagcagggtcttccgggaggtggagaccctgtaccagtgccagggcaacaagaacatcctggagctgattgagttctttgaagatgacacccgcttctacctggtgtttgagaagctgcagggcggcagcatcctggcccacatccagaagcagaagcacttcaatgaaagagaggccagccgggtggtgagagatgtggccgccgccctggacttcctgcacaccaagggcatcgcccaccgggacctgaagccagagaacatcctgtgtgagagccctgagaaggtgtcccctgtgaagatctgtgactttgacctgggcagcggcatgaagctgaacaacagctgcacccccatcaccaccccagagctgaccaccccctgtggcagcgctgagtacatggcccctgaggtggtggaggtgttcacagaccaggccaccttctatgacaagagatgtgacctgtggagcctgggcgtggtgctgtacatcatgctgagcggctaccccccatttgtgggccactgtggggctgactgtggctgggacagaggagaggtgtgccgggtgtgccagaacaagctgtttgagagcatccaggagggcaagtatgagttcccagacaaggactgggcccacatcagcagcgaggccaaggacctgatcagcaagctgctggtgagagatgccaagcagaggctgtctgctgcccaggtgctgcagcacccctgggtgcagggccaggcccctgagaagggcctgcccaccccccaggtgctgcagaggaacagcagcaccatggacctgaccctgtttgctgctgaggccatcgccctgaaccggcagctgagccagcacgaggagaatgagctggccgaggagcctgaggccctggctgatggcctgtgcagcatgaagctgagccccccctgcaagagccggctggcccggcggcgggccctggcccaggccggccgcggggaggacaggagccccccaacagccctgtag

SEQ ID NO: 158785 - DNA, 1398 bp, synthetic construct
  misc_feature 1..1398: note = Description of Artificial Sequence: Synthetic coding sequence
  source 1..1398: mol_type = other DNA
atggtgagcagccagaagctggagaagcccatcgagatgggcagcagcgagcccctgcccatcgcagatggagacagaagaaggaagaagaagaggcggggccgggccacagacagcctgcccgggaagtttgaggacatgtacaagctgaccagcgagctgctgggggagggcgcctatgccaaggtgcagggcgctgtgtccctgcagaatggcaaggagtatgctgtgaagatcatcgagaagcaggccggccacagccgcagcagggtcttccgggaggtggagaccctgtaccagtgccagggcaacaagaacatcctggagctgattgagttctttgaagatgacacccgcttctacctggtgtttgagaagctgcagggcggcagcatcctggcccacatccagaagcagaagcacttcaatgaaagagaggccagccgggtggtgagagatgtggccgccgccctggacttcctgcacaccaaggacaaggtgtccctgtgccacctgggctggagcgccatggcccccagcggcctgacagctgcccccaccagcctgggcagcagtgacccccccaccagcgccagccaggtggccggcaccactggaattgcccaccgggacctgaagccagagaacatcctgtgtgagagccctgagaaggtgtcccctgtgaagatctgtgactttgacctgggcagcggcatgaagctgaacaacagctgcacccccatcaccaccccagagctgaccaccccctgtggcagcgctgagtacatggcccctgaggtggtggaggtgttcacagaccaggccaccttctatgacaagagatgtgacctgtggagcctgggcgtggtgctgtacatcatgctgagcggctaccccccatttgtgggccactgtggggctgactgtggctgggacagaggagaggtgtgccgggtgtgccagaacaagctgtttgagagcatccaggagggcaagtatgagttcccagacaaggactgggcccacatcagcagcgaggccaaggacctgatcagcaagctgctggtgagagatgccaagcagaggctgtctgctgcccaggtgctgcagcacccctgggtgcagggccaggcccctgagaagggcctgcccaccccccaggtgctgcagaggaacagcagcaccatggacctgaccctgtttgctgctgaggccatcgccctgaaccggcagctgagccagcatgaagaaaatgagctggccgaggagcctgaggccctggctgatggcctgtgcagcatgaagctgagccccccctgcaagagccggctggccaggagaagagccctggcccaggccggcagaggagaagatagaagccccccaacagccctgtag

SEQ ID NO: 158786 - DNA, 1044 bp, synthetic construct; identical to SEQ ID NO: 158782
  misc_feature 1..1044: note = Description of Artificial Sequence: Synthetic coding sequence
  source 1..1044: mol_type = other DNA

SEQ ID NO: 158787 - DNA, 537 bp, synthetic construct
  misc_feature 1..537: note = Description of Artificial Sequence: Synthetic coding sequence
  source 1..537: mol_type = other DNA
atggtgagcagccagaagctggagaagcccatcgagatgggcagcagcgagcccctgcccatcgcagatggagacagaagaaggaagaagaagaggcggggccgggccacagacagcctgcccgggaagtttgaggacatgtacaagctgaccagcgagctgctgggggagggcgcctatgccaaggtgcagggcgctgtgtccctgcagaatggcaaggagtatgctgtgaagatcatcgagaagcaggccggccacagccgcagcagggtcttccgggaggtggagaccctgtaccagtgccagggcaacaagaacatcctggagctgattgagttctttgaagatgacacccgcttctacctggtgtttgagaagctgcagggcggcagcatcctggcccacatccagaagcagaagcacttcaatgaaagagaggccagccgggtggtgagagatgtggccgccgccctggacttcctgcacaccaagggcatcgcccaccgggacctgaagccagagaacatcctgtgctag

SEQ ID NO: 158788 - DNA, 306 bp, synthetic construct
  misc_feature 1..306: note = Description of Artificial Sequence: Synthetic coding sequence
  source 1..306: mol_type = other DNA
atggtgagcagccagaagctggagaagcccatcgagatgggcagcagcgagcccctgcccatcgcagatggagacagaagaaggaagaagaagaggcggggccgggccacagacagcctgcccgggaagtttgaggacatgtacaagctgaccagcgagctgctgggggagggcgcctatgccaaggtgcagggcgctgtgtccctgcagaatggcaaggagtatgctgtgaagatcatcgagaagcaggccggccacagccgcagcagggtcttccgggaggtggagaccctgtaccagtgctag

SEQ ID NO: 158789 - DNA, 303 bp, synthetic construct
  misc_feature 1..303: note = Description of Artificial Sequence: Synthetic coding sequence
  source 1..303: mol_type = other DNA
atggtgagcagccagaagctggagaagcccatcgagatgggcagcagcgagcccctgcccatcgcagatggagacagaagaaggaagaagaagaggcggggccgggccacagacagcctgcccgggaagtttgaggacatgtacaagctgaccagcgagctgctgggggagggcgcctatgccaaggtgcagggcgctgtgtccctgcagaatggcaaggagtatgctgtgaagatcatcgagaagcaggccggccacagccgcagcagggtcttccgggaggtggagaccctgtaccagtag

SEQ ID NO: 158790 - DNA, 402 bp, synthetic construct
  misc_feature 1..402: note = Description of Artificial Sequence: Synthetic coding sequence
  source 1..402: mol_type = other DNA
atggtgagcagccagaagctggagaagcccatcgagatgggcagcagcgagcccctgcccatcgcagatggagacagaagaaggaagaagaagaggcggggccgggccacagacagcctgcccgggaagtttgaggacatgtacaagctgaccagcgagctgctgggggagggcgcctatgccaaggtgcagggcgctgtgtccctgcagaatggcaaggagtatgctgtgaagatcatcgagaagcaggccggccacagccgcagcagggtcttccgggaggtggagaccctgtaccagtgccagggcaacaagaacatcctggagctgattgagttctttgaagatgacacccgcttctacctggtgtttgagaagctgcagggcggcacctacagatag

SEQ ID NO: 158791 - DNA, 1398 bp, synthetic construct
  misc_feature 1..1398: note = Description of Artificial Sequence: Synthetic coding sequence
  source 1..1398: mol_type = other DNA
atggtgcagaagaagccagctgagctgcagggcttccaccgctccttcaagggccagaacccctttgagctggccttcagcctggaccagcctgaccatggagacagcgactttggcctgcagtgcagcgcccggccagacatgcctgccagccagcccatcgacatcccagatgccaagaagaggggcaagaagaagaagaggggccgggccacagacagcttcagcggccgctttgaagatgtgtaccagctgcaggaggatgtgctgggggagggcgcccacgcccgggtgcagacctgcatcaacctgatcaccagccaggagtatgctgtgaagatcatcgagaagcagcccggccacatccgcagcagggtcttccgggaggtggagatgctgtaccagtgccagggccacagaaatgtgctggagctgattgagttctttgaggaggaggaccgcttctacctggtgtttgagaagatgaggggcggcagcatcctgagccacatccacaagaggaggcacttcaatgagctggaggcctctgtggtggtgcaggatgtggccagcgccctggacttcctgcacaacaagggcatcgcccaccgggacctgaagccagagaacatcctgtgtgagcaccccaaccaggtgtcccctgtgaagatctgtgactttgacctgggcagcggcatcaagctgaatggagactgcagccccatcagcaccccagagctgctgaccccctgtggcagcgctgagtacatggcccctgaggtggtggaggccttcagcgaggaggccagcatctatgacaagagatgtgacctgtggagcctgggcgtcatcctgtacatcctgctgagcggctaccccccatttgtgggccgctgtggcagtgactgtggctgggacagaggagaggcctgcccagcctgccagaacatgctgtttgagagcatccaggagggcaagtatgagttcccagacaaggactgggcccacatcagctgtgccgccaaggacctgatcagcaagctgctggtgagagatgccaagcagaggctgtctgctgcccaggtgctgcagcacccctgggtgcagggctgtgcccctgagaacaccctgcccacccccatggtgctgcagaggaacagctgtgccaaggacctgaccagctttgctgctgaggccatcgccatgaaccggcagctggcccagcatgatgaggacctggccgaggaggaggccgccggccagggccagcctgtgctggtgcgggccaccagccgctgcctgcagctgagcccccccagccagagcaagctggcccagaggcggcagagggccagcctgagcagcgcccctgtggtgctggtgggggaccacgcctag

SEQ ID NO: 158792 - DNA, 1245 bp, synthetic construct
  misc_feature 1..1245: note = Description of Artificial Sequence: Synthetic coding sequence
  source 1..1245: mol_type = other DNA
atggtgcagaagaagccagctgagctgcagggcttccaccgctccttcaagggccagaacccctttgagctggccttcagcctggaccagcctgaccatggagacagcgactttggcctgcagtgcagcgcccggccagacatgcctgccagccagcccatcgacatcccagatgccaagaagaggggcaagaagaagaagaggggccgggccacagacagcttcagcggccgctttgaagatgtgtaccagctgcaggaggatgtgctgggggagggcgcccacgcccgggtgcagacctgcatcaacctgatcaccagccaggagtatgctgtgaagatcatcgagaagcagcccggccacatccgcagcagggtcttccgggaggtggagatgctgtaccagtgccagggccacagaaatgtgctggagctgattgagttctttgaggaggaggaccgcttctacctggtgtttgagaagatgaggggcggcagcatcctgagccacatccacaagaggaggcacttcaatgagctggaggcctctgtggtggtgcaggatgtggccagcgccctggacttcctgcacaacaagggcatcgcccaccgggacctgaagccagagaacatcctgtgtgagcaccccaaccaggtgtcccctgtgaagatctgtgactttgacctgggcagcggcatcaagctgaatggagactgcagccccatcagcaccccagagctgctgaccccctgtggcagcgctgagtacatggcccctgaggtggtggaggccttcagcgaggaggccagcatctatgacaagagatgtgacctgtggagcctgggcgtcatcctgtacatcctgctgagcggctaccccccatttgtgggccgctgtggcagtgactgtggctgggacagaggagaggcctgcccagcctgccagaacatgctgtttgagagcatccaggagggcaagtatgagttcccagacaaggactgggcccacatcagctgtgccgccaaggacctgatcagcaagctgctggtgagagatgccaagcagaggctgtctgctgcccaggtgctgcagcacccctgggtgcagggctgtgcccctgagaacaccctgcccacccccatggtgctgcagcgctgggacagccacttcctgctgcccccccacccctgccgcatccacgtgcggcctgggggcctggtgaggacagtgacagtgaatgaatag

SEQ ID NO: 158793 - DNA, 1005 bp, synthetic construct
  misc_feature 1..1005: note = Description of Artificial Sequence: Synthetic coding sequence
  source 1..1005: mol_type = other DNA
atgctgtaccagtgccagggccacagaaatgtgctggagctgattgagttctttgaggaggaggaccgcttctacctggtgtttgagaagatgagaggaggcagcatcctgagccacatccacaagagaagacacttcaatgagctggaggcctctgtggtggtgcaggatgtggccagcgccctggacttcctgcacaacaagggcatcgcccaccgggacctgaagccagagaacatcctgtgtgagcaccccaaccaggtgtcccctgtgaagatctgtgactttgacctgggcagcggcatcaagctgaatggagactgcagccccatcagcaccccagagctgctgaccccctgtggcagcgctgagtacatggcccctgaggtggtggaggccttcagcgaggaggccagcatctatgacaagagatgtgacctgtggagcctgggcgtcatcctgtacatcctgctgagcggctaccccccatttgtgggccgctgtggcagtgactgtggctgggacagaggagaggcctgcccagcctgccagaacatgctgtttgagagcatccaggagggcaagtatgagttcccagacaaggactgggcccacatcagctgtgccgccaaggacctgatcagcaagctgctggtgagagatgccaagcagaggctgtctgctgcccaggtgctgcagcacccctgggtgcagggctgtgcccctgagaacaccctgcccacccccatggtgctgcagaggaacagctgtgccaaggacctgaccagctttgctgctgaggccatcgccatgaaccggcagctggcccagcatgatgaggacctggccgaggaggaggccgccggccagggccagcctgtgctggtgcgggccaccagccgctgcctgcagctgagcccccccagccagagcaagctggcccagaggcggcagagggccagcctgagcagcgcccctgtggtgctggtgggggaccacgcctag

SEQ ID NO: 158794 - DNA, 1218 bp, synthetic construct
  misc_feature 1..1218: note = Description of Artificial Sequence: Synthetic coding sequence
  source 1..1218: mol_type = other DNA
atgcctgccagccagcccatcgacatcccagatgccaagaagaggggcaagaagaagaagaggggccgggccacagacagcttcagcggccgctttgaagatgtgtaccagctgcaggaggatgtgctgggggagggcgcccacgcccgggtgcagacctgcatcaacctgatcaccagccaggagtatgctgtgaagatcatcgagaagcagcccggccacatccgcagcagggtcttccgggaggtggagatgctgtaccagtgccagggccacagaaatgtgctggagctgattgagaagatgaggggcggcagcatcctgagccacatccacaagaggaggcacttcaatgagctggaggcctctgtggtggtgcaggatgtggccagcgccctggacttcctgcacaacaagggcatcgcccaccgggacctgaagccagagaacatcctgtgtgagcaccccaaccaggtgtcccctgtgaagatctgtgactttgacctgggcagcggcatcaagctgaatggagactgcagccccatcagcaccccagagctgctgaccccctgtggcagcgctgagtacatggcccctgaggtggtggaggccttcagcgaggaggccagcatctatgacaagagatgtgacctgtggagcctgggcgtcatcctgtacatcctgctgagcggctaccccccatttgtgggccgctgtggcagtgactgtggctgggacagaggagaggcctgcccagcctgccagaacatgctgtttgagagcatccaggagggcaagtatgagttcccagacaaggactgggcccacatcagctgtgccgccaaggacctgatcagcaagctgctggtgagagatgccaagcagaggctgtctgctgcccaggtgctgcagcacccctgggtgcagggctgtgcccctgagaacaccctgcccacccccatggtgctgcagaggaacagctgtgccaaggacctgaccagctttgctgctgaggccatcgccatgaaccggcagctggcccagcatgatgaggacctggccgaggaggaggccgccggccagggccagcctgtgctggtgcgggccaccagccgctgcctgcagctgagcccccccagccagagcaagctggcccagaggcggcagagggccagcctgagcagcgcccctgtggtgctggtgggggaccacgcctag

SEQ ID NO: 158795 - DNA, 2388 bp, synthetic construct
  misc_feature 1..2388: note = Description of Artificial Sequence: Synthetic coding sequence
  source 1..2388: mol_type = other DNA
atgtctgcccggacccccctgcccaccgtgaatgaaagagacacagagaaccacacctctgtggatggctacacagagccccacatccagcccaccaagagcagcagccggcagaacatcccccgctgcaggaacagcatcaccagcgccacagatgagcagccccacatcggcaactaccgcctgcagaagaccatcggcaagggcaactttgccaaggtgaagctggcccggcacgtgctgaccggccgggaggtggccgtgaagatcatcgacaagacccagctgaaccccaccagcctgcagaagctgttccgggaggtgcgcatcatgaagatcctgaaccaccccaacatcgtgaagctgtttgaagtcatcgagacagagaagaccctgtacctggtgatggagtatgccagcggcggggaggtgtttgactacctggtggcccacggccgcatgaaggagaaggaggcccgggccaagttccggcagatcgtgtctgctgtgcagtactgccaccagaagtacatcgtgcaccgggacctgaaggccgagaacctgctgctggatggagacatgaacatcaagattgctgactttggcttcagcaatgagttcaccgtgggcaacaagctggacaccttctgtggcagccccccctatgctgcccctgagctgttccagggcaagaagtatgatggccctgaggtggatgtgtggagcctgggcgtcatcctgtacaccctggtgtctggcagcctgccctttgatggccagaacctgaaggagctgcgggagcgggtgctgcggggcaagtaccgcatccccttctacatgagcacagactgtgagaacctgctgaagaagctgctggtgctgaaccccatcaagaggggcagcctggagcagatcatgaaggaccgctggatgaatgtgggccacgaggaggaggagctgaagccctacacagagccagaccctgacttcaatgacaccaagagaattgacatcatggtgaccatgggctttgccagagatgagatcaatgatgccctgatcaaccagaagtatgatgaggtgatggccacctacatcctgctgggcaggaagcccccagagtttgaaggaggagagagcctgagcagcggcaacctgtgccagaggagccggcccagcagtgacctgaacaacagcaccctgcagagccctgcccacctgaaggtgcagaggagcatcagcgccaaccagaagcagaggcgcttcagtgaccacgccggccccagcatccccccagctgtgtcctacaccaagaggccccaggccaacagcgtggagagcgagcagaaggaggagtgggacaaggatgtggccaggaagctgggcagcaccaccgtgggcagcaagtctgagatgacagccagccccctggtgggccctgagaggaagaagagcagcaccatccccagcaacaacgtgtacagcggcggctccatggcccggaggaacacctacgtgtgtgagaggaccacagaccgctacgtggccctgcagaatggcaaggacagcagcctgacagagatgtctgtgagcagcatcagcagcgctggcagctctgtggccagcgctgtgcccagcgcccggcccaggcaccagaagtccatgagcaccagcggccaccccatcaaggtgaccctgcccaccatcaaggatggcagcgaggcctaccggcccggcaccacccagagggtgcctgctgccagccccagcgcccacagcatcagcacagccaccccagacaggacccgcttcccccggggcagcagcagccgcagcaccttccatggagagcagctgcgggagcggcgctctgtggcctacaacggccccccagccagccccagccatgagaccggggcctttgcccacgcccggcggggcaccagcacaggcatcatcagcaagatcaccagcaagtttgtgcggcgggaccccagcgagggggaggccagcggccgcacagacaccagccgcagcaccagcggggagcccaaggagcgggacaaggaggagggcaaggacagcaagcccaggagcctgcgcttcacctggagcatgaagaccaccagctccatggaccccaatgacatgatgagggagatcaggaaggtgctggatgccaacaactgtgactatgagcagaaggagcgcttcctgctcttctgtgtgcatggagatgcccggcaggacagcctggtgcagtgggagatggaggtgtgcaagctgccccggctgagcctgaatggagtgcgcttcaagaggatcagcggcaccagcatcgccttcaagaacatcgccagcaagatcgccaatgagctgaagctgtag

SEQ ID NO: 158796 - DNA, 2277 bp, synthetic construct
  misc_feature 1..2277: note = Description of Artificial Sequence: Synthetic coding sequence
  source 1..2277: mol_type = other DNA
atgtctgcccggacccccctgcccaccgtgaatgaaagagacacagagaaccacacctctgtggatggctacacagagccccacatccagcccaccaagagcagcagccggcagaacatcccccgctgcaggaacagcatcaccagcgccacagatgagcagccccacatcggcaactaccgcctgcagaagaccatcggcaagggcaactttgccaaggtgaagctggcccggcacgtgctgaccggccgggaggtggccgtgaagatcatcgacaagacccagctgaaccccaccagcctgcagaagctgttccgggaggtgcgcatcatgaagatcctgaaccaccccaacattggagaggtgtttgactacctggtggcccacggccgcatgaaggagaaggaggcccgggccaagttccggcagatcgtgtctgctgtgcagtactgccaccagaagtacatcgtgcaccgggacctgaaggccgagaacctgctgctggatggagacatgaacatcaagattgctgactttggcttcagcaatgagttcaccgtgggcaacaagctggacaccttctgtggcagccccccctatgctgcccctgagctgttccagggcaagaagtatgatggccctgaggtggatgtgtggagcctgggcgtcatcctgtacaccctggtgtctggcagcctgccctttgatggccagaacctgaaggagctgcgggagcgggtgctgcggggcaagtaccgcatccccttctacatgagcacagactgtgagaacctgctgaagaagctgctggtgctgaaccccatcaagaggggcagcctggagcagatcatgaaggaccgctggatgaatgtgggccacgaggaggaggagctgaagccctacacagagccagaccctgacttcaatgacaccaagagaattgacatcatggtgaccatgggctttgccagagatgagatcaatgatgccctgatcaaccagaagtatgatgaggtgatggccacctacatcctgctgggcaggaagcccccagagtttgaaggaggagagagcctgagcagcggcaacctgtgccagaggagccggcccagcagtgacctgaacaacagcaccctgcagagccctgcccacctgaaggtgcagaggagcatcagcgccaaccagaagcagaggcgcttcagtgaccacgccggccccagcatccccccagctgtgtcctacaccaagaggccccaggccaacagcgtggagagcgagcagaaggaggagtgggacaaggatgtggccaggaagctgggcagcaccaccgtgggcagcaagtctgagatgacagccagccccctggtgggccctgagaggaagaagagcagcaccatccccagcaacaacgtgtacagcggcggctccatggcccggaggaacacctacgtgtgtgagaggaccacagaccgctacgtggccctgcagaatggcaaggacagcagcctgacagagatgtctgtgagcagcatcagcagcgctggcagctctgtggccagcgctgtgcccagcgcccggcccaggcaccagaagtccatgagcaccagcggccaccccatcaaggtgaccctgcccaccatcaaggatggcagcgaggcctaccggcccggcaccacccagagggtgcctgctgccagccccagcgcccacagcatcagcacagccaccccagacaggacccgcttcccccggggcagcagcagccgcagcaccttccatggagagcagctgcgggagcggcgctctgtggcctacaacggccccccagccagccccagccatgagaccggggcctttgcccacgcccggcggggcaccagcacaggcatcatcagcaagatcaccagcaagtttgtgcggcgcagcaccagcggggagcccaaggagcgggacaaggaggagggcaaggacagcaagcccaggagcctgcgcttcacctggagcatgaagaccaccagctccatggaccccaatgacatgatgagggagatcaggaaggtgctggatgccaacaactgtgactatgagcagaaggagcgcttcctgctcttctgtgtgcatggagatgcccggcaggacagcctggtgcagtgggagatggaggtgtgcaagctgccccggctgagcctgaatggagtgcgcttcaagaggatcagcggcaccagcatcgccttcaagaacatcgccagcaagatcgccaatgagctgaagctgtag

SEQ ID NO: 158797 - DNA, 1938 bp, synthetic construct
  misc_feature 1..1938: note = Description of Artificial Sequence: Synthetic coding sequence
  source 1..1938: mol_type = other DNA
atggagtatgccagcggcggggaggtgtttgactacctggtggcccacggccgcatgaaggagaaggaggcccgggccaagttccggcagatcgtgtctgctgtgcagtactgccaccagaagtacatcgtgcaccgggacctgaaggccgagaacctgctgctggatggagacatgaacatcaagattgctgactttggcttcagcaatgagttcaccgtgggcaacaagctggacaccttctgtggcagccccccctatgctgcccctgagctgttccagggcaagaagtatgatggccctgaggtggatgtgtggagcctgggcgtcatcctgtacaccctggtgtctggcagcctgccctttgatggccagaacctgaaggagctgcgggagcgggtgctgcggggcaagtaccgcatccccttctacatgagcacagactgtgagaacctgctgaagaagctgctggtgctgaaccccatcaagaggggcagcctggagcagatcatgaaggaccgctggatgaatgtgggccacgaggaggaggagctgaagccctacacagagccagaccctgacttcaatgacaccaagagaattgacatcatggtgaccatgggctttgccagagatgagatcaatgatgccctgatcaaccagaagtatgatgaggtgatggccacctacatcctgctgggcaggaagcccccagagtttgagggcggggagagcctgagcagcggcaacctgtgccagaggagccggcccagcagtgacctgaacaacagcaccctgcagagccctgcccacctgaaggtgcagaggagcatcagcgccaaccagaagcagaggcgcttcagtgaccatgctggccccagcatccccccagctgtgtcctacaccaagaggccccaggccaacagcgtggagagcgagcagaaggaggagtgggacaaggatgtggccaggaagctgggcagcaccaccgtgggcagcaagtctgagatgacagccagccccctggtgggccctgagaggaagaagagcagcaccatccccagcaacaacgtgtacagcggcggctccatggcccggaggaacacctacgtgtgtgagaggaccacagacagatatgtggccctgcagaatggcaaggacagcagcctgacagagatgtctgtgagcagcatcagcagcgctggcagctctgtggccagcgctgtgcccagcgcccggcccaggcaccagaagtccatgagcaccagcggccaccccatcaaggtgaccctgcccaccatcaaggatggcagcgaggcctacagacctggcaccacccagagggtgcctgctgccagccccagcgcccacagcatcagcacagccaccccagacaggacccgcttcccccggggcagcagcagccgcagcaccttccacggggagcagctgcgggagaggagatctgtggcctacaatggacctccagccagccccagccatgaaacaggagcctttgcccacgcccggcggggcaccagcacaggcatcatcagcaagatcaccagcaagtttgtgagaagaagcaccagcggggagcccaaggagcgggacaaggaggagggcaaggacagcaagcccaggagcctgcgcttcacctggagcatgaagaccaccagctccatggaccccaatgacatgatgagggagatcaggaaggtgctggatgccaacaactgtgactatgagcagaaggagcgcttcctgctcttctgtgtgcatggagatgcccggcaggacagcctggtgcagtgggagatggaggtgtgcaagctgccccggctgagcctgaatggagtgcgcttcaagaggatcagcggcaccagcatcgccttcaagaacatcgccagcaagatcgccaatgagctgaagctgtag

SEQ ID NO: 158798 - DNA, 2340 bp, synthetic construct
  misc_feature 1..2340: note = Description of Artificial Sequence: Synthetic coding sequence
  source 1..2340: mol_type = other DNA
atgagcagcgcccggacccccctgcccaccctgaatgaaagagacacagagcagcccaccctgggccacctggacagcaagcccagcagcaagagcaacatgatccggggcaggaacagcgccaccagcgcagatgagcagccccacatcggcaactaccgcctgctgaagaccatcggcaaaggaaactttgccaaggtgaagctggcccggcacatcctgaccgggaaggaggtggccgtgaagatcatcgacaagacccagctgaacagcagcagcctgcagaagctgttccgggaggtgcgcatcatgaaggtgctgaaccaccccaacatcgtgaagctgtttgaggtgattgaaacagagaagaccctgtacctggtgatggagtatgccagcggcggggaggtgtttgactacctggtggcccacggccgcatgaaggagaaggaggcccgggccaagttccggcagatcgtgtctgctgtgcagtactgccaccagaagttcatcgtgcaccgggacctgaaggccgagaacctgctgctggatgctgacatgaacatcaagattgctgactttggcttcagcaatgagttcaccttcggcaacaagctggacaccttctgtggcagccccccctatgctgcccctgagctgttccagggcaagaagtatgatggccctgaggtggatgtgtggagcctgggcgtcatcctgtacaccctggtgtctggcagcctgccctttgatggccagaacctgaaggagctgcgggagcgggtgctgcggggcaagtaccgcatccccttctacatgagcacagactgtgagaacctgctgaagaagttcctgatcctgaaccccagcaagaggggcaccctggagcagatcatgaaggaccgctggatgaatgtgggccatgaagatgatgagctgaagccctacgtggagcccctgcctgactacaaggaccccaggagaacagagctgatggtgtccatgggctacacccgggaggagatccaggacagcctggtgggccagcgctacaatgaggtgatggccacctacctgctgctgggctacaagagcagcgagctggagggggacaccatcaccctgaagccccggcccagcgctgacctgaccaacagcagcgcccccagccccagccacaaggtgcagaggtctgtgtctgccaaccccaagcagaggcgcttcagtgaccaggccgccggccctgccatccccaccagcaacagctacagcaagaagacccagagcaacaatgctgagaacaagaggccagaagaagatcgggagagcggcaggaaggccagcagcacagccaaggtgcctgccagccccctgcccggcctggagaggaagaagaccacccccacccccagcaccaacagcgtgctgagcaccagcaccaacagaagcaggaacagccccctgctggagcgggccagcctgggccaggccagcatccagaatggcaaggacagcctgaccatgcctggcagccgggccagcacagccagcgccagcgctgctgtgtctgctgcccggccccggcagcaccagaagtccatgtctgcctctgtgcaccccaacaaggccagcggcctgcccccaacagagagcaactgtgaggtgccccggcccagcacagccccccagagggtgcctgtggccagccccagcgcccacaacatcagcagcagcggcggggccccagacaggaccaacttcccccggggcgtgagcagccgcagcaccttccacgccggccagctgcggcaggtgcgggaccagcagaacctgccctatggagtgaccccagccagccccagcggccacagccagggcagaagaggagccagcggcagcatcttcagcaagttcaccagcaagtttgtgagaagaaacctgaatgaacctgagagcaaggacagagtggagaccctgcggccccacgtggtgggcagcggcggcaatgacaaggagaaggaggagttccgggaggccaagcccaggagcctgcgcttcacctggagcatgaagaccaccagctccatggagcccaatgagatgatgagggagatcaggaaggtgctggatgccaacagctgccagagcgagctgcacgagaagtacatgctgctgtgcatgcacggcaccccaggccacgaggactttgtgcagtgggagatggaggtgtgcaagctgccccggctgagcctgaatggagtgcgcttcaagaggatcagcggcacctccatggccttcaagaacatcgccagcaagatcgccaatgagctgaagctgtag

SEQ ID NO: 158799 - DNA, 2130 bp, synthetic construct
  misc_feature 1..2130: note = Description of Artificial Sequence: Synthetic coding sequence
  source 1..2130: mol_type = other DNA
atgagcagcgcccggacccccctgcccaccctgaatgaaagagacacagagcagcccaccctgggccacctggacagcaagcccagcagcaagagcaacatgatccggggcaggaacagcgccaccagcgcagatgagcagccccacatcggcaactaccgcctgctgaagaccatcggcaaaggaaactttgccaaggtgaagctggcccggcacatcctgaccgggaaggaggtggccgtgaagatcatcgacaagacccagctgaacagcagcagcctgcagaagctgttccgggaggtgcgcatcatgaaggtgctgaaccaccccaacatcgtgaagctgtttgaggtgattgaaacagagaagaccctgtacctggtgatggagtatgccagcggcggggaggtgtttgactacctggtggcccacggccgcatgaaggagaaggaggcccgggccaagttccggcagatcgtgtctgctgtgcagtactgccaccagaagttcatcgtgcaccgggacctgaaggccgagaacctgctgctggatgctgacatgaacatcaagattgctgactttggcttcagcaatgagttcaccttcggcaacaagctggacaccttctgtggcagccccccctatgctgcccctgagctgttccagggcaagaagtatgatggccctgaggtggatgtgtggagcctgggcgtcatcctgtacaccctggtgtctggcagcctgccctttgatggccagaacctgaaggagctgcgggagcgggtgctgcggggcaagtaccgcatccccttctacatgagcacagactgtgagaacctgctgaagaagttcctgatcctgaaccccagcaagaggggcaccctggagcagatcatgaaggaccgctggatgaatgtgggccatgaagatgatgagctgaagccctacgtggagcccctgcctgactacaaggaccccaggagaacagagctgatggtgtccatgggctacacccgggaggagatccaggacagcctggtgggccagcgctacaatgaggtgatggccacctacctgctgctgggctacaagagcagcgagctggagggggacaccatcaccctgaagccccggcccagcgctgacctgaccaacagcagcgcccccagccccagccacaaggtgcagaggtctgtgtctgccaaccccaagcagaggcgcttcagtgaccaggccggccctgccatccccaccagcaacagctacagcaagaagacccagagcaacaatgctgagaacaagaggcctgaggaggaccgggagagcggcaggaaggccagcagcacagccaaggtgcctgccagccccctgcccggcctggagaggaagaagaccacccccacccccagcaccaacagcgtgctgagcaccagcaccaacagaagcaggaacagccccctgctggagcgggccagcctgggccaggccagcatccagaatggcaaggacagcacagccccccagagggtgcctgtggccagccccagcgcccacaacatcagcagcagtggaggagccccagacaggaccaacttcccccggggcgtgagcagccgcagcaccttccacgccggccagctgcggcaggtgcgggaccagcagaacctgccctacggcgtgaccccagccagccccagcggccacagccagggccggcggggggccagcggcagcatcttcagcaagttcaccagcaagtttgtgagaagaccccacgtggtgggcagcggcggcaatgacaaggagaaggaggagttccgggaggccaagcccaggagcctgcgcttcacctggagcatgaagaccaccagctccatggagcccaatgagatgatgagggagatcaggaaggtgctggatgccaacagctgccagagcgagctgcacgagaagtacatgctgctgtgcatgcacggcaccccaggccacgaggactttgtgcagtgggagatggaggtgtgcaagctgccccggctgagcctgaatggagtgcgcttcaagaggatcagcggcacctccatggccttcaagaacatcgccagcaagatcgccaatgagctgaagctgtag

SEQ ID NO: 158800 - DNA, 2160 bp, synthetic construct
  misc_feature 1..2160: note = Description of Artificial Sequence: Synthetic coding sequence
  source 1..2160: mol_type = other DNA
atgagcagcgcccggacccccctgcccaccctgaatgaaagagacacagagcagcccaccctgggccacctggacagcaagcccagcagcaagagcaacatgatccggggcaggaacagcgccaccagcgcagatgagcagccccacatcggcaactaccgcctgctgaagaccatcggcaaaggaaactttgccaaggtgaagctggcccggcacatcctgaccgggaaggaggtggccgtgaagatcatcgacaagacccagctgaacagcagcagcctgcagaagctgttccgggaggtgcgcatcatgaaggtgctgaaccaccccaacatcgtgaagctgtttgaggtgattgaaacagagaagaccctgtacctggtgatggagtatgccagcggcggggaggtgtttgactacctggtggcccacggccgcatgaaggagaaggaggcccgggccaagttccggcagatcgtgtctgctgtgcagtactgccaccagaagttcatcgtgcaccgggacctgaaggccgagaacctgctgctggatgctgacatgaacatcaagattgctgactttggcttcagcaatgagttcaccttcggcaacaagctggacaccttctgtggcagccccccctatgctgcccctgagctgttccagggcaagaagtatgatggccctgaggtggatgtgtggagcctgggcgtcatcctgtacaccctggtgtctggcagcctgccctttgatggccagaacctgaaggagctgcgggagcgggtgctgcggggcaagtaccgcatccccttctacatgagcacagactgtgagaacctgctgaagaagttcctgatcctgaaccccagcaagaggggcaccctggagcagatcatgaaggaccgctggatgaatgtgggccatgaagatgatgagctgaagccctacgtggagcccctgcctgactacaaggaccccaggagaacagagctgatggtgtccatgggctacacccgggaggagatccaggacagcctggtgggccagcgctacaatgaggtgatggccacctacctgctgctgggctacaagagcagcgagctggagggggacaccatcaccctgaagccccggcccagcgctgacctgaccaacagcagcgcccccagccccagccacaaggtgcagaggtctgtgtctgccaaccccaagcagaggcgcttcagtgaccaggccgccggccctgccatccccaccagcaacagctacagcaagaagacccagagcaacaatgctgagaacaagaggccagaagaagatcgggagagcggcaggaaggccagcagcacagccaaggtgcctgccagccccctgcccggcctggagaggaagaagaccacccccacccccagcaccaacagcgtgctgagcaccagcaccaacagaagcaggaacagccccctgctggagcgggccagcctgggccaggccagcatccagaatggcaaggacagcacagccccccagagggtgcctgtggccagccccagcgcccacaacatcagcagcagcggcggggccccagacaggaccaacttcccccggggcgtgagcagccgcagcaccttccacgccggccagctgcggcaggtgcgggaccagcagaacctgccctatggagtgaccccagccagccccagcggccacagccagggcagaagaggagccagcggcagcatcttcagcaagttcaccagcaagtttgtgagaagaaacctgtccttccgctttgcccggcggccccacgtggtgggcagcggcggcaatgacaaggagaaggaggagttccgggaggccaagcccaggagcctgcgcttcacctggagcatgaagaccaccagctccatggagcccaatgagatgatgagggagatcaggaaggtgctggatgccaacagctgccagagcgagctgcacgagaagtacatgctgctgtgcatgcacggcaccccaggccacgaggactttgtgcagtgggagatggaggtgtgcaagctgccccggctgagcctgaatggagtgcgcttcaagaggatcagcggcacctccatggccttcaagaacatcgccagcaagatcgccaatgagctgaagctgtag

SEQ ID NO: 158801 - DNA, 2322 bp, synthetic construct
  misc_feature 1..2322: note = Description of Artificial Sequence: Synthetic coding sequence
  source 1..2322: mol_type = other DNA
atgagcagcgcccggacccccctgcccaccctgaatgaaagagacacagagcagcccaccctgggccacctggacagcaagcccagcagcaagagcaacatgatccggggcaggaacagcgccaccagcgcagatgagcagccccacatcggcaactaccgcctgctgaagaccatcggcaaaggaaactttgccaaggtgaagctggcccggcacatcctgaccgggaaggaggtggccgtgaagatcatcgacaagacccagctgaacagcagcagcctgcagaagctgttccgggaggtgcgcatcatgaaggtgctgaaccaccccaacatcgtgaagctgtttgaggtgattgaaacagagaagaccctgtacctggtgatggagtatgccagcggcggggaggtgtttgactacctggtggcccacggccgcatgaaggagaaggaggcccgggccaagttccggcagatcgtgtctgctgtgcagtactgccaccagaagttcatcgtgcaccgggacctgaaggccgagaacctgctgctggatgctgacatgaacatcaagattgctgactttggcttcagcaatgagttcaccttcggcaacaagctggacaccttctgtggcagccccccctatgctgcccctgagctgttccagggcaagaagtatgatggccctgaggtggatgtgtggagcctgggcgtcatcctgtacaccctggtgtctggcagcctgccctttgatggccagaacctgaaggagctgcgggagcgggtgctgcggggcaagtaccgcatccccttctacatgagcacagactgtgagaacctgctgaagaagttcctgatcctgaaccccagcaagaggggcaccctggagcagatcatgaaggaccgctggatgaatgtgggccatgaagatgatgagctgaagccctacgtggagcccctgcctgactacaaggaccccaggagaacagagctgatggtgtccatgggctacacccgggaggagatccaggacagcctggtgggccagcgctacaatgaggtgatggccacctacctgctgctgggctacaagagcagcgagctggagggggacaccatcaccctgaagccccggcccagcgctgacctgaccaacagcagcgcccccagccccagccacaaggtgcagaggtctgtgtctgccaaccccaagcagaggcgcttcagtgaccaggccgccggccctgccatccccaccagcaacagctacagcaagaagacccagagcaacaatgctgagaacaagaggccagaagaagatcgggagagcggcaggaaggccagcagcacagccaaggtgcctgccagccccctgcccggcctggagaggaagaagaccacccccacccccagcaccaacagcgtgctgagcaccagcaccaacagaagcaggaacagccccctgctggagcgggccagcctgggccaggccagcatccagaatggcaaggacagcctgaccatgcctggcagccgggccagcacagccagcgccagcgctgctgtgtctgctgcccggccccggcagcaccagaagtccatgtctgcctctgtgcaccccaacaaggccagcggcctgcccccaacagagagcaactgtgaggtgccccggcccagcacagccccccagagggtgcctgtggccagccccagcgcccacaacatcagcagcagcggcggggccccagacaggaccaacttcccccggggcgtgagcagccgcagcaccttccacgccggccagctgcggcaggtgcgggaccagcagaacctgccctatggagtgaccccagccagccccagcggccacagccagggcagaagaggagccagcggcagcatcttcagcaagttcaccagcaagtttgtgagaagaaacctgtccttccgctttgcccggcggccccacgtggtgggcagcggcggcaatgacaaggagaaggaggagttccgggaggccaagcccaggagcctgcgcttcacctggagcatgaagaccaccagctccatggagcccaatgagatgatgagggagatcaggaaggtgctggatgccaacagctgccagagcgagctgcacgagaagtacatgctgctgtgcatgcacggcaccccaggccacgaggactttgtgcagtgggagatggaggtgtgcaagctgccccggctgagcctgaatggagtgcgcttcaagaggatcagcggcacctccatggccttcaagaacatcgccagcaagatcgccaatgagctgaagctgtag

SEQ ID NO: 158802 - DNA, 2076 bp, synthetic construct
  misc_feature 1..2076: note = Description of Artificial Sequence: Synthetic coding sequence
  source 1..2076: mol_type = other DNA
atgatccggggcagaaattctgccaccagcgcagatgagcagccccacatcggcaactaccgcctgctgaagaccatcggcaagggcaactttgccaaggtgaagctggcccggcacatcctgaccgggaaggaggtggccgtgaagatcatcgacaagacccagctgaacagcagcagcctgcagaagctgttccgggaggtgcgcatcatgaaggtgctgaaccaccccaacatcgtgaagctgtttgaagtcatcgagacagagaagaccctgtacctggtgatggagtatgccagcggcggggaggtgtttgactacctggtggcccacggccgcatgaaggagaaggaggcccgggccaagttccggcagatcgtgtctgctgtgcagtactgccaccagaagttcatcgtgcaccgggacctgaaggccgagaacctgctgctggatgctgacatgaacatcaagattgctgactttggcttcagcaatgagttcacctttggaaacaagctggacaccttctgtggcagccccccctatgctgcccctgagctgttccagggcaagaagtatgatggccctgaggtggatgtgtggagcctgggcgtcatcctgtacaccctggtgtctggcagcctgccctttgatggccagaacctgaaggagctgcgggagcgggtgctgcggggcaagtaccgcatccccttctacatgagcacagactgtgagaacctgctgaagaagttcctgatcctgaaccccagcaagaggggcaccctggagcagatcatgaaggaccgctggatgaatgtgggccatgaagatgatgagctgaagccctacgtggagcccctgcctgactacaaggaccccaggagaacagagctgatggtgtccatgggctacacccgggaggagatccaggacagcctggtgggccagcgctacaatgaggtgatggccacctacctgctgctgggctacaagagcagcgagctggagggggacaccatcaccctgaagccccggcccagcgctgacctgaccaacagcagcgcccccagccccagccacaaggtgcagaggtctgtgtctgccaaccccaagcagaggcgcttcagtgaccaggccggccctgccatccccaccagcaacagctacagcaagaagacccagagcaacaatgctgagaacaagaggccagaagaagatcgggagagcggcaggaaggccagcagcacagccaaggtgcctgccagccccctgcccggcctggagaggaagaagaccacccccacccccagcaccaacagcgtgctgagcaccagcaccaacagaagcaggaacagccccctgctggagcgggccagcctgggccaggccagcatccagaatggcaaggacagcacagccccccagagggtgcctgtggccagccccagcgcccacaacatcagcagcagcggcggggccccagacaggaccaacttcccccggggcgtgagcagccgcagcaccttccacgccggccagctgcggcaggtgcgggaccagcagaacctgccctatggagtgaccccagccagccccagcggccacagccagggcagaagaggagccagcggcagcatcttcagcaagttcaccagcaagtttgtgagaagaaacctgaatgaacctgagagcaaggacagagtggagaccctgcggccccacgtggtgggcagcggcggcaatgacaaggagaaggaggagttccgggaggccaagcccaggagcctgcgcttcacctggagcatgaagaccaccagctccatggagcccaatgagatgatgagggagatcaggaaggtgctggatgccaacagctgccagagcgagctgcacgagaagtacatgctgctgtgcatgcacggcaccccaggccacgaggactttgtgcagtgggagatggaggtgtgcaagctgccccggctgagcctgaatggagtgcgcttcaagaggatcagcggcacctccatggccttcaagaacatcgccagcaagatcgccaatgagctgaagctgtag

SEQ ID NO: 158803 - DNA, 2367 bp, synthetic construct
  misc_feature 1..2367: note = Description of Artificial Sequence: Synthetic coding sequence
  source 1..2367: mol_type = other DNA
atgagcagcgcccggacccccctgcccaccctgaatgaaagagacacagagcagcccaccctgggccacctggacagcaagcccagcagcaagagcaacatgatccggggcaggaacagcgccaccagcgcagatgagcagccccacatcggcaactaccgcctgctgaagaccatcggcaaaggaaactttgccaaggtgaagctggcccggcacatcctgaccgggaaggaggtggccgtgaagatcatcgacaagacccagctgaacagcagcagcctgcagaagctgttccgggaggtgcgcatcatgaaggtgctgaaccaccccaacatcgtgaagctgtttgaggtgattgaaacagagaagaccctgtacctggtgatggagtatgccagcggcggggaggtgtttgactacctggtggcccacggccgcatgaaggagaaggaggcccgggccaagttccggcagatcgtgtctgctgtgcagtactgccaccagaagttcatcgtgcaccgggacctgaaggccgagaacctgctgctggatgctgacatgaacatcaagattgctgactttggcttcagcaatgagttcaccttcggcaacaagctggacaccttctgtggcagccccccctatgctgcccctgagctgttccagggcaagaagtatgatggccctgaggtggatgtgtggagcctgggcgtcatcctgtacaccctggtgtctggcagcctgccctttgatggccagaacctgaaggagctgcgggagcgggtgctgcggggcaagtaccgcatccccttctacatgagcacagactgtgagaacctgctgaagaagttcctgatcctgaaccccagcaagaggggcaccctggagcagatcatgaaggaccgctggatgaatgtgggccatgaagatgatgagctgaagccctacgtggagcccctgcctgactacaaggaccccaggagaacagagctgatggtgtccatgggctacacccgggaggagatccaggacagcctggtgggccagcgctacaatgaggtgatggccacctacctgctgctgggctacaagagcagcgagctggagggggacaccatcaccctgaagccccggcccagcgctgacctgaccaacagcagcgcccccagccccagccacaaggtgcagaggtctgtgtctgccaaccccaagcagaggcgcttcagtgaccaggccgccggccctgccatccccaccagcaacagctacagcaagaagacccagagcaacaatgctgagaacaagaggccagaagaagatcgggagagcggcaggaaggccagcagcacagccaaggtgcctgccagccccctgcccggcctggagaggaagaagaccacccccacccccagcaccaacagcgtgctgagcaccagcaccaacagaagcaggaacagccccctgctggagcgggccagcctgggccaggccagcatccagaatggcaaggacagcctgaccatgcctggcagccgggccagcacagccagcgccagcgctgctgtgtctgctgcccggccccggcagcaccagaagtccatgtctgcctctgtgcaccccaacaaggccagcggcctgcccccaacagagagcaactgtgaggtgccccggcccagcacagccccccagagggtgcctgtggccagccccagcgcccacaacatcagcagcagcggcggggccccagacaggaccaacttcccccggggcgtgagcagccgcagcaccttccacgccggccagctgcggcaggtgcgggaccagcagaacctgccctatggagtgaccccagccagccccagcggccacagccagggcagaagaggagccagcggcagcatcttcagcaagttcaccagcaagtttgtgagaagaaacctgtccttccgctttgcccggaggaacctgaatgaacctgagagcaaggacagagtggagaccctgcggccccacgtggtgggcagcggcggcaatgacaaggagaaggaggagttccgggaggccaagcccaggagcctgcgcttcacctggagcatgaagaccaccagctccatggagcccaatgagatgatgagggagatcaggaaggtgctggatgccaacagctgccagagcgagctgcacgagaagtacatgctgctgtgcatgcacggcaccccaggccatgaagattttgtgcagtgggagatggaggtgtgcaagctgccccggctgagcctgaatggagtgcgcttcaagaggatcagcggcacctccatggccttcaagaacatcgccagcaagatcgccaatgagctgaagctgtag

SEQ ID NO: 158804 - DNA, 2076 bp, synthetic construct; identical to SEQ ID NO: 158802
  misc_feature 1..2076: note = Description of Artificial Sequence: Synthetic coding sequence
  source 1..2076: mol_type = other DNA

SEQ ID NO: 158805 - DNA, 2205 bp, synthetic construct
  misc_feature 1..2205: note = Description of Artificial Sequence: Synthetic coding sequence
  source 1..2205: mol_type = other DNA
atgagcagcgcccggacccccctgcccaccctgaatgaaagagacacagagcagcccaccctgggccacctggacagcaagcccagcagcaagagcaacatgatccggggcaggaacagcgccaccagcgcagatgagcagccccacatcggcaactaccgcctgctgaagaccatcggcaaaggaaactttgccaaggtgaagctggcccggcacatcctgaccgggaaggaggtggccgtgaagatcatcgacaagacccagctgaacagcagcagcctgcagaagctgttccgggaggtgcgcatcatgaaggtgctgaaccaccccaacatcgtgaagctgtttgaggtgattgaaacagagaagaccctgtacctggtgatggagtatgccagcggcggggaggtgtttgactacctggtggcccacggccgcatgaaggagaaggaggcccgggccaagttccggcagatcgtgtctgctgtgcagtactgccaccagaagttcatcgtgcaccgggacctgaaggccgagaacctgctgctggatgctgacatgaacatcaagattgctgactttggcttcagcaatgagttcaccttcggcaacaagctggacaccttctgtggcagccccccctatgctgcccctgagctgttccagggcaagaagtatgatggccctgaggtggatgtgtggagcctgggcgtcatcctgtacaccctggtgtctggcagcctgccctttgatggccagaacctgaaggagctgcgggagcgggtgctgcggggcaagtaccgcatccccttctacatgagcacagactgtgagaacctgctgaagaagttcctgatcctgaaccccagcaagaggggcaccctggagcagatcatgaaggaccgctggatgaatgtgggccatgaagatgatgagctgaagccctacgtggagcccctgcctgactacaaggaccccaggagaacagagctgatggtgtccatgggctacacccgggaggagatccaggacagcctggtgggccagcgctacaatgaggtgatggccacctacctgctgctgggctacaagagcagcgagctggagggggacaccatcaccctgaagccccggcccagcgctgacctgaccaacagcagcgcccccagccccagccacaaggtgcagaggtctgtgtctgccaaccccaagcagaggcgcttcagtgaccaggccgccggccctgccatccccaccagcaacagctacagcaagaagacccagagcaacaatgctgagaacaagaggccagaagaagatcgggagagcggcaggaaggccagcagcacagccaaggtgcctgccagccccctgcccggcctggagaggaagaagaccacccccacccccagcaccaacagcgtgctgagcaccagcaccaacagaagcaggaacagccccctgctggagcgggccagcctgggccaggccagcatccagaatggcaaggacagcacagccccccagagggtgcctgtggccagccccagcgcccacaacatcagcagcagcggcggggccccagacaggaccaacttcccccggggcgtgagcagccgcagcaccttccacgccggccagctgcggcaggtgcgggaccagcagaacctgccctatggagtgaccccagccagccccagcggccacagccagggcagaagaggagccagcggcagcatcttcagcaagttcaccagcaagtttgtgagaagaaacctgtccttccgctttgcccggaggaacctgaatgaacctgagagcaaggacagagtggagaccctgcggccccacgtggtgggcagcggcggcaatgacaaggagaaggaggagttccgggaggccaagcccaggagcctgcgcttcacctggagcatgaagaccaccagctccatggagcccaatgagatgatgagggagatcaggaaggtgctggatgccaacagctgccagagcgagctgcacgagaagtacatgctgctgtgcatgcacggcaccccaggccatgaagattttgtgcagtgggagatggaggtgtgcaagctgccccggctgagcctgaatggagtgcgcttcaagaggatcagcggcacctccatggccttcaagaacatcgccagcaagatcgccaatgagctgaagctgtag

SEQ ID NO: 158806 - DNA, 2343 bp, synthetic construct
  misc_feature 1..2343: note = Description of Artificial Sequence: Synthetic coding sequence
  source 1..2343: mol_type = other DNA
atgagcagcgcccggacccccctgcccaccctgaatgaaagagacacagagcagcccaccctgggccacctggacagcaagcccagcagcaagagcaacatgatccggggcaggaacagcgccaccagcgcagatgagcagccccacatcggcaactaccgcctgctgaagaccatcggcaaaggaaactttgccaaggtgaagctggcccggcacatcctgaccgggaaggaggtggccgtgaagatcatcgacaagacccagctgaacagcagcagcctgcagaagctgttccgggaggtgcgcatcatgaaggtgctgaaccaccccaacatcgtgaagctgtttgaggtgattgaaacagagaagaccctgtacctggtgatggagtatgccagcggcggggaggtgtttgactacctggtggcccacggccgcatgaaggagaaggaggcccgggccaagttccggcagatcgtgtctgctgtgcagtactgccaccagaagttcatcgtgcaccgggacctgaaggccgagaacctgctgctggatgctgacatgaacatcaagattgctgactttggcttcagcaatgagttcaccttcggcaacaagctggacaccttctgtggcagccccccctatgctgcccctgagctgttccagggcaagaagtatgatggccctgaggtggatgtgtggagcctgggcgtcatcctgtacaccctggtgtctggcagcctgccctttgatggccagaacctgaaggagctgcgggagcgggtgctgcggggcaagtaccgcatccccttctacatgagcacagactgtgagaacctgctgaagaagttcctgatcctgaaccccagcaagaggggcaccctggagcagatcatgaaggaccgctggatgaatgtgggccatgaagatgatgagctgaagccctacgtggagcccctgcctgactacaaggaccccaggagaacagagctgatggtgtccatgggctacacccgggaggagatccaggacagcctggtgggccagcgctacaatgaggtgatggccacctacctgctgctgggctacaagagcagcgagctggagggggacaccatcaccctgaagccccggcccagcgctgacctgaccaacagcagcgcccccagccccagccacaaggtgcagaggtctgtgtctgccaaccccaagcagaggcgcttcagtgaccaggccggccctgccatccccaccagcaacagctacagcaagaagacccagagcaacaatgctgagaacaagaggcctgaggaggaccgggagagcggcaggaaggccagcagcacagccaaggtgcctgccagccccctgcccggcctggagaggaagaagaccacccccacccccagcaccaacagcgtgctgagcaccagcaccaacagaagcaggaacagccccctgctggagcgggccagcctgggccaggccagcatccagaatggcaaggacagcctgaccatgcctggcagccgggccagcacagccagcgccagcgctgctgtgtctgctgcccggccccggcagcaccagaagtccatgtctgcctctgtgcaccccaacaaggccagcggcctgcccccaacagagagcaactgtgaggtgccccggccccggcaggtgacagccccccagagggtgcctgtggccagccccagcgcccacaacatcagcagcagtggaggagccccagacaggaccaacttcccccggggcgtgagcagccgcagcaccttccacgccggccagctgcggcaggtgcgggaccagcagaacctgccctacggcgtgaccccagccagccccagcggccacagccagggccggcggggggccagcggcagcatcttcagcaagttcaccagcaagtttgtgagaagaaacctgaatgaacctgagagcaaggacagagtggagaccctgcggccccacgtggtgggcagcggcggcaatgacaaggagaaggaggagttccgggaggccaagcccaggagcctgcgcttcacctggagcatgaagaccaccagctccatggagcccaatgagatgatgagggagatcaggaaggtgctggatgccaacagctgccagagcgagctgcacgagaagtacatgctgctgtgcatgcacggcaccccaggccatgaagattttgtgcagtgggagatggaggtgtgcaagctgccccggctgagcctgaatggagtgcgcttcaagaggatcagcggcacctccatggccttcaagaacatcgccagcaagatcgccaatgagctgaagctgtag

SEQ ID NO: 158807 - DNA, 126 bp, synthetic construct
  misc_feature 1..126: note = Description of Artificial Sequence: Synthetic coding sequence
  source 1..126: mol_type = other DNA
atgagcagcgcccggacccccctgcccaccctgaatgaaagagacacagagcagcccaccctgggccacctggacagcaagcccagcagcaagagcaacatgatccggggcaggaacagcgcctag

SEQ ID NO: 158808 - DNA, 2175 bp, synthetic construct
  misc_feature 1..2175: note = Description of Artificial Sequence: Synthetic coding sequence
  source 1..2175: mol_type = other DNA
atgagcagcgcccggacccccctgcccaccctgaatgaaagagacacagagcagcccaccctgggccacctggacagcaagcccagcagcaagagcaacatgatccggggcaggaacagcgccaccagcgcagatgagcagccccacatcggcaactaccgcctgctgaagaccatcggcaaaggaaactttgccaaggtgaagctggcccggcacatcctgaccgggaaggaggtggccgtgaagatcatcgacaagacccagctgaacagcagcagcctgcagaagctgttccgggaggtgcgcatcatgaaggtgctgaaccaccccaacatcgtgaagctgtttgaggtgattgaaacagagaagaccctgtacctggtgatggagtatgccagcggcggggaggtgtttgactacctggtggcccacggccgcatgaaggagaaggaggcccgggccaagttccggcagatcgtgtctgctgtgcagtactgccaccagaagttcatcgtgcaccgggacctgaaggccgagaacctgctgctggatgctgacatgaacatcaagattgctgactttggcttcagcaatgagttcaccttcggcaacaagctggacaccttctgtggcagccccccctatgctgcccctgagctgttccagggcaagaagtatgatggccctgaggtggatgtgtggagcctgggcgtcatcctgtacaccctggtgtctggcagcctgccctttgatggccagaacctgaaggagctgcgggagcgggtgctgcggggcaagtaccgcatccccttctacatgagcacagactgtgagaacctgctgaagaagttcctgatcctgaaccccagcaagaggggcaccctggagcagatcatgaaggaccgctggatgaatgtgggccatgaagatgatgagctgaagccctacgtggagcccctgcctgactacaaggaccccaggagaacagagctgatggtgtccatgggctacacccgggaggagatccaggacagcctggtgggccagcgctacaatgaggtgatggccacctacctgctgctgggctacaagagcagcgagctggagggggacaccatcaccctgaagccccggcccagcgctgacctgaccaacagcagcgcccccagccccagccacaaggtgcagaggtctgtgtctgccaaccccaagcagaggcgcttcagtgaccaggccggccctgccatccccaccagcaacagctacagcaagaagacccagagcaacaatgctgagaacaagaggcctgaggaggaccgggagagcggcaggaaggccagcagcacagccaaggtgcctgccagccccctgcccggcctggagaggaagaagaccacccccacccccagcaccaacagcgtgctgagcaccagcaccaacagaagcaggaacagccccctgctggagcgggccagcctgggccaggccagcatccagaatggcaaggacagcacagccccccagagggtgcctgtggccagccccagcgcccacaacatcagcagcagtggaggagccccagacaggaccaacttcccccggggcgtgagcagccgcagcaccttccacgccggccagctgcggcaggtgcgggaccagcagaacctgccctacggcgtgaccccagccagccccagcggccacagccagggccggcggggggccagcggcagcatcttcagcaagttcaccagcaagtttgtgagaagaaacctgaatgaacctgagagcaaggacagagtggagaccctgcggccccacgtggtgggcagcggcggcaatgacaaggagaaggaggagttccgggaggccaagcccaggagcctgcgcttcacctggagcatgaagaccaccagctccatggagcccaatgagatgatgagggagatcaggaaggtgctggatgccaacagctgccagagcgagctgcacgagaagtacatgctgctgtgcatgcacggcaccccaggccatgaagattttgtgcagtgggagatggaggtgtgcaagctgccccggctgagcctgaatggagtgcgcttcaagaggatcagcggcacctccatggccttcaagaacatcgccagcaagatcgccaatgagctgaagctgtag

SEQ ID NO: 158809 - DNA, 186 bp, synthetic construct
  misc_feature 1..186: note = Description of Artificial Sequence: Synthetic coding sequence
  source 1..186: mol_type = other DNA
atggaggtggccggcagccccttccccttcctgcagagcgtggcctgcctgctgaccctggcccacatcccagctgtgggcaacatcctgcagcacagaagaagaggagctggccccaccctgggccacctggacagcaagcccagcagcaagagcaacatgatccggggcaggaacagcgcctag

SEQ ID NO: 158810 - DNA, 339 bp, synthetic construct
  misc_feature 1..339: note = Description of Artificial Sequence: Synthetic coding sequence
  source 1..339: mol_type = other DNA
atgatccggggcagaaattctgccaccagcgcagatgagcagccccacatcggcaactaccgcctgctgaagaccatcggcaagggcaactttgccaaggtgaagctggcccggcacatcctgaccgggaaggaggtggccgtgaagatcatcgacaagacccagctgaacagcagcagcctgcagaagctgttccgggaggtgcgcatcatgaaggtgctgaaccaccccaacatcgtgaagctgtttgaagtcatcgagacagagaagaccctgtacctggtgatggagtatgccagcggcggggaggtgtttgactacctggtggcccatggatag

SEQ ID NO: 158811 - DNA, 486 bp, synthetic construct
  misc_feature 1..486: note = Description of Artificial Sequence: Synthetic coding sequence
  source 1..486: mol_type = other DNA
atgatccggggcagaaattctgccaccagcgcagatgagcagccccacatcggcaactaccgcctgctgaagaccatcggcaagggcaactttgccaaggtgaagctggcccggcacatcctgaccgggaaggaggtggccgtgaagatcatcgacaagacccagctgaacagcagcagcctgcagaagctgttccgggaggtgcgcatcatgaaggtgctgaaccaccccaacatcgtgaagctgtttgaagtcatcgagacagagaagaccctgtacctggtgatggagtatgccagcggcggggaggtgtttgactacctggtggcccacggccgcatgaaggagaaggaggcccgggccaagttccggcagatcgtgtctgctgtgcagtactgccaccagaagttcatcgtgcaccgggacctgaaggccgagaacctgctgctggatgctgacatgaacatcaagattgctgacttctag

SEQ ID NO: 158812 - DNA, 276 bp, synthetic construct
  misc_feature 1..276: note = Description of Artificial Sequence: Synthetic coding sequence
  source 1..276: mol_type = other DNA
atgggcggccagaggaacacctctgtgggcaacatcgtgcagcgctggagggaccacgtggtgtgccagaaggccggggtcatctacagcggcaggaaggcccaggagcacggcactggaagaacagacttcaccccagcccagaggctgatgatgcccaccctgggccacctggacagcaagcccagcagcaagagcaacatgatccggggcaggaacagcgccaccagcgcagatgagcagccccacatcggcaactaccgcctgctgaagtag

SEQ ID NO: 158813 - DNA, 2238 bp, synthetic construct
  misc_feature 1..2238: note = Description of Artificial Sequence: Synthetic coding sequence
  source 1..2238: mol_type = other DNA
atgatccggggcagaaattctgccaccagcgcagatgagcagccccacatcggcaactaccgcctgctgaagaccatcggcaagggcaactttgccaaggtgaagctggcccggcacatcctgaccgggaaggaggtggccgtgaagatcatcgacaagacccagctgaacagcagcagcctgcagaagctgttccgggaggtgcgcatcatgaaggtgctgaaccaccccaacatcgtgaagctgtttgaagtcatcgagacagagaagaccctgtacctggtgatggagtatgccagcggcggggaggtgtttgactacctggtggcccacggccgcatgaaggagaaggaggcccgggccaagttccggcagatcgtgtctgctgtgcagtactgccaccagaagttcatcgtgcaccgggacctgaaggccgagaacctgctgctggatgctgacatgaacatcaagattgctgactttggcttcagcaatgagttcacctttggaaacaagctggacaccttctgtggcagccccccctatgctgcccctgagctgttccagggcaagaagtatgatggccctgaggtggatgtgtggagcctgggcgtcatcctgtacaccctggtgtctggcagcctgccctttgatggccagaacctgaaggagctgcgggagcgggtgctgcggggcaagtaccgcatccccttctacatgagcacagactgtgagaacctgctgaagaagttcctgatcctgaaccccagcaagaggggcaccctggagcagatcatgaaggaccgctggatgaatgtgggccatgaagatgatgagctgaagccctacgtggagcccctgcctgactacaaggaccccaggagaacagagctgatggtgtccatgggctacacccgggaggagatccaggacagcctggtgggccagcgctacaatgaggtgatggccacctacctgctgctgggctacaagagcagcgagctggagggggacaccatcaccctgaagccccggcccagcgctgacctgaccaacagcagcgcccccagccccagccacaaggtgcagaggtctgtgtctgccaaccccaagcagaggcgcttcagtgaccaggccggccctgccatccccaccagcaacagctacagcaagaagacccagagcaacaatgctgagaacaagaggccagaagaagatcgggagagcggcaggaaggccagcagcacagccaaggtgcctgccagccccctgcccggcctggagaggaagaagaccacccccacccccagcaccaacagcgtgctgagcaccagcaccaacagaagcaggaacagccccctgctggagcgggccagcctgggccaggccagcatccagaatggcaaggacagcctgaccatgcctggcagccgggccagcacagccagcgccagcgctgctgtgtctgctgcccggccccggcagcaccagaagtccatgtctgcctctgtgcaccccaacaaggccagcggcctgcccccaacagagagcaactgtgaggtgccccggcccagcacagccccccagagggtgcctgtggccagccccagcgcccacaacatcagcagcagcggcggggccccagacaggaccaacttcccccggggcgtgagcagccgcagcaccttccacgccggccagctgcggcaggtgcgggaccagcagaacctgccctatggagtgaccccagccagccccagcggccacagccagggcagaagaggagccagcggcagcatcttcagcaagttcaccagcaagtttgtgagaagaaacctgaatgaacctgagagcaaggacagagtggagaccctgcggccccacgtggtgggcagcggcggcaatgacaaggagaaggaggagttccgggaggccaagcccaggagcctgcgcttcacctggagcatgaagaccaccagctccatggagcccaatgagatgatgagggagatcaggaaggtgctggatgccaacagctgccagagcgagctgcacgagaagtacatgctgctgtgcatgcacggcaccccaggccacgaggactttgtgcagtgggagatggaggtgtgcaagctgccccggctgagcctgaatggagtgcgcttcaagaggatcagcggcacctccatggccttcaagaacatcgccagcaagatcgccaatgagctgaagctgtag

SEQ ID NO: 158814 - DNA, 4128 bp, synthetic construct
  misc_feature 1..4128: note = Description of Artificial Sequence: Synthetic coding sequence
  source 1..4128: mol_type = other DNA
atggagggggacagagtggccggccggcctgtgctgagcagcctgcctgtgctgctgctgctgcccctgctgatgctgcgggctgctgccctgcacccagatgagctgttcccccatggagagagctggggagaccagctgctgcaggagggagatgatgagagcagcgctgtggtgaagctggccaaccccctgcacttctatgaggcccgcttcagcaacctgtatgtgggcaccaacggcatcatcagcacccaggacttcccccgggagacccagtatgtggactatgacttccccacagacttccctgccatcgcccccttcctggccgacatcgacaccagccacggccggggccgggtgctgtaccgggaggacaccagccctgctgtgctgggcctggccgcccgctacgtgcgggccggcttccccaggtctgcccgcttcacccccacccacgccttcctggccacctgggagcaggtgggcgcctatgaggaggtgaagagaggagccctgcccagcggggagctgaacaccttccaggccgtgctggccagtgatggcagtgacagctatgccctcttcctgtacccagccaacggcctgcagttcctgggcacccggcccaaggagagctacaacgtgcagctgcagctgcctgcccgggtgggcttctgccgcggggaggctgatgacctgaagtctgagggcccctacttcagcctgaccagcacagagcagagcgtgaagaacctgtaccagctgagcaacctgggcatccctggggtgtgggccttccacatcggcagcaccagccccctggacaacgtgcggcctgctgctgtgggggacctgtctgctgcccacagctctgtgcccctgggccgctccttcagccacgccacagccctggagagtgactacaatgaagacaacctggactactatgatgtgaatgaggaggaggccgagtacctgcctggagagcctgaggaggccctgaatggccacagcagcattgatgtgtccttccagagcaaggtggacaccaagcccctggaggagagcagcaccctggacccccacaccaaggagggcaccagcctgggggaggtgggcggccctgacctgaagggccaggtggagccctgggatgagcgggagaccaggagccctgcccctcctgaggtggaccgggacagcctggcccccagctgggagaccccaccaccctacccagaaaatggcagcatccagccctacccagatggcggccctgtgcccagcgagatggatgtgcccccagcccaccctgaggaggagatcgtgctgcggagctacccagccagcggccacaccacccccctgagccggggcacctatgaggtgggcctggaggacaacatcggcagcaacacagaggtgttcacctacaatgctgccaacaaggagacctgtgagcacaaccaccggcagtgcagcagacatgccttctgcacagattatgccaccggcttctgctgccactgccagagcaagttctatggaaatggcaagcactgcctgcctgagggcgccccccaccgggtgaatggcaaggtgtctggccacctgcacgtgggccacacccctgtgcacttcacagatgtggacctgcacgcctacatcgtgggcaatgatggccgggcctacacagccatcagccacatcccccagcctgctgcccaggccctgctgcccctgacccccatcggcggcctgtttggctggctgtttgccctggagaagccaggctctgaaaatggcttcagcctggccggggccgccttcacccatgacatggaggtgaccttctacccaggagaggagaccgtgcgcatcacccagacagctgagggcctggaccctgagaactacctgagcatcaagaccaacatccagggccaggtgccctacgtgtctgccaacttcaccgcccacatcagcccctacaaggagctgtaccactacagcgacagcacagtgaccagcaccagcagccgggactacagcctgacctttggagccatcaaccagacctggagctaccgcatccaccagaacatcacctaccaggtgtgcagacatgcccccaggcaccccagcttccccaccacccagcagctgaatgtggacagagtgtttgccctgtacaatgatgaggagcgggtgctgcgctttgctgtgaccaaccagatcggccctgtgaaggaggacagcgaccccaccccaggcaacccctgctatgatggcagccacatgtgtgacaccacagcccgctgccaccctggcaccggggtggactacacctgtgaatgtgccagcggctaccagggagatggaagaaactgtgtggatgaaaatgaatgtgccaccggcttccaccgctgtggccccaacagcgtgtgcatcaacctgcccggcagctaccgctgtgagtgccgcagcggctatgaatttgctgatgacagacacacctgcatcctgatcaccccaccagccaacccctgtgaagatggcagccacacctgtgccccagctggccaggcccgctgtgtgcaccacggcggcagcaccttcagctgtgcctgcctgcccggctatgctggagatggccaccagtgcacagatgtggatgaatgttctgagaaccgctgccaccctgctgccacctgctacaacaccccaggcagcttcagctgccgctgccagcccggctactatggagatggcttccagtgcatcccagacagcaccagcagcctgaccccctgtgagcagcagcagagacatgcccaggcccagtatgcctacccaggggcccgcttccacatcccccagtgtgatgagcagggcaacttcctgcccctgcagtgccacggcagcacaggcttctgctggtgtgtggaccctgatggccacgaggtgcccggcacccagaccccacctggcagcaccccaccccactgcggccccagccctgagcccacccagaggcctcccaccatctgtgagcgctggagggagaacctgctggagcactacggcggcaccccaagagatgaccagtatgtgccccagtgtgatgacctgggccacttcatccccctgcagtgccacggcaagagtgacttctgctggtgtgtggacaaggatggccgggaggtgcagggcaccaggagccagcccggcaccaccccagcctgcatccccaccgtggccccacccatggtgcggcccacccccaggccagatgtgaccccaccttctgtgggcaccttcctgctgtacacccagggccagcagatcggctacctgcccctgaatggcacccggctgcagaaggatgctgccaagaccctgctgagcctgcacggcagcatcatcgtgggcattgattatgactgccgggagaggatggtgtactggacagatgtggccggccgcaccatcagcagagctggcctggagctgggcgctgagcctgagaccatcgtgaacagcggcctcatcagccctgagggcctggccatcgaccacatccggaggaccatgtactggacagattctgtgctggacaagattgagagcgccctgctggatggcagcgagaggaaggtgctcttctacacagacctggtgaacccccgggccatcgctgtggaccccatccggggcaacctgtactggacagactggaaccgggaggcccccaagattgagaccagcagcctggatggagaaaatcgccgcatcctgatcaacacagacatcggcctgcccaacggcctgacctttgaccccttcagcaagctgctgtgctgggcagatgctggcaccaagaagctggagtgcaccctgcctgatggcaccggccggcgggtcatccagaacaacctgaagtaccccttcagcatcgtgtcctatgctgaccacttctaccacacagactggaggagagatggagtggtgtctgtgaacaagcacagcggccagttcacagatgagtacctgcctgagcagaggagccacctgtatggcatcacagctgtgtacccctactgccccaccggcaggaagtag

SEQ ID NO: 158815 - DNA, 2190 bp, synthetic construct
  misc_feature 1..2190: note = Description of Artificial Sequence: Synthetic coding sequence
  source 1..2190: mol_type = other DNA
atgagcaccaggacccccctgcccaccgtgaatgaaagagacacagagaaccacaccagccatggagatggccggcaggaggtgaccagcaggaccagccgcagcggggcccgctgcaggaacagcatcgccagctgtgctgatgagcagccccacatcggcaactaccgcctgctgaagaccatcggcaagggcaactttgccaaggtgaagctggcccggcacatcctgaccggccgggaggtggccatcaagatcatcgacaagacccagctgaaccccaccagcctgcagaagctgttccgggaggtgcgcatcatgaagatcctgaaccaccccaacatcgtgaagctgtttgaagtcatcgagacagagaagaccctgtacctgatcatggagtatgccagcggcggggaggtgtttgactacctggtggcccacggccgcatgaaggagaaggaggcccggagcaagttccggcagatcgtgtctgctgtgcagtactgccaccagaagagaattgtgcaccgggacctgaaggccgagaacctgctgctggatgctgacatgaacatcaagattgctgactttggcttcagcaatgagttcaccgtgggcggcaagctggacaccttctgtggcagccccccctatgctgcccctgagctgttccagggcaagaagtatgatggccctgaggtggatgtgtggagcctgggcgtcatcctgtacaccctggtgtctggcagcctgccctttgatggccagaacctgaaggagctgcgggagcgggtgctgcggggcaagtaccgcatccccttctacatgagcacagactgtgagaacctgctgaagcgcttcctggtgctgaaccccatcaagaggggcaccctggagcagatcatgaaggaccgctggatcaatgccggccatgaagaagatgagctgaagccctttgtggagcctgagctggacatcagtgaccagaagagaattgacatcatggtgggcatgggctacagccaggaggagatccaggagagcctgagcaagatgaagtatgatgagatcacagccacctacctgctgctgggcaggaagagcagcgagctggatgccagtgacagcagcagcagcagcaacctgagcctggccaaggtgcggcccagcagtgacctgaacaacagcacaggccagagcccccaccacaaggtgcagaggagcgtcttcagcagccagaagcagaggcgctacagcgaccacgccggccctgccatccccagcgtggtggcctaccccaagaggagccagaccagcacagctgacagcgacctgaaggaggatggcatcagcagcaggaagagcagcggcagcgctgtgggcggcaaaggaattgccccagccagccccatgctgggcaatgccagcaaccccaacaaggctgacatccctgagaggaagaagagcagcacagtgcccagcagcaacacagccagcggcggcatgaccaggaggaacacctacgtgtgcagcgagaggaccacagctgacagacacagcgtcatccagaatggcaaggagaacagcaccatcccagaccagaggacccctgtggccagcacccacagcatcagcagcgctgccaccccagaccgcatccgcttcccccggggcacagccagccgcagcaccttccacggccagccccgggagaggagaacagccacctacaacggccccccagccagccccagcctgagccatgaggccacccccctgagccagaccaggagccggggcagcaccaacctcttcagcaagctgaccagcaagctgaccaggagcagaaatgtgtctgctgagcagaaggatgagaacaaggaggccaagcccaggagcctgcgcttcacctggagcatgaagaccaccagctccatggaccccggggacatgatgagggagatcaggaaggtgctggatgccaacaactgtgactatgagcagcgggagcgcttcctgctcttctgtgtgcatggagatggccatgctgagaacctggtgcagtgggagatggaggtgtgcaagctgccccggctgagcctgaatggagtgcgcttcaagaggatcagcggcaccagcatcgccttcaagaacatcgccagcaagatcgccaatgagctgaagctgtag

SEQ ID NO: 158816 - DNA, 1338 bp, synthetic construct
  misc_feature 1..1338: note = Description of Artificial Sequence: Synthetic coding sequence
  source 1..1338: mol_type = other DNA
atgaagtatgatgagatcacagccacctacctgctgctgggcaggaagagcagcgagctggatgccagtgacagcagcagcagcagcaacctgagcctggccaaggtgcggcccagcagtgacctgaacaacagcacaggccagagcccccaccacaaggtgcagaggtctgtgttcagcagccagaagcagaggcgctacagcgaccatgctggccctgccatccccagcgtggtggcctaccccaagaggagccagaccagcacagctgacagcgacctgaaggaggatggcatcagcagcaggaagagcagcggcagcgctgtgggcggcaagggcatcgccccagccagccccatgctgggcaatgccagcaaccccaacaaggctgacatccctgagaggaagaagagcagcacagtgcccagcagcaacacagccagcggcggcatgaccaggaggaacacctacgtgtgcagcgagaggaccacagctgacagacattctgtcatccagaatggcaaggagaacagcctgacagagatgtttgcctatgctgccagccctgcctctgtgtgcaccagcacctgccgcctgcggcaccagaagtccatgtccatgtctgccagcggccaccccaagatgatgctgccccccatcgacagcgagggggacaacttcaaggccatcaccatcccagaccagaggacccctgtggccagcacccacagcatcagcagcgctgccaccccagaccgcatccgcttcccccggggcacagccagccgcagcaccttccacggccagccccgggagaggagaacagccacctacaatggacctccagccagccccagcctgagccatgaggccacccccctgagccagaccaggagccggggcagcaccaacctcttcagcaagctgaccagcaagctgacccggcggctgcccacagaatatgaaagaaatggccgctatgagggcagcagcagaaatgtgtctgctgagcagaaggatgagaacaaggaggccaagcccaggagcctgcgcttcacctggagcatgaagaccaccagctccatggaccccggggacatgatgagggagatcaggaaggtgctggatgccaacaactgtgactatgagcagcgggagcgcttcctgctcttctgtgtgcatggagatggccatgctgagaacctggtgcagtgggagatggaggtgtgcaagctgccccggctgagcctgaatggagtgcgcttcaagaggatcagcggcaccagcatcgccttcaagaacatcgccagcaagatcgccaatgagctgaagctgtag

SEQ ID NO: 158817 - DNA, 2259 bp, synthetic construct
  misc_feature 1..2259: note = Description of Artificial Sequence: Synthetic coding sequence
  source 1..2259: mol_type = other DNA
atgagcaccaggacccccctgcccaccgtgaatgaaagagacacagagaaccacaccagccatggagatggccggcaggaggtgaccagcaggaccagccgcagcggggcccgctgcaggaacagcatcgccagctgtgctgatgagcagccccacatcggcaactaccgcctgctgaagaccatcggcaagggcaactttgccaaggtgaagctggcccggcacatcctgaccggccgggaggtggccatcaagatcatcgacaagacccagctgaaccccaccagcctgcagaagctgttccgggaggtgcgcatcatgaagatcctgaaccaccccaacatcgtgaagctgtttgaagtcatcgagacagagaagaccctgtacctgatcatggagtatgccagcggcggggaggtgtttgactacctggtggcccacggccgcatgaaggagaaggaggcccggagcaagttccggcagggctgccaggccggccagaccatcaaggtgcaggtgtcctttgacctgctgagcctgatgttcaccttcatcgtgtctgctgtgcagtactgccaccagaagagaattgtgcaccgggacctgaaggccgagaacctgctgctggatgctgacatgaacatcaagattgctgactttggcttcagcaatgagttcaccgtgggcggcaagctggacaccttctgtggcagccccccctatgctgcccctgagctgttccagggcaagaagtatgatggccctgaggtggatgtgtggagcctgggcgtcatcctgtacaccctggtgtctggcagcctgccctttgatggccagaacctgaaggagctgcgggagcgggtgctgcggggcaagtaccgcatccccttctacatgagcacagactgtgagaacctgctgaagcgcttcctggtgctgaaccccatcaagaggggcaccctggagcagatcatgaaggaccgctggatcaatgccggccacgaggaggatgagctgaagccctttgtggagcctgagctggacatcagtgaccagaagagaattgacatcatggtgggcatgggctacagccaggaggagatccaggagagcctgagcaagatgaagtatgatgagatcacagccacctacctgctgctgggcaggaagagcagcgagctggatgccagtgacagcagcagcagcagcaacctgagcctggccaaggtgcggcccagcagtgacctgaacaacagcacaggccagagcccccaccacaaggtgcagaggtctgtgttcagcagccagaagcagaggcgctacagcgaccatgctggccctgccatccccagcgtggtggcctaccccaagaggagccagaccagcacagctgacagcgacctgaaggaggatggcatcagcagcaggaagagcagcggcagcgctgtgggcggcaagggcatcgccccagccagccccatgctgggcaatgccagcaaccccaacaaggctgacatccctgagaggaagaagagcagcacagtgcccagcagcaacacagccagcggcggcatgaccaggaggaacacctacgtgtgcagcgagaggaccacagctgacagacattctgtcatccagaatggcaaggagaacagcaccatcccagaccagaggacccctgtggccagcacccacagcatcagcagcgctgccaccccagaccgcatccgcttcccccggggcacagccagccgcagcaccttccacggccagccccgggagaggagaacagccacctacaatggacctccagccagccccagcctgagccatgaggccacccccctgagccagaccaggagccggggcagcaccaacctcttcagcaagctgaccagcaagctgaccaggagcagaaatgtgtctgctgagcagaaggatgagaacaaggaggccaagcccaggagcctgcgcttcacctggagcatgaagaccaccagctccatggaccccggggacatgatgagggagatcaggaaggtgctggatgccaacaactgtgactatgagcagcgggagcgcttcctgctcttctgtgtgcatggagatggccacgccgagaacctggtgcagtgggagatggaggtgtgcaagctgccccggctgagcctgaatggagtgcgcttcaagaggatcagcggcaccagcatcgccttcaagaacatcgccagcaagatcgccaatgagctgaagctgtag

SEQ ID NO: 158818 - DNA, 2262 bp, synthetic construct
  misc_feature 1..2262: note = Description of Artificial Sequence: Synthetic coding sequence
  source 1..2262: mol_type = other DNA
atgagcaccaggacccccctgcccaccgtgaatgaaagagacacagagaaccacaccagccatggagatggccggcaggaggtgaccagcaggaccagccgcagcggggcccgctgcaggaacagcatcgccagctgtgctgatgagcagccccacatcggcaactaccgcctgctgaagaccatcggcaagggcaactttgccaaggtgaagctggcccggcacatcctgaccggccgggaggtggccatcaagatcatcgacaagacccagctgaaccccaccagcctgcagaagctgttccgggaggtgcgcatcatgaagatcctgaaccaccccaacatcgtgaagctgtttgaagtcatcgagacagagaagaccctgtacctgatcatggagtatgccagcggcggggaggtgtttgactacctggtggcccacggccgcatgaaggagaaggaggcccggagcaagttccggcagatcgtgtctgctgtgcagtactgccaccagaagagaattgtgcaccgggacctgaaggccgagaacctgctgctggatgctgacatgaacatcaagattgctgactttggcttcagcaatgagttcaccgtgggcggcaagctggacaccttctgtggcagccccccctatgctgcccctgagctgttccagggcaagaagtatgatggccctgaggtggatgtgtggagcctgggcgtcatcctgtacaccctggtgtctggcagcctgccctttgatggccagaacctgaaggagctgcgggagcgggtgctgcggggcaagtaccgcatccccttctacatgagcacagactgtgagaacctgctgaagcgcttcctggtgctgaaccccatcaagaggggcaccctggagcagatcatgaaggaccgctggatcaatgccggccatgaagaagatgagctgaagccctttgtggagcctgagctggacatcagtgaccagaagagaattgacatcatggtgggcatgggctacagccaggaggagatccaggagagcctgagcaagatgaagtatgatgagatcacagccacctacctgctgctgggcaggaagagcagcgagctggatgccagtgacagcagcagcagcagcaacctgagcctggccaaggtgcggcccagcagtgacctgaacaacagcacaggccagagcccccaccacaaggtgcagaggagcgtcttcagcagccagaagcagaggcgctacagcgaccacgccggccctgccatccccagcgtggtggcctaccccaagaggagccagaccagcacagctgacagcgacctgaaggaggatggcatcagcagcaggaagagcagcggcagcgctgtgggcggcaaaggaattgccccagccagccccatgctgggcaatgccagcaaccccaacaaggctgacatccctgagaggaagaagagcagcacagtgcccagcagcaacacagccagcggcggcatgaccaggaggaacacctacgtgtgcagcgagaggaccacagctgacagacacagcgtcatccagaatggcaaggagaacagcaccatcccagaccagaggacccctgtggccagcacccacagcatcagcagcgctgccaccccagaccgcatccgcttcccccggggcacagccagccgcagcaccttccacggccagccccgggagaggagaacagccacctacaacggccccccagccagccccagcctgagccatgaggccacccccctgagccagaccaggagccggggcagcaccaacctcttcagcaagctgaccagcaagctgaccaggaggaacatgtccttccgcttcatcaagaggctgcccacagaatatgaaagaaatggccgctatgagggcagcagcagaaatgtgtctgctgagcagaaggatgagaacaaggaggccaagcccaggagcctgcgcttcacctggagcatgaagaccaccagctccatggaccccggggacatgatgagggagatcaggaaggtgctggatgccaacaactgtgactatgagcagcgggagcgcttcctgctcttctgtgtgcatggagatggccatgctgagaacctggtgcagtgggagatggaggtgtgcaagctgccccggctgagcctgaatggagtgcgcttcaagaggatcagcggcaccagcatcgccttcaagaacatcgccagcaagatcgccaatgagctgaagctgtag

SEQ ID NO: 158819 - DNA, 1980 bp, synthetic construct
  misc_feature 1..1980: note = Description of Artificial Sequence: Synthetic coding sequence
  source 1..1980: mol_type = other DNA
atgagcaccaggacccccctgcccaccgtgaatgaaagagacacagagaaccacaccagccatggagatggccggcaggaggtgaccagcaggaccagccgcagcggggcccgctgcaggaacagcatcgccagctgtgctgatgagcagccccacatcggcaactaccgcctgctgaagaccatcggcaagggcaactttgccaaggtgaagctggcccggcacatcctgaccggccgggaggtggccatcaagatcatcgacaagacccagctgaaccccaccagcctgcagaagctgttccgggaggtgcgcatcatgaagatcctgaaccaccccaacatcgtgaagctgtttgaagtcatcgagacagagaagaccctgtacctgatcatggagtatgccagcggcggggaggtgtttgactacctggtggcccacggccgcatgaaggagaaggaggcccggagcaagttccggcagatcgtgtctgctgtgcagtactgccaccagaagagaattgtgcaccgggacctgaaggagctgcgggagcgggtgctgcggggcaagtaccgcatccccttctacatgagcacagactgtgagaacctgctgaagcgcttcctggtgctgaaccccatcaagaggggcaccctggagcagatcatgaaggaccgctggatcaatgccggccacgaggaggatgagctgaagccctttgtggagcctgagctggacatcagtgaccagaagagaattgacatcatggtgggcatgggctacagccaggaggagatccaggagagcctgagcaagatgaagtatgatgagatcacagccacctacctgctgctgggcaggaagagcagcgagctggatgccagtgacagcagcagcagcagcaacctgagcctggccaaggtgcggcccagcagtgacctgaacaacagcacaggccagagcccccaccacaaggtgcagaggtctgtgttcagcagccagaagcagaggcgctacagcgaccatgctggccctgccatccccagcgtggtggcctaccccaagaggagccagaccagcacagctgacagcgacctgaaggaggatggcatcagcagcaggaagagcagcggcagcgctgtgggcggcaagggcatcgccccagccagccccatgctgggcaatgccagcaaccccaacaaggctgacatccctgagaggaagaagagcagcacagtgcccagcagcaacacagccagcggcggcatgaccaggaggaacacctacgtgtgcagcgagaggaccacagctgacagacattctgtcatccagaatggcaaggagaacagcaccatcccagaccagaggacccctgtggccagcacccacagcatcagcagcgctgccaccccagaccgcatccgcttcccccggggcacagccagccgcagcaccttccacggccagccccgggagaggagaacagccacctacaatggacctccagccagccccagcctgagccatgaggccacccccctgagccagaccaggagccggggcagcaccaacctcttcagcaagctgaccagcaagctgaccaggaggaacatgtccttccgcttcatcaagagcagaaatgtgtctgctgagcagaaggatgagaacaaggaggccaagcccaggagcctgcgcttcacctggagcatgaagaccaccagctccatggaccccggggacatgatgagggagatcaggaaggtgctggatgccaacaactgtgactatgagcagcgggagcgcttcctgctcttctgtgtgcatggagatggccatgctgagaacctggtgcagtgggagatggaggtgtgcaagctgccccggctgagcctgaatggagtgcgcttcaagaggatcagcggcaccagcatcgccttcaagaacatcgccagcaagatcgccaatgagctgaagctgtag

SEQ ID NO: 158820 - DNA, 2235 bp, synthetic construct
  misc_feature 1..2235: note = Description of Artificial Sequence: Synthetic coding sequence
  source 1..2235: mol_type = other DNA
atgagcaccaggacccccctgcccaccgtgaatgaaagagacacagagaaccacaccagccatggagatggccggcaggaggtgaccagcaggaccagccgcagcggggcccgctgcaggaacagcatcgccagctgtgctgatgagcagccccacatcggcaactaccgcctgctgaagaccatcggcaagggcaactttgccaaggtgaagctggcccggcacatcctgaccggccgggaggtggccatcaagatcatcgacaagacccagctgaaccccaccagcctgcagaagctgttccgggaggtgcgcatcatgaagatcctgaaccaccccaacatcgtgaagctgtttgaagtcatcgagacagagaagaccctgtacctgatcatggagtatgccagcggcggggaggtgtttgactacctggtggcccacggccgcatgaaggagaaggaggcccggagcaagttccggcagatcgtgtctgctgtgcagtactgccaccagaagagaattgtgcaccgggacctgaaggccgagaacctgctgctggatgctgacatgaacatcaagattgctgactttggcttcagcaatgagttcaccgtgggcggcaagctggacaccttctgtggcagccccccctatgctgcccctgagctgttccagggcaagaagtatgatggccctgaggtggatgtgtggagcctgggcgtcatcctgtacaccctggtgtctggcagcctgccctttgatggccagaacctgaaggagctgcgggagcgggtgctgcggggcaagtaccgcatccccttctacatgagcacagactgtgagaacctgctgaagcgcttcctggtgctgaaccccatcaagaggggcaccctggagcagatcatgaaggaccgctggatcaatgccggccatgaagaagatgagctgaagccctttgtggagcctgagctggacatcagtgaccagaagagaattgacatcatggtgggcatgggctacagccaggaggagatccaggagagcctgagcaagatgaagtatgatgagatcacagccacctacctgctgctgggcaggaagagcagcgagctggatgccagtgacagcagcagcagcagcaacctgagcctggccaaggtgcggcccagcagtgacctgaacaacagcacaggccagagcccccaccacaaggtgcagaggagcgtcttcagcagccagaagcagaggcgctacagcgaccacgccggccctgccatccccagcgtggtggcctaccccaagaggagccagaccagcacagctgacagcgacctgaaggaggatggcatcagcagcaggaagagcagcggcagcgctgtgggcggcaaaggaattgccccagccagccccatgctgggcaatgccagcaaccccaacaaggctgacatccctgagaggaagaagagcagcacagtgcccagcagcaacacagccagcggcggcatgaccaggaggaacacctacgtgtgcagcgagaggaccacagctgacagacacagcgtcatccagaatggcaaggagaacagcaccatcccagaccagaggacccctgtggccagcacccacagcatcagcagcgctgccaccccagaccgcatccgcttcccccggggcacagccagccgcagcaccttccacggccagccccgggagaggagaacagccacctacaacggccccccagccagccccagcctgagccatgaggccacccccctgagccagaccaggagccggggcagcaccaacctcttcagcaagctgaccagcaagctgacccggcggctgcccacagaatatgaaagaaatggccgctatgagggcagcagcagaaatgtgtctgctgagcagaaggatgagaacaaggaggccaagcccaggagcctgcgcttcacctggagcatgaagaccaccagctccatggaccccggggacatgatgagggagatcaggaaggtgctggatgccaacaactgtgactatgagcagcgggagcgcttcctgctcttctgtgtgcatggagatggccacgccgagaacctggtgcagtgggagatggaggtgtgcaagctgccccggctgagcctgaatggagtgcgcttcaagaggatcagcggcaccagcatcgccttcaagaacatcgccagcaagatcgccaatgagctgaagctgtag

SEQ ID NO: 158821 - DNA, 1518 bp, synthetic construct
  misc_feature 1..1518: note = Description of Artificial Sequence: Synthetic coding sequence
  source 1..1518: mol_type = other DNA
tgagtggatgtgtggagcctgggcgtcatcctgtacaccctggtgtctggcagcctgccctttgatggccagaacctgaaggagctgcgggagcgggtgctgcggggcaagtaccgcatccccttctacatgagcacagactgtgagaacctgctgaagcgcttcctggtgctgaaccccatcaagaggggcaccctggagcagatcatgaaggaccgctggatcaatgccggccatgaagaagatgagctgaagccctttgtggagcctgagctggacatcagtgaccagaagagaattgacatcatggtgggcatgggctacagccaggaggagatccaggagagcctgagcaagatgaagtatgatgagatcacagccacctacctgctgctgggcaggaagagcagcgaggtgcggcccagcagtgacctgaacaacagcacaggccagagcccccaccacaaggtgcagaggagcgtcttcagcagccagaagcagaggcgctacagcgaccacgccggccctgccatccccagcgtggtggcctaccccaagaggagccagaccagcacagctgacagcgacctgaaggaggatggcatcagcagcaggaagagcagcggcagcgctgtgggcggcaaaggaattgccccagccagccccatgctgggcaatgccagcaaccccaacaaggctgacatccctgagaggaagaagagcagcacagtgcccagcagcaacacagccagcggcggcatgaccaggaggaacacctacgtgtgcagcgagaggaccacagctgacagacacagcgtcatccagaatggcaaggagaacagcaccatcccagaccagaggacccctgtggccagcacccacagcatcagcagcgctgccaccccagaccgcatccgcttcccccggggcacagccagccgcagcaccttccacggccagccccgggagaggagaacagccacctacaacggccccccagccagccccagcctgagccatgaggccacccccctgagccagaccaggagccggggcagcaccaacctcttcagcaagctgaccagcaagctgaccaggaggaacatgtccttccgcttcatcaagaggctgcccacagaatatgaaagaaatggccgctatgagggcagcagcagaaatgtgtctgctgagcagaaggatgagaacaaggaggccaagcccaggagcctgcgcttcacctggagcatgaagaccaccagctccatggaccccggggacatgatgagggagatcaggaaggtgctggatgccaacaactgtgactatgagcagcgggagcgcttcctgctcttctgtgtgcatggagatggccatgctgagaacctggtgcagtgggagatggaggtgtgcaagctgccccggctgagcctgaatggagtgcgcttcaagaggatcagcggcaccagcatcgccttcaagaacatcgccagcaagatcgccaatgagctgaagctgtag

SEQ ID NO: 158822 - DNA, 2259 bp, synthetic construct
  misc_feature 1..2259: note = Description of Artificial Sequence: Synthetic coding sequence
  source 1..2259: mol_type = other DNA
atgagcagcaggacagtgctggcccctggaaatgacaggaacagcgacacccacggcaccctgggcagcggccgcagcagtgacaagggccccagctggagcagccgcagcctgggcgcccgctgcagaaattccatcgccagctgcccagaggagcagccccacgtgggcaactaccgcctgctgcggaccatcggcaaaggaaactttgccaaggtgaagctggcccggcacatcctgaccggccgggaggtggccatcaagatcatcgacaagacccagctgaaccccagcagcctgcagaagctgttccgggaggtgcgcatcatgaagggcctgaaccaccccaacatcgtgaagctgtttgaggtgattgaaacagagaagaccctgtacctggtgatggagtatgccagcgctggggaggtgtttgactacctggtgagccacggccgcatgaaggagaaggaggcccgggccaagttccggcagatcgtgtctgctgtgcactactgccaccagaagaacatcgtgcaccgggacctgaaggccgagaacctgctgctggatgctgaggccaacatcaagattgctgactttggcttcagcaatgagttcaccctgggcagcaagctggacaccttctgtggcagccccccctatgctgcccctgagctgttccagggcaagaagtatgatggccctgaggtggacatctggagcctgggcgtcatcctgtacaccctggtgtctggcagcctgccctttgatggccacaacctgaaggagctgcgggagcgggtgctgcggggcaagtacagagtgcccttctacatgagcacagactgtgagagcatcctgcggcgcttcctggtgctgaacccagccaagcgctgcaccctggagcagatcatgaaggacaagtggatcaacatcggctatgaaggagaggagctgaagccctacacagagccagaagaagattttggagacaccaagagaattgaggtgatggtgggcatgggctacacccgggaggagatcaaggagagcctgaccagccagaagtacaatgaggtgacagccacctacctgctgctgggcaggaagacagaggagggcggggacagaggagcccctggcctggccctggcccgggtgcgggcccccagcgacaccaccaacggcaccagcagcagcaagggcaccagccacagcaagggccagaggagcagcagcagcacctaccaccggcagaggaggcacagcgacttctgtggccccagccctgcccccctgcaccccaagaggagccccaccagcactggagaggccgagctgaaggaggagcggctgcccggcaggaaggccagctgcagcacagctggcagcggcagccggggcctgccccccagcagccccatggtgagcagcgcccacaaccccaacaaggccgagatccctgagaggaggaaggacagcaccagcacccccaacaacctgccccccagcatgatgaccaggaggaacacctacgtgtgcacagagaggcctggagctgagcggcccagcctgctgcccaacgggaaggagaacagcagcggcaccccccgggtgcccccagccagccccagcagccacagcctggcccctccttctggagagaggagccggctggcccggggcagcaccatccgcagcaccttccacggcggccaggtgcgggacagaagagctgggggcggcggcggcggcggcgtgcagaatggacctccagccagccccaccctggcccatgaagctgcccccctgcctgctggccggccccggcccaccaccaacctcttcaccaagctgaccagcaagctgaccaggagagtggctgatgagcctgagcgcatcggcggccctgaggtgaccagctgccacctgccctgggaccagacagaaacagccccccggctgctgcgcttcccctggagcgtgaagctgaccagcagcaggcctcctgaggccctgatggccgccctgcggcaggccacagctgctgcccgctgccgctgccggcagccccagcccttcctgctggcctgcctgcacggcggggccggcggccctgagcccctgagccactttgaggtggaggtgtgccagctgccccggcccggcctgcggggcgtgctcttccggcgggtggccggcacagccctggccttccgcaccctggtgacccgcatcagcaatgacctggagctgtag

SEQ ID NO: 158823 - DNA, 1389 bp, synthetic construct
  misc_feature 1..1389: note = Description of Artificial Sequence: Synthetic coding sequence
  source 1..1389: mol_type = other DNA
atgagcagcaggacagtgctggcccctggaaatgacaggaacagcgacacccacggcaccctgggcagcggccgcagcagtgacaagggccccagctggagcagccgcagcctgggcgcccgctgcagaaattccatcgccagctgcccagaggagcagccccacgtgggcaactaccgcctgctgcggaccatcggcaaaggaaactttgccaaggtgaagctggcccggcacatcctgaccggccgggaggtggccatcaagatcatcgacaagacccagctgaaccccagcagcctgcagaagctgttccgggaggtgcgcatcatgaagggcctgaaccaccccaacatcgtgaagctgtttgaggtgattgaaacagagaagaccctgtacctggtgatggagtatgccagcgctggggagccccccaccctgagcgccctgcccctgtgccacctgcccctgcccctgcacctgaccctgacccccctgggcctgtgcccagctggggaggtgtttgactacctggtgagccacggccgcatgaaggagaaggaggcccgggccaagttccggcagatcgtgtctgctgtgcactactgccaccagaagaacatcgtgcaccgggacctgaaggccgagaacctgctgctggatgctgaggccaacatcaagattgctgactttggcttcagcaatgagttcaccctgggcagcaagctggacaccttctgtggcagccccccctatgctgcccctgagctgttccagggcaagaagtatgatggccctgaggtggacatctggagcctgggcgtcatcctgtacaccctggtgtctggcagcctgccctttgatggccacaacctgaaggagctgcgggagcgggtgctgcggggcaagtacagagtgcccttctacatgagcacagactgtgagagcatcctgcggcgcttcctggtgctgaacccagccaagcgctgcaccctggagcagatcatgaaggacaagtggatcaacatcggctatgaaggagaggagctgaagccctacacagagccagaagaagattttggagacaccaagagaattgaggtgatggtgggcatgggctacacccgggaggagatcaaggagagcctgaccagccagaagtacaatgaggtgacagccacctacctgctgctgggcaggaagacagagccagatgagcacggcggcggcggcgctgagggcggggccgccgcccggcctgagggggagctgcagcacagaggagagtgggagagcagagctgcccccctgcagccccacggccagcagaggccccagccccagcagggccgggaccccagggctgctgagggccagcacgagcacccctag

SEQ ID NO: 158824 - DNA, 2067 bp, synthetic construct
  misc_feature 1..2067: note = Description of Artificial Sequence: Synthetic coding sequence
  source 1..2067: mol_type = other DNA
atgagcagcaggacagtgctggcccctggaaatgacaggaacagcgacacccacggcaccctgggcagcggccgcagcagtgacaagggccccagctggagcagccgcagcctgggcgcccgctgcagaaattccatcgccagctgcccagaggagcagccccacgtgggcaactaccgcctgctgcggaccatcggcaaaggaaactttgccaaggtgaagctggcccggcacatcctgaccggccgggaggtggccatcaagatcatcgacaagacccagctgaaccccagcagcctgcagaagctgttccgggaggtgcgcatcatgaagggcctgaaccaccccaacatcgtgaagctgtttgaggtgattgaaacagagaagaccctgtacctggtgatggagtatgccagcgctggggaggtgtttgactacctggtgagccacggccgcatgaaggagaaggaggcccgggccaagttccggcagatcgtgtctgctgtgcactactgccaccagaagaacatcgtgcaccgggacctgaaggccgagaacctgctgctggatgctgaggccaacatcaagattgctgactttggcttcagcaatgagttcaccctgggcagcaagctggacaccttctgtggcagccccccctatgctgcccctgagctgttccagggcaagaagtatgatggccctgaggtggacatctggagcctgggcgtcatcctgtacaccctggtgtctggcagcctgccctttgatggccacaacctgaaggagctgcgggagcgggtgctgcggggcaagtacagagtgcccttctacatgagcacagactgtgagagcatcctgcggcgcttcctggtgctgaacccagccaagcgctgcaccctggagcagatcatgaaggacaagtggatcaacatcggctatgaaggagaggagctgaagccctacacagagccagaagaagattttggagacaccaagagaattgaggtgatggtgggcatgggctacacccgggaggagatcaaggagagcctgaccagccagaagtacaatgaggtgacagccacctacctgctgctgggcaggaagacagaggagggcggggacagaggagcccctggcctggccctggcccgggtgcgggcccccagcgacaccaccaacggcaccagcagcagcaagggcaccagccacagcaagggccagaggagcagcagcagcacctaccaccggcagaggaggcacagcgacttctgtggccccagccctgcccccctgcaccccaagaggagccccaccagcactggagaggccgagctgaaggaggagcggctgcccggcaggaaggccagctgcagcacagctggcagcggcagccggggcctgccccccagcagccccatggtgagcagcgcccacaaccccaacaaggccgagatccctgagaggaggaaggacagcaccagcacccccaacaacctgccccccagcatgatgaccaggaggaacacctacgtgtgcacagagaggcctggagctgagcggcccagcctgctgcccaacgggaaggagaacagcagcggcaccccccgggtgcccccagccagccccagcagccacagcctggcccctccttctggagagaggagccggctggcccggggcagcaccatccgcagcaccttccacggcggccaggtgcgggacagaagagctgggggcggcggcggcggcggcgtgcagaatggacctccagccagccccaccctggcccatgaagctgcccccctgcctgctggccggccccggcccaccaccaacctcttcaccaagctgaccagcaagctgaccaggagagtgaccctggaccccagcaagaggcagaacagcaacagatgtgtgtctggggccagcctgccccagggcagcaagatccgcagccagaccaacctgcgggagagcggggacctgcggagccaggtggccatctacctgggcatcaagaggaagcccccacctggctgcagcgacagccctggggtgtag

SEQ ID NO: 158825 - DNA, 240 bp, synthetic construct
  misc_feature 1..240: note = Description of Artificial Sequence: Synthetic coding sequence
  source 1..240: mol_type = other DNA
atggccgccctgcggcaggccacagctgctgcccgctgccgctgccggcagccccagcccttcctgctggcctgcctgcatggaggagctgggggccctgagcccctgagccactttgaggtggaggtgtgccagctgcccaggcctggcctgcggggcgtgctcttcagaagagtggccggcacagccctggccttccgcaccctggtgacccgcatcagcaatgacctggagctgtag

SEQ ID NO: 158826 - DNA, 1032 bp, synthetic construct
  misc_feature 1..1032: note = Description of Artificial Sequence: Synthetic coding sequence
  source 1..1032: mol_type = other DNA
atggctgctgccacagagctgaaccggcccagcagcggggacaggaacctggagcggcgctgccggcccaacctgagccgggaggtgctgtatgagatcttccgcagcctgcacaccctggtgggccagctggacctgagagatgatgtggtgaagatcaccatcgactggaacaagctgcagagcctgagcgccttccagcctgccctgctcttcagcgccctggagcagcacatcctgtacctgcagcccttcctggccaagctgcagagccccatcaaggaggagaacaccacagctgtggaggagatcggccgcacagagatgggcaacaagaatgaggtgaatgacaagttcagcattggagacctgcaggaggaggagaagcacaaggagagtgacctgagagatgtgaagaagacccagatccactttgatcctgaggtggtgcagatcaaggccggcaaggccgagattgaccggcgcatcagcgccttcattgaaaggaagcaggccgagatcaatgaaaacaacgtgcgggagttctgcaacgtcatcgactgcaaccaggagaacagctgtgccaggacagatgccatcttcaccccctacccaggcttcaagagccacgtgaaggtgtcccgggtggtgaacacctacggcccccagaccaggcctgagggcatccctggcagcggccacaagcccaacagcatgctgcgggactgtggcaaccaggccgtggaggagcggctgcagaacatcgaggcccacctgcggctgcagacaggaggccctgtgccccgggacatctaccagaggatcaagaagctggaggacaagatcctggagctggagggcatcagccctgagtacttccagagcgtgtccttcagcggcaagaggaggaaggtgcagcccccccagaactacagcctggccgagctggatgagaagatcagcgccctgaagcaggccctgctgaggaagagccgggaggccgagagcatggccacccaccacctgccctag

SEQ ID NO: 158827 - DNA, 1035 bp, synthetic construct
  misc_feature 1..1035: note = Description of Artificial Sequence: Synthetic coding sequence
  source 1..1035: mol_type = other DNA
atggctgctgccacagagctgaaccggcccagcagcggggacaggaacctggagcggcgctgccggcccaacctgagccgggaggtgctgtatgagatcttccgcagcctgcacaccctggtgggccagctggacctgagagatgatgtggtgaagatcaccatcgactggaacaagctgcagagcctgagcgccttccagcctgccctgctcttcagcgccctggagcagcacatcctgtacctgcagcccttcctggccaagctgcagagccccatcaaggaggagaacaccacagctgtggaggagatcggccgcacagagatgggcaacaagaatgaggtgaatgacaagttcagcattggagacctgcaggaggaggagaagcacaaggagagtgacctgagagatgtgaagaagacccagatccactttgatcctgaggtggtgcagatcaaggccggcaaggccgagattgaccggcgcatcagcgccttcattgaaaggaagcaggccgagatcaatgaaaacaacgtgcgggagttctgcaacgtcatcgactgcaaccaggagaacagctgtgccaggacagatgccatcttcaccccctacccaggcttcaagagccacgtgaaggtgtcccgggtggtgaacacctacggcccccagaccaggcctgagggcatccctggcagcggccacaagcccaacagcatgctgcgggactgtggcaaccaggccgtggaggagcggctgcagaacatcgaggcccacctgcggctgcagacaggaggccctgtgccccgggacatctaccagaggatcaagaagctggaggacaagatcctggagctggagggcatcagccctgagtacttccagagcgtgtccttcagcggcaagaggaggaaggtgcagcccccccagcagaactacagcctggccgagctggatgagaagatcagcgccctgaagcaggccctgctgaggaagagccgggaggccgagagcatggccacccaccacctgccctag

SEQ ID NO: 158828 - DNA, 4944 bp, synthetic construct
  misc_feature 1..4944: note = Description of Artificial Sequence: Synthetic coding sequence
  source 1..4944: mol_type = other DNA
atggtgcagaagaagaagttctgcccccggctgctggactacctggtgattgtgggcgcccggcaccccagcagtgacagcgtggcccagaccccagagctgctgcggcgctaccccctggaggaccacacagagttccccctgcccccagatgtggtgttcttctgccagcctgagggctgcctgtctgtgcggcagaggaggatgagcctgagagatgacaccagctttgtgttcaccctgacagacaaggacaccggggtgaccaggtatggcatctgtgtgaacttctaccgctccttccagaagaggatcagcaaggagaagggggagggcggggccggcagccggggcaaggagggcacccacgccacctgtgccagcgaggagggcggcacagagagcagcgagagcggcagcagcctgcagcccctgtctgctgacagcaccccagatgtgaaccagagcccccggggcaagagaagagccaaggccggcagccgcagcaggaacagcaccctgaccagcctgtgtgtgctgagccactaccccttcttcagcaccttcagagaatgtctgtacaccctgaagaggctggtggactgctgcagcgagcggctgctgggcaagaagctgggcatcccccggggcgtgcagagggacaccatgtggaggatcttcaccggcagcctgctggtggaggagaagagcagcgccctgctgcatgacctgcgggagattgaggcctggatctaccgcctgctgcggagccctgtgcctgtgtctggccagaagagggtggacatcgaggtgctgccccaggagctgcagcctgccctgacctttgccctgcctgaccccagccgcttcaccctggtggacttccccctgcacctgcccctggagctgctgggcgtggatgcctgcctgcaggtgctgacctgcatcctgctggagcacaaggtggtgctgcagagccgggactacaatgccctgtccatgtctgtgatggcctttgtggccatgatctaccccctggagtacatgtttcctgtgatccccctgctgcccacctgcatggccagcgctgagcagctgctgctggcccccaccccctacatcattggagtgcctgccagcttcttcctgtacaagctggacttcaagatgccagatgatgtgtggctggtggacctggacagcaacagagtgattgcccccaccaatgctgaggtgctgcccatcctgcctgagcctgagagcctggagctgaagaagcacctgaagcaggccctggcctccatgagcctgaacacccagcccatcctgaacctggagaagttccacgagggccaggagatccccctgctgctgggccggcccagcaatgacctgcagagcacccccagcacagagttcaaccccctcatctatggaaatgatgtggacagcgtggatgtggccaccagggtggccatggtgcgcttcttcaacagcgccaacgtgctgcagggcttccagatgcacaccaggaccctgcggctcttccccaggcctgtggtggccttccaggccggcagcttcctggccagccggccccggcagaccccatttgctgagaagctggcccggacccaggccgtggagtactttggagagtggatcctgaaccccaccaactatgccttccagaggatccacaacaacatgtttgatcctgccctgattggagacaagcccaagtggtacgcccaccagctgcagcccatccactacagagtgtatgacagcaacagccagctggccgaggccctgtctgtgcccccagagcgggacagcgacagcgagcccacagatgattctggcagtgacagcatggactatgatgacagcagcagcagctacagcagcctgggggactttgtgtctgagatgatgaagtgtgacatcaatggagacacccccaacgtggaccccctgacccatgctgccctgggagatgccagcgaggtggagattgatgagctgcagaaccagaaggaggccgaggagcccggcccagattctgagaacagccaggagaacccccccctgcggagcagcagcagcaccacagccagcagcagccccagcaccgtcatccatggagccaacagcgagcctgctgacagcacagagatggatgacaaggctgctgtgggcgtgtccaagcccctgcccagcgtgcccccatccatcggcaagagcaatgtggaccggcggcaggccgagatcggggagggctctgtgagaagacgcatctatgacaacccctactttgagccccagtatggcttccccccagaagaagatgaagatgagcagggcgagagctacaccccccgcttcagccagcacgtgtctggcaacagagcccagaagctgctgcggcccaacagcctgcggctggccagtgacagtgatgctgagagtgacagccgggccagcagccccaacagcacagtgagcaacaccagcacagagggctttggaggcatcatgagctttgccagcagcctgtacagaaaccacagcaccagcttcagcctgagcaacctgaccctgcccaccaagggggcccgggagaaggccacccccttccccagcctgaaggtgtttggcctgaacaccctgatggagatcgtgacagaggccggccctggcagcggggagggcaacagaagagccctggtggaccagaagagcagcgtcatcaagcacagccccaccgtgaagcgggagccccccagcccccagggccgcagcagcaacagcagcgagaaccagcagttcctgaaggaggtggtgcacagcgtgctggatggccagggcgtgggctggctgaacatgaagaaggtgcggcggctgctggagagcgagcagctgcgggtgtttgtgctgagcaagctgaacaggatggtgcagagtgaagatgatgcccggcaggacatcatcccagatgtggagatcagcaggaaggtgtacaagggcatgctggacctgctgaagtgcaccgtgctgagcctggagcagagctatgcccatgctggcctgggcggcatggccagcatcttcggcctgctggagatcgcccagacccactactacagcaaggagccagacaagaggaagaggagccccacagaatctgtgaacacccctgtgggcaaggaccccggcctggccggccgcggggaccccaaggccatggcccagctgcgggtgccccagctgggcccccgggcccccagcgccaccgggaagggccccaaggagctggacaccaggagcctgaaggaggagaacttcatcgccagcattgagctgtggaacaagcaccaggaggtgaagaagcagaaggccctggagaagcagaggcctgaggtgatcaagcctgtgtttgacctgggggagacagaggagaagaagagccagatctctgctgacagcggcgtgtccctgaccagcagcagccagaggacagaccaggacagcgtcatcggcgtgtccccagctgtgatgatccgcagcagcagccaggacagcgaggtgtccacagtggtgagcaacagcagtggagagaccctgggcgctgacagcgacctgagcagcaatgctggagatggccctggaggagagggctctgtgcacctggccagcagccggggcaccctgagtgacagcgagattgagaccaacagcgccaccagcaccatctttgggaaggcccacagcctgaagcccagcatcaaggagaagctggccggcagccccatccgcaccagtgaagatgtgtcccagagggtgtacctgtatgagggcctgctgggccgggacaagggctccatgtgggaccagctggaggatgctgccatggagaccttcagcatcagcaaggagaggagcaccctgtgggaccagatgcagttctgggaggatgccttcctggatgctgtgatgctggagcgggagggcatgggcatggaccagggcccccaggagatgattgaccgctacctgagcctgggggagcatgacaggaagaggctggaggatgatgaagatcggctgctggccaccctgctgcacaacctgatctcctacatgctgctgatgaaggtgaacaagaatgacatcaggaagaaggtgcggcggctgatgggcaagagccacatcggcctggtgtacagccagcagatcaatgaggtgctggaccagctggccaacctgaatggccgggacctgagcatctggagcagcggcagccgccacatgaagaagcagacctttgtggtgcatgctggaacagacaccaacggggacatcttcttcatggaggtgtgtgatgactgtgtggtgctgcggagcaacattggaacagtgtatgagcgctggtggtatgagaagctgatcaacatgacctactgccccaagaccaaggtgctgtgcctgtggaggagaaatggaagtgagacccagctgaacaagttctacaccaagaagtgccgggagctgtactactgtgtgaaggacagcatggagagagctgctgcccggcagcagagcatcaagccaggccctgagctgggcggggagttccctgtgcaggacctgaagacaggagagggcggcctgctgcaggtgaccctggagggcatcaacctgaagttcatgcacaaccaggtgttcatcgagctgaaccacatcaagaagtgcaacacagtgcggggcgtgtttgtgctggaggagtttgtgcctgagatcaaggaggtggtgagccacaagtacaagacccccatggcccacgagatctgctacagcgtgctgtgcctcttctcctatgtggccgctgtgcacagcagcgaggaggacctgcggaccccacccaggcctgtgagcagctag

SEQ ID NO: 158829 - DNA, 4767 bp, synthetic construct
  misc_feature 1..4767: note = Description of Artificial Sequence: Synthetic coding sequence
  source 1..4767: mol_type = other DNA
atggtgcagaagaagaagttctgcccccggctgctggactacctggtgattgtgggcgcccggcaccccagcagtgacagcgtggcccagaccccagagctgctgcggcgctaccccctggaggaccacacagagttccccctgcccccagatgtggtgttcttctgccagcctgagggctgcctgtctgtgcggcagaggaggatgagcctgagagatgacaccagctttgtgttcaccctgacagacaaggacaccggggtgaccaggtatggcatctgtgtgaacttctaccgctccttccagaagaggatcagcaaggagaagggggagggcggggccggcagccggggcaaggagggcacccacgccacctgtgccagcgaggagggcggcacagagagcagcgagagcggcagcagcctgcagcccctgtctgctgacagcaccccagatgtgaaccagagcccccggggcaagagaagagccaaggccggcagccgcagcaggaacagcaccctgaccagcctgtgtgtgctgagccactaccccttcttcagcaccttcagagaatgtctgtacaccctgaagaggctggtggactgctgcagcgagcggctgctgggcaagaagctgggcatcccccggggcgtgcagagggacaccatgtggaggatcttcaccggcagcctgctggtggaggagaagagcagcgccctgctgcatgacctgcgggagattgaggcctggatctaccgcctgctgcggagccctgtgcctgtgtctggccagaagagggtggacatcgaggtgctgccccaggagctgcagcctgccctgacctttgccctgcctgaccccagccgcttcaccctggtggacttccccctgcacctgcccctggagctgctgggcgtggatgcctgcctgcaggtgctgacctgcatcctgctggagcacaaggtggtgctgcagagccgggactacaatgccctgtccatgtctgtgatggcctttgtggccatgatctaccccctggagtacatgtttcctgtgatccccctgctgcccacctgcatggccagcgctgagcagctgctgctggcccccaccccctacatcattggagtgcctgccagcttcttcctgtacaagctggacttcaagatgccagatgatgtgtggctggtggacctggacagcaacagagtgattgcccccaccaatgctgaggtgctgcccatcctgcctgagcctgagagcctggagctgaagaagcacctgaagcaggccctggcctccatgagcctgaacacccagcccatcctgaacctggagaagttccacgagggccaggagatccccctgctgctgggccggcccagcaatgacctgcagagcacccccagcacagagttcaaccccctcatctatggaaatgatgtggacagcgtggatgtggccaccagggtggccatggtgcgcttcttcaacagcgccaacgtgctgcagggcttccagatgcacaccaggaccctgcggctcttccccaggcctgtggtggccttccaggccggcagcttcctggccagccggccccggcagaccccatttgctgagaagctggcccggacccaggccgtggagtactttggagagtggatcctgaaccccaccaactatgccttccagaggatccacaacaacatgtttgatcctgccctgattggagacaagcccaagtggtacgcccaccagctgcagcccatccactacagagtgtatgacagcaacagccagctggccgaggccctgtctgtgcccccagagcgggacagcgacagcgagcccacagatgattctggcagtgacagcatggactatgatgacagcagcagcagctacagcagcctgggggactttgtgtctgagatgatgaagtgtgacatcaatggagacacccccaacgtggaccccctgacccatgctgccctgggagatgccagcgaggtggagattgatgagctgcagaaccagaaggaggccgaggagcccggcccagattctgagaacagccaggagaacccccccctgcggagcagcagcagcaccacagccagcagcagccccagcaccgtcatccatggagccaacagcgagcctgctgacagcacagagatggatgacaaggctgctgtgggcgtgtccaagcccctgcccagcgtgcccccatccatcggcaagagcaatgtggaccggcggcaggccgagatcggggagggctctgtgagaagacgcatctatgacaacccctactttgagccccagtatggcttccccccagaagaagatgaagatgagcagggcgagagctacaccccccgcttcagccagcacgtgtctggcaacagagcccagaagctgctgcggcccaacagcctgcggctggccagtgacagtgatgctgagagtgacagccgggccagcagccccaacagcacagtgagcaacaccagcacagagggctttggaggcatcatgagctttgccagcagcctgtacagaaaccacagcaccagcttcagcctgagcaacctgaccctgcccaccaagggggcccgggagaaggccacccccttccccagcctgaagggcaacagaagagccctggtggaccagaagagcagcgtcatcaagcacagccccaccgtgaagcgggagccccccagcccccagggccgcagcagcaacagcagcgagaaccagcagttcctgaaggaggtggtgcacagcgtgctggatggccagggcgtgggctggctgaacatgaagaaggtgcggcggctgctggagagcgagcagctgcgggtgtttgtgctgagcaagctgaacaggatggtgcagagtgaagatgatgcccggcaggacatcatcccagatgtggagatcagcaggaaggtgtacaagggcatgctggacctgctgaagtgcaccgtgctgagcctggagcagagctatgcccatgctggcctgggcggcatggccagcatcttcggcctgctggagatcgcccagacccactactacagcaaggagccagacaagaggaagaggagccccacagaatctgtgaacacccctgtgggcaaggaccccggcctggccggccgcggggaccccaaggccatggcccagctgcgggtgccccagctgggcccccgggcccccagcgccaccgggaagggccccaaggagctggacaccaggagcctgaaggaggagaacttcatcgccagcatcggccctgaggtgatcaagcctgtgtttgacctgggggagacagaggagaagaagagccagatctctgctgacagcggcgtgtccctgaccagcagcagccagaggacagaccaggacagcgtcatcggcgtgtccccagctgtgatgatccgcagcagcagccaggacagcgaggtgtccacagtggtgagcaacagcagtggagagaccctgggcgctgacagcgacctgagcagcaatgctggagatggccctggaggagagggctctgtgcacctggccagcagccggggcaccctgagtgacagcgagattgagaccaacagcgccaccagcaccatctttgggaaggcccacagcctgaagcccagcatcaaggagaagctggccggcagccccatccgcaccagtgaagatgtgtcccagagggtgtacctgtatgagggcctgctgggcaaggagaggagcaccctgtgggaccagatgcagttctgggaggatgccttcctggatgctgtgatgctggagcgggagggcatgggcatggaccagggcccccaggagatgattgaccgctacctgagcctgggggagcatgacaggaagaggctggaggatgatgaggaccggctgctggccaccctgctgcacaacctgatctcctacatgctgctgatgaaggtgaacaagaatgacatcaggaagaaggtgcggcggctgatgggcaagagccacatcggcctggtgtacagccagcagatcaatgaggtgctggaccagctggccaacctgaatggccgggacctgagcatctggagcagcggcagccgccacatgaagaagcagacctttgtggtgcacgccggcacagacaccaatggagacatcttcttcatggaggtgtgtgatgactgtgtggtgctgcggagcaacatcggcaccgtgtatgagcgctggtggtatgagaagctgatcaacatgacctactgccccaagaccaaggtgctgtgcctgtggaggagaaatggcagcgagacccagctgaacaagttctacaccaagaagtgccgggagctgtactactgtgtgaaggacagcatggagagagctgctgcccggcagcagagcatcaagccaggccctgagctgggcggggagttccctgtgcaggacctgaagacaggagagggcggcctgctgcaggtgaccctggagggcatcaacctgaagttcatgcacaaccaggtgttcatcgagctgaaccacatcaagaagtgcaacacagtgcggggcgtgtttgtgctggaggagtttgtgcctgagatcaaggaggtggtgagccacaagtacaagacccccatggcccacgagatctgctacagcgtgctgtgcctcttctcctatgtggccgctgtgcacagcagcgaggaggacctgcggaccccacccaggcctgtgagcagctag

SEQ ID NO: 158830 - DNA, 4827 bp, synthetic construct
  misc_feature 1..4827: note = Description of Artificial Sequence: Synthetic coding sequence
  source 1..4827: mol_type = other DNA
atggtgcagaagaagaagttctgcccccggctgctggactacctggtgattgtgggcgcccggcaccccagcagtgacagcgtggcccagaccccagagctgctgcggcgctaccccctggaggaccacacagagttccccctgcccccagatgtggtgttcttctgccagcctgagggctgcctgtctgtgcggcagaggaggatgagcctgagagatgacaccagctttgtgttcaccctgacagacaaggacaccggggtgaccaggtatggcatctgtgtgaacttctaccgctccttccagaagaggatcagcaaggagaagggggagggcggggccggcagccggggcaaggagggcacccacgccacctgtgccagcgaggagggcggcacagagagcagcgagagcggcagcagcctgcagcccctgtctgctgacagcaccccagatgtgaaccagagcccccggggcaagagaagagccaaggccggcagccgcagcaggaacagcaccctgaccagcctgtgtgtgctgagccactaccccttcttcagcaccttcagagaatgtctgtacaccctgaagaggctggtggactgctgcagcgagcggctgctgggcaagaagctgggcatcccccggggcgtgcagagggacaccatgtggaggatcttcaccggcagcctgctggtggaggagaagagcagcgccctgctgcatgacctgcgggagattgaggcctggatctaccgcctgctgcggagccctgtgcctgtgtctggccagaagagggtggacatcgaggtgctgccccaggagctgcagcctgccctgacctttgccctgcctgaccccagccgcttcaccctggtggacttccccctgcacctgcccctggagctgctgggcgtggatgcctgcctgcaggtgctgacctgcatcctgctggagcacaaggtggtgctgcagagccgggactacaatgccctgtccatgtctgtgatggcctttgtggccatgatctaccccctggagtacatgtttcctgtgatccccctgctgcccacctgcatggccagcgctgagcagctgctgctggcccccaccccctacatcattggagtgcctgccagcttcttcctgtacaagctggacttcaagatgccagatgatgtgtggctggtggacctggacagcaacagagtgattgcccccaccaatgctgaggtgctgcccatcctgcctgagcctgagagcctggagctgaagaagcacctgaagcaggccctggcctccatgagcctgaacacccagcccatcctgaacctggagaagttccacgagggccaggagatccccctgctgctgggccggcccagcaatgacctgcagagcacccccagcacagagttcaaccccctcatctatggaaatgatgtggacagcgtggatgtggccaccagggtggccatggtgcgcttcttcaacagcgccaacgtgctgcagggcttccagatgcacaccaggaccctgcggctcttccccaggcctgtggtggccttccaggccggcagcttcctggccagccggccccggcagaccccatttgctgagaagctggcccggacccaggccgtggagtactttggagagtggatcctgaaccccaccaactatgccttccagaggatccacaacaacatgtttgatcctgccctgattggagacaagcccaagtggtacgcccaccagctgcagcccatccactacagagtgtatgacagcaacagccagctggccgaggccctgtctgtgcccccagagcgggacagcgacagcgagcccacagatgattctggcagtgacagcatggactatgatgacagcagcagcagctacagcagcctgggggactttgtgtctgagatgatgaagtgtgacatcaatggagacacccccaacgtggaccccctgacccatgctgccctgggagatgccagcgaggtggagattgatgagctgcagaaccagaaggaggccgaggagcccggcccagattctgagaacagccaggagaacccccccctgcggagcagcagcagcaccacagccagcagcagccccagcaccgtcatccatggagccaacagcgagcctgctgacagcacagagatggatgacaaggctgctgtgggcgtgtccaagcccctgcccagcgtgcccccatccatcggcaagagcaatgtggaccggcggcaggccgagatcggggagggctctgtgagaagacgcatctatgacaacccctactttgagccccagtatggcttccccccagaagaagatgaagatgagcagggcgagagctacaccccccgcttcagccagcacgtgtctggcaacagagcccagaagctgctgcggcccaacagcctgcggctggccagtgacagtgatgctgagagtgacagccgggccagcagccccaacagcacagtgagcaacaccagcacagagggctttggaggcatcatgagctttgccagcagcctgtacagaaaccacagcaccagcttcagcctgagcaacctgaccctgcccaccaagggggcccgggagaaggccacccccttccccagcctgaaggtgtttggcctgaacaccctgatggagatcgtgacagaggccggccctggcagcggggagggcaacagaagagccctggtggaccagaagagcagcgtcatcaagcacagccccaccgtgaagcgggagccccccagcccccagggccgcagcagcaacagcagcgagaaccagcagttcctgaaggaggtggtgcacagcgtgctggatggccagggcgtgggctggctgaacatgaagaaggtgcggcggctgctggagagcgagcagctgcgggtgtttgtgctgagcaagctgaacaggatggtgcagagtgaagatgatgcccggcaggacatcatcccagatgtggagatcagcaggaaggtgtacaagggcatgctggacctgctgaagtgcaccgtgctgagcctggagcagagctatgcccatgctggcctgggcggcatggccagcatcttcggcctgctggagatcgcccagacccactactacagcaaggagccagacaagaggaagaggagccccacagaatctgtgaacacccctgtgggcaaggaccccggcctggccggccgcggggaccccaaggccatggcccagctgcgggtgccccagctgggcccccgggcccccagcgccaccgggaagggccccaaggagctggacaccaggagcctgaaggaggagaacttcatcgccagcatcggccctgaggtgatcaagcctgtgtttgacctgggggagacagaggagaagaagagccagatctctgctgacagcggcgtgtccctgaccagcagcagccagaggacagaccaggacagcgtcatcggcgtgtccccagctgtgatgatccgcagcagcagccaggacagcgaggtgtccacagtggtgagcaacagcagtggagagaccctgggcgctgacagcgacctgagcagcaatgctggagatggccctggaggagagggctctgtgcacctggccagcagccggggcaccctgagtgacagcgagattgagaccaacagcgccaccagcaccatctttgggaaggcccacagcctgaagcccagcatcaaggagaagctggccggcagccccatccgcaccagtgaagatgtgtcccagagggtgtacctgtatgagggcctgctgggcaaggagaggagcaccctgtgggaccagatgcagttctgggaggatgccttcctggatgctgtgatgctggagcgggagggcatgggcatggaccagggcccccaggagatgattgaccgctacctgagcctgggggagcatgacaggaagaggctggaggatgatgaggaccggctgctggccaccctgctgcacaacctgatctcctacatgctgctgatgaaggtgaacaagaatgacatcaggaagaaggtgcggcggctgatgggcaagagccacatcggcctggtgtacagccagcagatcaatgaggtgctggaccagctggccaacctgaatggccgggacctgagcatctggagcagcggcagccgccacatgaagaagcagacctttgtggtgcacgccggcacagacaccaatggagacatcttcttcatggaggtgtgtgatgactgtgtggtgctgcggagcaacatcggcaccgtgtatgagcgctggtggtatgagaagctgatcaacatgacctactgccccaagaccaaggtgctgtgcctgtggaggagaaatggcagcgagacccagctgaacaagttctacaccaagaagtgccgggagctgtactactgtgtgaaggacagcatggagagagctgctgcccggcagcagagcatcaagccaggccctgagctgggcggggagttccctgtgcaggacctgaagacaggagagggcggcctgctgcaggtgaccctggagggcatcaacctgaagttcatgcacaaccaggtgttcatcgagctgaaccacatcaagaagtgcaacacagtgcggggcgtgtttgtgctggaggagtttgtgcctgagatcaaggaggtggtgagccacaagtacaagacccccatggcccacgagatctgctacagcgtgctgtgcctcttctcctatgtggccgctgtgcacagcagcgaggaggacctgcggaccccacccaggcctgtgagcagctag

SEQ ID NO: 158831 - DNA, 4746 bp, synthetic construct
  misc_feature 1..4746: note = Description of Artificial Sequence: Synthetic coding sequence
  source 1..4746: mol_type = other DNA
atggtgcagaagaagaagttctgcccccggctgctggactacctggtgattgtgggcgcccggcaccccagcagtgacagcgtggcccagaccccagagctgctgcggcgctaccccctggaggaccacacagagttccccctgcccccagatgtggtgttcttctgccagcctgagggctgcctgtctgtgcggcagaggaggatgagcctgagagatgacaccagctttgtgttcaccctgacagacaaggacaccggggtgaccaggtatggcatctgtgtgaacttctaccgctccttccagaagaggatcagcaaggagaagggggagggcggggccggcagccggggcaaggagggcacccacgccacctgtgccagcgaggagggcggcacagagagcagcgagagcggcagcagcctgcagcccctgtctgctgacagcaccccagatgtgaaccagagcccccggggcaagagaagagccaaggccggcagccgcagcaggaacagcaccctgaccagcctgtgtgtgctgagccactaccccttcttcagcaccttcagagaatgtctgtacaccctgaagaggctggtggactgctgcagcgagcggctgctgggcaagaagctgggcatcccccggggcgtgcagagggacaccatgtggaggatcttcaccggcagcctgctggtggaggagaagagcagcgccctgctgcatgacctgcgggagattgaggcctggatctaccgcctgctgcggagccctgtgcctgtgtctggccagaagagggtggacatcgaggtgctgccccaggagctgcagcctgccctgacctttgccctgcctgaccccagccgcttcaccctggtggacttccccctgcacctgcccctggagctgctgggcgtggatgcctgcctgcaggtgctgacctgcatcctgctggagcacaaggtggtgctgcagagccgggactacaatgccctgtccatgtctgtgatggcctttgtggccatgatctaccccctggagtacatgtttcctgtgatccccctgctgcccacctgcatggccagcgctgagcagctgctgctggcccccaccccctacatcattggagtgcctgccagcttcttcctgtacaagctggacttcaagatgccagatgatgtgtggctggtggacctggacagcaacagagtgattgcccccaccaatgctgaggtgctgcccatcctgcctgagcctgagagcctggagctgaagaagcacctgaagcaggccctggcctccatgagcctgaacacccagcccatcctgaacctggagaagttccacgagggccaggagatccccctgctgctgggccggcccagcaatgacctgcagagcacccccagcacagagttcaaccccctcatctatggaaatgatgtggacagcgtggatgtggccaccagggtggccatggtgcgcttcttcaacagcgccaacgtgctgcagggcttccagatgcacaccaggaccctgcggctcttccccaggcctgtggtggccttccaggccggcagcttcctggccagccggccccggcagaccccatttgctgagaagctggcccggacccaggccgtggagtactttggagagtggatcctgaaccccaccaactatgccttccagaggatccacaacaacatgtttgatcctgccctgattggagacaagcccaagtggtacgcccaccagctgcagcccatccactacagagtgtatgacagcaacagccagctggccgaggccctgtctgtgcccccagagcgggacagcgacagcgagcccacagatgattctggcagtgacagcatggactatgatgacagcagcagcagctacagcagcctgggggactttgtgtctgagatgatgaagtgtgacatcaatggagacacccccaacgtggaccccctgacccatgctgccctgggagatgccagcgaggtggagattgatgagctgcagaaccagaaggaggccgaggagcccggcccagattctgagaacagccaggagaacccccccctgcggagcagcagcagcaccacagccagcagcagccccagcaccgtcatccatggagccaacagcgagcctgctgacagcacagagatggatgacaaggctgctgtgggcgtgtccaagcccctgcccagcgtgcccccatccatcggcaagagcaatgtggaccggcggcaggccgagatcggggagggctctgtgagaagacgcatctatgacaacccctactttgagccccagtatggcttccccccagaagaagatgaagatgagcagggcgagagctacaccccccgcttcagccagcacgtgtctggcaacagagcccagaagctgctgcggcccaacagcctgcggctggccagtgacagtgatgctgagagtgacagccgggccagcagccccaacagcacagtgagcaacaccagcacagagggctttggaggcatcatgagctttgccagcagcctgtacagaaaccacagcaccagcttcagcctgagcaacctgaccctgcccaccaagggggcccgggagaaggccacccccttccccagcctgaaggtgtttggcctgaacaccctgatggagatcgtgacagaggccggccctggcagcggggagggcaacagaagagccctggtggaccagaagagcagcgtcatcaagcacagccccaccgtgaagcgggagccccccagcccccagggccgcagcagcaacagcagcgagaaccagcagttcctgaaggaggtggtgcacagcgtgctggatggccagggcgtgggctggctgaacatgaagaaggtgcggcggctgctggagagcgagcagctgcgggtgtttgtgctgagcaagctgaacaggatggtgcagagtgaagatgatgcccggcaggacatcatcccagatgtggagatcagcaggaaggtgtacaagggcatgctggacctgctgaagtgcaccgtgctgagcctggagcagagctatgcccatgctggcctgggcggcatggccagcatcttcggcctgctggagatcgcccagacccactactacagcaaggagccagacaagaggaagaggagccccacagaatctgtgaacacccctgtgggcaaggaccccggcctggccggccgcggggaccccaaggccatggcccagctgcgggtgccccagctgggcccccgggcccccagcgccaccgggaagggccccaaggagctggacaccaggagcctgaaggaggagaacttcatcgccagcattgagctgtggaacaagcaccaggaggtgaagaagcagaaggccctggagaagcagaggcctgaggtgatcaagcctgtgtttgacctgggggagacagaggagaagaagagccagatctctgctgacagcggcgtgtccctgaccagcagcagccagaggacagaccaggacagcgtcatcggcgtgtccccagctgtgatgatccgcagcagcagccaggacagcgaggtgtccacagtggtgagcaacagcagtggagagaccctgggcgctgacagcgacctgagcagcaatgctggagatggccctggaggagagggctctgtgcacctggccagcagccggggcaccctgagtgacagcgagattgagaccaacagcgccaccagcaccatctttgggaaggcccacagcctgaagcccagcatcaaggagaagctggccggcagccccatccgcaccagtgaagatgtgtcccagagggtgtacctgtatgagggcctgctgggccgggacaagggctccatgtgggaccagctggaggatgctgccatggagaccttcagcatcagcaaggagaggagcaccctgtgggaccagatgcagttctgggaggatgccttcctggatgctgtgatgctggagcgggagggcatgggcatggaccagggcccccaggagatgattgaccgctacctgagcctgggggagcatgacaggaagaggctggaggatgatgaagatcggctgctggccaccctgctgcacaacctgatctcctacatgctgctgatgaaggtgaacaagaatgacatcaggaagaaggtgcggcggctgatgggcaagagccacatcggcctggtgtacagccagcagatcaatgaggtgctggaccagctggccaacctgaatggccgggacctgagcatctggagcagcggcagccgccacatgaagaagcagacctttgtggtgcatgctggaacagacaccaacggggacatcttcttcatggaggtgtgtgatgactgtgtggtgctgcggagcaacattggaacagtgtatgagcgctggtggtatgagaagctgatcaacatgacctactgccccaagaccaaggtgctgtgcctgtggaggagaaatggaagtgagacccagctgaacaagttctacaccaagaagtgccgggagctgtactactgtgtgaaggacagcatggagagagctgctgcccggcagcagagcatcaagccaggccctgagctgggcggggagttccctgtgcaggacctgaagacaggagagggcggcctgctgcaggtgaccctggagggcatcaacctgaagttcatgcacaaccagttcctgaagctgaagaagtggtag

SEQ ID NO: 158832 - DNA, 4440 bp, synthetic construct
  misc_feature 1..4440: note = Description of Artificial Sequence: Synthetic coding sequence
  source 1..4440: mol_type = other DNA
atggtgcagaagaagaagttctgcccccggctgctggactacctggtgattgtgggcgcccggcaccccagcagtgacagcgtggcccagaccccagagctgctgcggcgctaccccctggaggaccacacagagttccccctgcccccagatgtggtgttcttctgccagcctgagggctgcctgtctgtgcggcagaggaggatgagcctgagagatgacaccagctttgtgttcaccctgacagacaaggacaccggggtgaccaggtatggcatctgtgtgaacttctaccgctccttccagaagaggatcagcaaggagaagggggagggcggggccggcagccggggcaaggagggcacccacgccacctgtgccagcgaggagggcggcacagagagcagcgagagcggcagcagcctgcagcccctgtctgctgacagcaccccagatgtgaaccagagcccccggggcaagagaagagccaaggccggcagccgcagcaggaacagcaccctgaccagcctgtgtgtgctgagccactaccccttcttcagcaccttcagagaatgtctgtacaccctgaagaggctggtggactgctgcagcgagcggctgctgggcaagaagctgggcatcccccggggcgtgcagagggacaccatgtggaggatcttcaccggcagcctgctggtggaggagaagagcagcgccctgctgcatgacctgcgggagattgaggcctggatctaccgcctgctgcggagccctgtgcctgtgtctggccagaagagggtggacatcgaggtgctgccccaggagctgcagcctgccctgacctttgccctgcctgaccccagccgcttcaccctggtggacttccccctgcacctgcccctggagctgctgggcgtggatgcctgcctgcaggtgctgacctgcatcctgctggagcacaaggtggtgctgcagagccgggactacaatgccctgtccatgtctgtgatggcctttgtggccatgatctaccccctggagtacatgtttcctgtgatccccctgctgcccacctgcatggccagcgctgagcagctgctgctggcccccaccccctacatcattggagtgcctgccagcttcttcctgtacaagctggacttcaagatgccagatgatgtgtggctggtggacctggacagcaacagagtgattgcccccaccaatgctgaggtgctgcccatcctgcctgagcctgagagcctggagctgaagaagcacctgaagcaggccctggcctccatgagcctgaacacccagcccatcctgaacctggagaagttccacgagggccaggagatccccctgctgctgggccggcccagcaatgacctgcagagcacccccagcacagagttcaaccccctcatctatggaaatgatgtggacagcgtggatgtggccaccagggtggccatggtgcgcttcttcaacagcgccaacgtgctgcagggcttccagatgcacaccaggaccctgcggctcttccccaggcctgtggtggccttccaggccggcagcttcctggccagccggccccggcagaccccatttgctgagaagctggcccggacccaggccgtggagtactttggagagtggatcctgaaccccaccaactatgccttccagaggatccacaacaacatgtttgatcctgccctgattggagacaagcccaagtggtacgcccaccagctgcagcccatccactacagagtgtatgacagcaacagccagctggccgaggccctgtctgtgcccccagagcgggacagcgacagcgagcccacagatgattctggcagtgacagcatggactatgatgacagcagcagcagctacagcagcctgggggactttgtgtctgagatgatgaagtgtgacatcaatggagacacccccaacgtggaccccctgacccatgctgccctgggagatgccagcgaggtggagattgatgagctgcagaaccagaaggaggccgaggagcccggcccagattctgagaacagccaggagaacccccccctgcggagcagcagcagcaccacagccagcagcagccccagcaccgtcatccatggagccaacagcgagcctgctgacagcacagagatggatgacaaggctgctgtgggcgtgtccaagcccctgcccagcgtgcccccatccatcggcaagagcaatgtggaccggcggcaggccgagatcggggagggcgcccagaagctgctgcggcccaacagcctgcggctggccagtgacagtgatgctgagagtgacagccgggccagcagccccaacagcacagtgagcaacaccagcacagagggctttggaggcatcatgagctttgccagcagcctgtacagaaaccacagcaccagcttcagcctgagcaacctgaccctgcccaccaagggggcccgggagaaggccacccccttccccagcctgaagggcaacagaagagccctggtggaccagaagagcagcgtcatcaagcacagccccaccgtgaagcgggagccccccagcccccagggccgcagcagcaacagcagcgagaaccagcagttcctgaaggaggtggtgcacagcgtgctggatggccagggcgtgggctggctgaacatgaagaaggtgcggcggctgctggagagcgagcagctgcgggtgtttgtgctgagcaagctgaacaggatggtgcagagtgaagatgatgcccggcaggacatcatcccagatgtggagatcagcaggaaggtgtacaagggcatgctggacctgctgaagtgcaccgtgctgagcctggagcagagctatgcccacgccggcctgggcggcatggccagcatcttcggcctgctggagatcgcccagacccactactacagcaaggagccagacaagaggaagaggagccccacagagagcgtgaacacccctgtgggcaaggaccccggcctggccggccgcggggaccccaaggccatggcccagctgcgggtgccccagctgggcccccgggcccccagcgccaccgggaagggccccaaggagctggacaccaggagcctgaaggaggagaacttcatcgccagcatcggccctgaggtgatcaagcctgtgtttgacctgggggagacagaggagaagaagagccagatctctgctgacagcggcgtgtccctgaccagcagcagccagaggacagaccaggacagcgtgattggagtgtccccagctgtgatgatccgcagcagcagccaggacagcgaggtgtccacagtggtgagcaacagcagcggggagaccctgggcgctgacagcgacctgagcagcaatgctggagatggccctggaggagagggctctgtgcacctggccagcagccggggcaccctgagtgacagcgagattgagaccaacagcgccaccagcaccatctttgggaaggcccacagcctgaagcccagcatcaaggagaagctggccggcagccccatccgcaccagtgaagatgtgtcccagagggtgtacctgtatgagggcctgctgggcaaggagaggagcaccctgtgggaccagatgcagttctgggaggatgccttcctggatgctgtgatgctggagcgggagggcatgggcatggaccagggcccccaggagatgattgaccgctacctgagcctgggggagcatgacaggaagaggctggaggatgatgaagatcggctgctggccaccctgctgcacaacctgatctcctacatgctgctgatgaaggtgaacaagaatgacatcaggaagaaggtgcggcggctgatgggcaagagccacatcggcctggtgtacagccagcagatcaatgaggtgctggaccagctggccaacctgaatggccgggacctgagcatctggagcagcggcagccgccacatgaagaagcagacctttgtggtgcatgctggaacagacaccaacggggacatcttcttcatggaggtgtgtgatgactgtgtggtgctgcggagcaacattggaacagtgtatgagcgctggtggtatgagaagctgatcaacatgacctactgccccaagaccaaggtgctgtgcctgtggaggagaaatggaagtgagacccagctgaacaagttctacaccaagaagtgccgggagctgtactactgtgtgaaggacagcatggagagagctgctgcccggcagcagagcatcaagccaggccctgagctgggcggggagttccctgtgcaggacctgaagacaggagagggcggcctgctgcaggtgaccctggagggcatcaacctgaagttcatgcacaaccagctgctgcggcggctgcgctggtag

SEQ ID NO: 158833 - DNA, 4626 bp, synthetic construct
  misc_feature 1..4626: note = Description of Artificial Sequence: Synthetic coding sequence
  source 1..4626: mol_type = other DNA
atggtgcagaagaagaagttctgcccccggctgctggactacctggtgattgtgggcgcccggcaccccagcagtgacagcgtggcccagaccccagagctgctgcggcgctaccccctggaggaccacacagagttccccctgcccccagatgtggtgttcttctgccagcctgagggctgcctgtctgtgcggcagaggaggatgagcctgagagatgacaccagctttgtgttcaccctgacagacaaggacaccggggtgaccaggtatggcatctgtgtgaacttctaccgctccttccagaagaggatcagcaaggagaagggggagggcggggccggcagccggggcaaggagggcacccacgccacctgtgccagcgaggagggcggcacagagagcagcgagagcggcagcagcctgcagcccctgtctgctgacagcaccccagatgtgaaccagagcccccggggcaagagaagagccaaggccggcagccgcagcaggaacagcaccctgaccagcctgtgtgtgctgagccactaccccttcttcagcaccttcagagaatgtctgtacaccctgaagaggctggtggactgctgcagcgagcggctgctgggcaagaagctgggcatcccccggggcgtgcagagggacaccatgtggaggatcttcaccggcagcctgctggtggaggagaagagcagcgccctgctgcatgacctgcgggagattgaggcctggatctaccgcctgctgcggagccctgtgcctgtgtctggccagaagagggtggacatcgaggtgctgccccaggagctgcagcctgccctgacctttgccctgcctgaccccagccgcttcaccctggtggacttccccctgcacctgcccctggagctgctgggcgtggatgcctgcctgcaggtgctgacctgcatcctgctggagcacaaggtggtgctgcagagccgggactacaatgccctgtccatgtctgtgatggcctttgtggccatgatctaccccctggagtacatgtttcctgtgatccccctgctgcccacctgcatggccagcgctgagcagctgctgctggcccccaccccctacatcattggagtgcctgccagcttcttcctgtacaagctggacttcaagatgccagatgatgtgtggctggtggacctggacagcaacagagtgattgcccccaccaatgctgaggtgctgcccatcctgcctgagcctgagagcctggagctgaagaagcacctgaagcaggccctggcctccatgagcctgaacacccagcccatcctgaacctggagaagttccacgagggccaggagatccccctgctgctgggccggcccagcaatgacctgcagagcacccccagcacagagttcaaccccctcatctatggaaatgatgtggacagcgtggatgtggccaccagggtggccatggtgcgcttcttcaacagcgccaacgtgctgcagggcttccagatgcacaccaggaccctgcggctcttccccaggcctgtggtggccttccaggccggcagcttcctggccagccggccccggcagaccccatttgctgagaagctggcccggacccaggccgtggagtactttggagagtggatcctgaaccccaccaactatgccttccagaggatccacaacaacatgtttgatcctgccctgattggagacaagcccaagtggtacgcccaccagctgcagcccatccactacagagtgtatgacagcaacagccagctggccgaggccctgtctgtgcccccagagcgggacagcgacagcgagcccacagatgattctggcagtgacagcatggactatgatgacagcagcagcagctacagcagcctgggggactttgtgtctgagatgatgaagtgtgacatcaatggagacacccccaacgtggaccccctgacccatgctgccctgggagatgccagcgaggtggagattgatgagctgcagaaccagaaggaggccgaggagcccggcccagattctgagaacagccaggagaacccccccctgcggagcagcagcagcaccacagccagcagcagccccagcaccgtcatccatggagccaacagcgagcctgctgacagcacagagatggatgacaaggctgctgtgggcgtgtccaagcccctgcccagcgtgcccccatccatcggcaagagcaatgtggaccggcggcaggccgagatcggggagggcgcccagaagctgctgcggcccaacagcctgcggctggccagtgacagtgatgctgagagtgacagccgggccagcagccccaacagcacagtgagcaacaccagcacagagggctttggaggcatcatgagctttgccagcagcctgtacagaaaccacagcaccagcttcagcctgagcaacctgaccctgcccaccaagggggcccgggagaaggccacccccttccccagcctgaagggcaacagaagagccctggtggaccagaagagcagcgtcatcaagcacagccccaccgtgaagcgggagccccccagcccccagggccgcagcagcaacagcagcgagaaccagcagttcctgaaggaggtggtgcacagcgtgctggatggccagggcgtgggctggctgaacatgaagaaggtgcggcggctgctggagagcgagcagctgcgggtgtttgtgctgagcaagctgaacaggatggtgcagagtgaagatgatgcccggcaggacatcatcccagatgtggagatcagcaggaaggtgtacaagggcatgctggacctgctgaagtgcaccgtgctgagcctggagcagagctatgcccacgccggcctgggcggcatggccagcatcttcggcctgctggagatcgcccagacccactactacagcaaggagccagacaagaggaagaggagccccacagagagcgtgaacacccctgtgggcaaggaccccggcctggccggccgcggggaccccaaggccatggcccagctgcgggtgccccagctgggcccccgggcccccagcgccaccgggaagggccccaaggagctggacaccaggagcctgaaggaggagaacttcatcgccagcatcggccctgaggtgatcaagcctgtgtttgacctgggggagacagaggagaagaagagccagatctctgctgacagcggcgtgtccctgaccagcagcagccagaggacagaccaggacagcgtgattggagtgtccccagctgtgatgatccgcagcagcagccaggacagcgaggtgagcaacagcagcggggagaccctgggcgctgacagcgacctgagcagcaatgctggagatggccctggaggagagggctctgtgcacctggccagcagccggggcaccctgagtgacagcgagattgagaccaacagcgccaccagcaccatctttgggaaggcccacagcctgaagcccagcatcaaggagaagctggccggcagccccatccgcaccagtgaagatgtgtcccagagggtgtacctgtatgagggcctgctgggcaaggagaggagcaccctgtgggaccagatgcagttctgggaggatgccttcctggatgctgtgatgctggagcgggagggcatgggcatggaccagggcccccaggagatgattgaccgctacctgagcctgggggagcatgacaggaagaggctggaggatgatgaagatcggctgctggccaccctgctgcacaacctgatctcctacatgctgctgatgaaggtgaacaagaatgacatcaggaagaaggtgcggcggctgatgggcaagagccacatcggcctggtgtacagccagcagatcaatgaggtgctggaccagctggccaacctgaatggccgggacctgagcatctggagcagcggcagccgccacatgaagaagcagacctttgtggtgcatgctggaacagacaccaacggggacatcttcttcatggaggtgtgtgatgactgtgtggtgctgcggagcaacattggaacagtgtatgagcgctggtggtatgagaagctgatcaacatgacctactgccccaagaccaaggtgctgtgcctgtggaggagaaatggaagtgagacccagctgaacaagttctacaccaagaagtgccgggagctgtactactgtgtgaaggacagcatggagagagctgctgcccggcagcagagcatcaagccaggccctgagctgggcggggagttccctgtgcaggacctgaagacaggagagggcggcctgctgcaggtgaccctggagggcatcaacctgaagttcatgcacaaccaggtgttcatcgagctgaaccacatcaagaagtgcaacacagtgcggggcgtgtttgtgctggaggagtttgtgcctgagatcaaggaggtggtgagccacaagtacaagacccccatggcccacgagatctgctacagcgtgctgtgcctcttctcctatgtggccgctgtgcacagcagcgaggaggacctgcggaccccacccaggcctgtgagcagctag

SEQ ID NO: 158834 - DNA, 4764 bp, synthetic construct
  misc_feature 1..4764: note = Description of Artificial Sequence: Synthetic coding sequence
  source 1..4764: mol_type = other DNA
atggtgcagaagaagaagttctgcccccggctgctggactacctggtgattgtgggcgcccggcaccccagcagtgacagcgtggcccagaccccagagctgctgcggcgctaccccctggaggaccacacagagttccccctgcccccagatgtggtgttcttctgccagcctgagggctgcctgtctgtgcggcagaggaggatgagcctgagagatgacaccagctttgtgttcaccctgacagacaaggacaccggggtgaccaggtatggcatctgtgtgaacttctaccgctccttccagaagaggatcagcaaggagaagggggagggcggggccggcagccggggcaaggagggcacccacgccacctgtgccagcgaggagggcggcacagagagcagcgagagcggcagcagcctgcagcccctgtctgctgacagcaccccagatgtgaaccagagcccccggggcaagagaagagccaaggccggcagccgcagcaggaacagcaccctgaccagcctgtgtgtgctgagccactaccccttcttcagcaccttcagagaatgtctgtacaccctgaagaggctggtggactgctgcagcgagcggctgctgggcaagaagctgggcatcccccggggcgtgcagagggacaccatgtggaggatcttcaccggcagcctgctggtggaggagaagagcagcgccctgctgcatgacctgcgggagattgaggcctggatctaccgcctgctgcggagccctgtgcctgtgtctggccagaagagggtggacatcgaggtgctgccccaggagctgcagcctgccctgacctttgccctgcctgaccccagccgcttcaccctggtggacttccccctgcacctgcccctggagctgctgggcgtggatgcctgcctgcaggtgctgacctgcatcctgctggagcacaaggtggtgctgcagagccgggactacaatgccctgtccatgtctgtgatggcctttgtggccatgatctaccccctggagtacatgtttcctgtgatccccctgctgcccacctgcatggccagcgctgagcagctgctgctggcccccaccccctacatcattggagtgcctgccagcttcttcctgtacaagctggacttcaagatgccagatgatgtgtggctggtggacctggacagcaacagagtgattgcccccaccaatgctgaggtgctgcccatcctgcctgagcctgagagcctggagctgaagaagcacctgaagcaggccctggcctccatgagcctgaacacccagcccatcctgaacctggagaagttccacgagggccaggagatccccctgctgctgggccggcccagcaatgacctgcagagcacccccagcacagagttcaaccccctcatctatggaaatgatgtggacagcgtggatgtggccaccagggtggccatggtgcgcttcttcaacagcgccaacgtgctgcagggcttccagatgcacaccaggaccctgcggctcttccccaggcctgtggtggccttccaggccggcagcttcctggccagccggccccggcagaccccatttgctgagaagctggcccggacccaggccgtggagtactttggagagtggatcctgaaccccaccaactatgccttccagaggatccacaacaacatgtttgatcctgccctgattggagacaagcccaagtggtacgcccaccagctgcagcccatccactacagagtgtatgacagcaacagccagctggccgaggccctgtctgtgcccccagagcgggacagcgacagcgagcccacagatgattctggcagtgacagcatggactatgatgacagcagcagcagctacagcagcctgggggactttgtgtctgagatgatgaagtgtgacatcaatggagacacccccaacgtggaccccctgacccatgctgccctgggagatgccagcgaggtggagattgatgagctgcagaaccagaaggaggccgaggagcccggcccagattctgagaacagccaggagaacccccccctgcggagcagcagcagcaccacagccagcagcagccccagcaccgtcatccatggagccaacagcgagcctgctgacagcacagagatggatgacaaggctgctgtgggcgtgtccaagcccctgcccagcgtgcccccatccatcggcaagagcaatgtggaccggcggcaggccgagatcggggagggctctgtgagaagacgcatctatgacaacccctactttgagccccagtatggcttccccccagaagaagatgaagatgagcagggcgagagctacaccccccgcttcagccagcacgtgtctggcaacagagcccagaagctgctgcggcccaacagcctgcggctggccagtgacagtgatgctgagagtgacagccgggccagcagccccaacagcacagtgagcaacaccagcacagagggctttggaggcatcatgagctttgccagcagcctgtacagaaaccacagcaccagcttcagcctgagcaacctgaccctgcccaccaagggggcccgggagaaggccacccccttccccagcctgaagggcaacagaagagccctggtggaccagaagagcagcgtcatcaagcacagccccaccgtgaagcgggagccccccagcccccagggccgcagcagcaacagcagcgagaaccagcagttcctgaaggaggtggtgcacagcgtgctggatggccagggcgtgggctggctgaacatgaagaaggtgcggcggctgctggagagcgagcagctgcgggtgtttgtgctgagcaagctgaacaggatggtgcagagtgaagatgatgcccggcaggacatcatcccagatgtggagatcagcaggaaggtgtacaagggcatgctggacctgctgaagtgcaccgtgctgagcctggagcagagctatgcccatgctggcctgggcggcatggccagcatcttcggcctgctggagatcgcccagacccactactacagcaaggagccagacaagaggaagaggagccccacagaatctgtgaacacccctgtgggcaaggaccccggcctggccggccgcggggaccccaaggccatggcccagctgcgggtgccccagctgggcccccgggcccccagcgccaccgggaagggccccaaggagctggacaccaggagcctgaaggaggagaacttcatcgccagcatcggccctgaggtgatcaagcctgtgtttgacctgggggagacagaggagaagaagagccagatctctgctgacagcggcgtgtccctgaccagcagcagccagaggacagaccaggacagcgtcatcggcgtgtccccagctgtgatgatccgcagcagcagccaggacagcgaggtgtccacagtgagcaacagcagcggggagaccctgggcgctgacagcgacctgagcagcaatgctggagatggccctggaggagagggctctgtgcacctggccagcagccggggcaccctgagtgacagcgagattgagaccaacagcgccaccagcaccatctttgggaaggcccacagcctgaagcccagcatcaaggagaagctggccggcagccccatccgcaccagtgaagatgtgtcccagagggtgtacctgtatgagggcctgctgggcaaggagaggagcaccctgtgggaccagatgcagttctgggaggatgccttcctggatgctgtgatgctggagcgggagggcatgggcatggaccagggcccccaggagatgattgaccgctacctgagcctgggggagcatgacaggaagaggctggaggatgatgaagatcggctgctggccaccctgctgcacaacctgatctcctacatgctgctgatgaaggtgaacaagaatgacatcaggaagaaggtgcggcggctgatgggcaagagccacatcggcctggtgtacagccagcagatcaatgaggtgctggaccagctggccaacctgaatggccgggacctgagcatctggagcagcggcagccgccacatgaagaagcagacctttgtggtgcatgctggaacagacaccaacggggacatcttcttcatggaggtgtgtgatgactgtgtggtgctgcggagcaacattggaacagtgtatgagcgctggtggtatgagaagctgatcaacatgacctactgccccaagaccaaggtgctgtgcctgtggaggagaaatggaagtgagacccagctgaacaagttctacaccaagaagtgccgggagctgtactactgtgtgaaggacagcatggagagagctgctgcccggcagcagagcatcaagccaggccctgagctgggcggggagttccctgtgcaggacctgaagacaggagagggcggcctgctgcaggtgaccctggagggcatcaacctgaagttcatgcacaaccaggtgttcatcgagctgaaccacatcaagaagtgcaacacagtgcggggcgtgtttgtgctggaggagtttgtgcctgagatcaaggaggtggtgagccacaagtacaagacccccatggcccacgagatctgctacagcgtgctgtgcctcttctcctatgtggccgctgtgcacagcagcgaggaggacctgcggaccccacccaggcctgtgagcagctag

SEQ ID NO: 158835 - DNA, 4638 bp, synthetic construct
  misc_feature 1..4638: note = Description of Artificial Sequence: Synthetic coding sequence
  source 1..4638: mol_type = other DNA
atggtgcagaagaagaagttctgcccccggctgctggactacctggtgattgtgggcgcccggcaccccagcagtgacagcgtggcccagaccccagagctgctgcggcgctaccccctggaggaccacacagagttccccctgcccccagatgtggtgttcttctgccagcctgagggctgcctgtctgtgcggcagaggaggatgagcctgagagatgacaccagctttgtgttcaccctgacagacaaggacaccggggtgaccaggtatggcatctgtgtgaacttctaccgctccttccagaagaggatcagcaaggagaagggggagggcggggccggcagccggggcaaggagggcacccacgccacctgtgccagcgaggagggcggcacagagagcagcgagagcggcagcagcctgcagcccctgtctgctgacagcaccccagatgtgaaccagagcccccggggcaagagaagagccaaggccggcagccgcagcaggaacagcaccctgaccagcctgtgtgtgctgagccactaccccttcttcagcaccttcagagaatgtctgtacaccctgaagaggctggtggactgctgcagcgagcggctgctgggcaagaagctgggcatcccccggggcgtgcagagggacaccatgtggaggatcttcaccggcagcctgctggtggaggagaagagcagcgccctgctgcatgacctgcgggagattgaggcctggatctaccgcctgctgcggagccctgtgcctgtgtctggccagaagagggtggacatcgaggtgctgccccaggagctgcagcctgccctgacctttgccctgcctgaccccagccgcttcaccctggtggacttccccctgcacctgcccctggagctgctgggcgtggatgcctgcctgcaggtgctgacctgcatcctgctggagcacaaggtggtgctgcagagccgggactacaatgccctgtccatgtctgtgatggcctttgtggccatgatctaccccctggagtacatgtttcctgtgatccccctgctgcccacctgcatggccagcgctgagcagctgctgctggcccccaccccctacatcattggagtgcctgccagcttcttcctgtacaagctggacttcaagatgccagatgatgtgtggctggtggacctggacagcaacagagtgattgcccccaccaatgctgaggtgctgcccatcctgcctgagcctgagagcctggagctgaagaagcacctgaagcaggccctggcctccatgagcctgaacacccagcccatcctgaacctggagaagttccacgagggccaggagatccccctgctgctgggccggcccagcaatgacctgcagagcacccccagcacagagttcaaccccctcatctatggaaatgatgtggacagcgtggatgtggccaccagggtggccatggtgcgcttcttcaacagcgccaacgtgctgcagggcttccagatgcacaccaggaccctgcggctcttccccaggcctgtggtggccttccaggccggcagcttcctggccagccggccccggcagaccccatttgctgagaagctggcccggacccaggccgtggagtactttggagagtggatcctgaaccccaccaactatgccttccagaggatccacaacaacatgtttgatcctgccctgattggagacaagcccaagtggtacgcccaccagctgcagcccatccactacagagtgtatgacagcaacagccagctggccgaggccctgtctgtgcccccagagcgggacagcgacagcgagcccacagatgattctggcagtgacagcatggactatgatgacagcagcagcagctacagcagcctgggggactttgtgtctgagatgatgaagtgtgacatcaatggagacacccccaacgtggaccccctgacccatgctgccctgggagatgccagcgaggtggagattgatgagctgcagaaccagaaggaggccgaggagcccggcccagattctgagaacagccaggagaacccccccctgcggagcagcagcagcaccacagccagcagcagccccagcaccgtcatccatggagccaacagcgagcctgctgacagcacagagatggatgacaaggctgctgtgggcgtgtccaagcccctgcccagcgtgcccccatccatcggcaagagcaatgtggaccggcggcaggccgagatcggggagggcgcccagaagctgctgcggcccaacagcctgcggctggccagtgacagtgatgctgagagtgacagccgggccagcagccccaacagcacagtgagcaacaccagcacagagggctttggaggcatcatgagctttgccagcagcctgtacagaaaccacagcaccagcttcagcctgagcaacctgaccctgcccaccaagggggcccgggagaaggccacccccttccccagcctgaagggcaacagaagagccctggtggaccagaagagcagcgtcatcaagcacagccccaccgtgaagcgggagccccccagcccccagggccgcagcagcaacagcagcgagaaccagcagttcctgaaggaggtggtgcacagcgtgctggatggccagggcgtgggctggctgaacatgaagaaggtgcggcggctgctggagagcgagcagctgcgggtgtttgtgctgagcaagctgaacaggatggtgcagagtgaagatgatgcccggcaggacatcatcccagatgtggagatcagcaggaaggtgtacaagggcatgctggacctgctgaagtgcaccgtgctgagcctggagcagagctatgcccacgccggcctgggcggcatggccagcatcttcggcctgctggagatcgcccagacccactactacagcaaggagccagacaagaggaagaggagccccacagagagcgtgaacacccctgtgggcaaggaccccggcctggccggccgcggggaccccaaggccatggcccagctgcgggtgccccagctgggcccccgggcccccagcgccaccgggaagggccccaaggagctggacaccaggagcctgaaggaggagaacttcatcgccagcatcggccctgaggtgatcaagcctgtgtttgacctgggggagacagaggagaagaagagccagatctctgctgacagcggcgtgtccctgaccagcagcagccagaggacagaccaggacagcgtgattggagtgtccccagctgtgatgatccgcagcagcagccaggacagcgaggtgtccacagtggtgagcaacagcagcggggagaccctgggcgctgacagcgacctgagcagcaatgctggagatggccctggaggagagggctctgtgcacctggccagcagccggggcaccctgagtgacagcgagattgagaccaacagcgccaccagcaccatctttgggaaggcccacagcctgaagcccagcatcaaggagaagctggccggcagccccatccgcaccagtgaagatgtgtcccagagggtgtacctgtatgagggcctgctgggcaaggagaggagcaccctgtgggaccagatgcagttctgggaggatgccttcctggatgctgtgatgctggagcgggagggcatgggcatggaccagggcccccaggagatgattgaccgctacctgagcctgggggagcatgacaggaagaggctggaggatgatgaagatcggctgctggccaccctgctgcacaacctgatctcctacatgctgctgatgaaggtgaacaagaatgacatcaggaagaaggtgcggcggctgatgggcaagagccacatcggcctggtgtacagccagcagatcaatgaggtgctggaccagctggccaacctgaatggccgggacctgagcatctggagcagcggcagccgccacatgaagaagcagacctttgtggtgcatgctggaacagacaccaacggggacatcttcttcatggaggtgtgtgatgactgtgtggtgctgcggagcaacattggaacagtgtatgagcgctggtggtatgagaagctgatcaacatgacctactgccccaagaccaaggtgctgtgcctgtggaggagaaatggaagtgagacccagctgaacaagttctacaccaagaagtgccgggagctgtactactgtgtgaaggacagcatggagagagctgctgcccggcagcagagcatcaagccaggccctgagctgggcggggagttccctgtgcaggacctgaagacaggagagggcggcctgctgcaggtgaccctggagggcatcaacctgaagttcatgcacaaccaggtgttcatcgagctgaaccacatcaagaagtgcaacacagtgcggggcgtgtttgtgctggaggagtttgtgcctgagatcaaggaggtggtgagccacaagtacaagacccccatggcccacgagatctgctacagcgtgctgtgcctcttctcctatgtggccgctgtgcacagcagcgaggaggacctgcggaccccacccaggcctgtgagcagctag

SEQ ID NO: 158836 - DNA, 4440 bp, synthetic construct
  misc_feature 1..4440: note = Description of Artificial Sequence: Synthetic coding sequence
  source 1..4440: mol_type = other DNA
atggtgcagaagaagaagttctgcccccggctgctggactacctggtgattgtgggcgcccggcaccccagcagtgacagcgtggcccagaccccagagctgctgcggcgctaccccctggaggaccacacagagttccccctgcccccagatgtggtgttcttctgccagcctgagggctgcctgtctgtgcggcagaggaggatgagcctgagagatgacaccagctttgtgttcaccctgacagacaaggacaccggggtgaccaggtatggcatctgtgtgaacttctaccgctccttccagaagaggatcagcaaggagaagggggagggcggggccggcagccggggcaaggagggcacccacgccacctgtgccagcgaggagggcggcacagagagcagcgagagcggcagcagcctgcagcccctgtctgctgacagcaccccagatgtgaaccagagcccccggggcaagagaagagccaaggccggcagccgcagcaggaacagcaccctgaccagcctgtgtgtgctgagccactaccccttcttcagcaccttcagagaatgtctgtacaccctgaagaggctggtggactgctgcagcgagcggctgctgggcaagaagctgggcatcccccggggcgtgcagagggacaccatgtggaggatcttcaccggcagcctgctggtggaggagaagagcagcgccctgctgcatgacctgcgggagattgaggcctggatctaccgcctgctgcggagccctgtgcctgtgtctggccagaagagggtggacatcgaggtgctgccccaggagctgcagcctgccctgacctttgccctgcctgaccccagccgcttcaccctggtggacttccccctgcacctgcccctggagctgctgggcgtggatgcctgcctgcaggtgctgacctgcatcctgctggagcacaaggtggtgctgcagagccgggactacaatgccctgtccatgtctgtgatggcctttgtggccatgatctaccccctggagtacatgtttcctgtgatccccctgctgcccacctgcatggccagcgctgagcagctgctgctggcccccaccccctacatcattggagtgcctgccagcttcttcctgtacaagctggacttcaagatgccagatgatgtgtggctggtggacctggacagcaacagagtgattgcccccaccaatgctgaggtgctgcccatcctgcctgagcctgagagcctggagctgaagaagcacctgaagcaggccctggcctccatgagcctgaacacccagcccatcctgaacctggagaagttccacgagggccaggagatccccctgctgctgggccggcccagcaatgacctgcagagcacccccagcacagagttcaaccccctcatctatggaaatgatgtggacagcgtggatgtggccaccagggtggccatggtgcgcttcttcaacagcgccaacgtgctgcagggcttccagatgcacaccaggaccctgcggctcttccccaggcctgtggtggccttccaggccggcagcttcctggccagccggccccggcagaccccatttgctgagaagctggcccggacccaggccgtggagtactttggagagtggatcctgaaccccaccaactatgccttccagaggatccacaacaacatgtttgatcctgccctgattggagacaagcccaagtggtacgcccaccagctgcagcccatccactacagagtgtatgacagcaacagccagctggccgaggccctgtctgtgcccccagagcgggacagcgacagcgagcccacagatgattctggcagtgacagcatggactatgatgacagcagcagcagctacagcagcctgggggactttgtgtctgagatgatgaagtgtgacatcaatggagacacccccaacgtggaccccctgacccatgctgccctgggagatgccagcgaggtggagattgatgagctgcagaaccagaaggaggccgaggagcccggcccagattctgagaacagccaggagaacccccccctgcggagcagcagcagcaccacagccagcagcagccccagcaccgtcatccatggagccaacagcgagcctgctgacagcacagagatggatgacaaggctgctgtgggcgtgtccaagcccctgcccagcgtgcccccatccatcggcaagagcaatgtggaccggcggcaggccgagatcggggagggcgcccagaagctgctgcggcccaacagcctgcggctggccagtgacagtgatgctgagagtgacagccgggccagcagccccaacagcacagtgagcaacaccagcacagagggctttggaggcatcatgagctttgccagcagcctgtacagaaaccacagcaccagcttcagcctgagcaacctgaccctgcccaccaagggggcccgggagaaggccacccccttccccagcctgaagggcaacagaagagccctggtggaccagaagagcagcgtcatcaagcacagccccaccgtgaagcgggagccccccagcccccagggccgcagcagcaacagcagcgagaaccagcagttcctgaaggaggtggtgcacagcgtgctggatggccagggcgtgggctggctgaacatgaagaaggtgcggcggctgctggagagcgagcagctgcgggtgtttgtgctgagcaagctgaacaggatggtgcagagtgaagatgatgcccggcaggacatcatcccagatgtggagatcagcaggaaggtgtacaagggcatgctggacctgctgaagtgcaccgtgctgagcctggagcagagctatgcccacgccggcctgggcggcatggccagcatcttcggcctgctggagatcgcccagacccactactacagcaaggagccagacaagaggaagaggagccccacagagagcgtgaacacccctgtgggcaaggaccccggcctggccggccgcggggaccccaaggccatggcccagctgcgggtgccccagctgggcccccgggcccccagcgccaccgggaagggccccaaggagctggacaccaggagcctgaaggaggagaacttcatcgccagcatcggccctgaggtgatcaagcctgtgtttgacctgggggagacagaggagaagaagagccagatctctgctgacagcggcgtgtccctgaccagcagcagccagaggacagaccaggacagcgtgattggagtgtccccagctgtgatgatccgcagcagcagccaggacagcgaggtgtccacagtggtgagcaacagcagcggggagaccctgggcgctgacagcgacctgagcagcaatgctggagatggccctggaggagagggctctgtgcacctggccagcagccggggcaccctgagtgacagcgagattgagaccaacagcgccaccagcaccatctttgggaaggcccacagcctgaagcccagcatcaaggagaagctggccggcagccccatccgcaccagtgaagatgtgtcccagagggtgtacctgtatgagggcctgctgggcaaggagaggagcaccctgtgggaccagatgcagttctgggaggatgccttcctggatgctgtgatgctggagcgggagggcatgggcatggaccagggcccccaggagatgattgaccgctacctgagcctgggggagcatgacaggaagaggctggaggatgatgaagatcggctgctggccaccctgctgcacaacctgatctcctacatgctgctgatgaaggtgaacaagaatgacatcaggaagaaggtgcggcggctgatgggcaagagccacatcggcctggtgtacagccagcagatcaatgaggtgctggaccagctggccaacctgaatggccgggacctgagcatctggagcagcggcagccgccacatgaagaagcagacctttgtggtgcatgctggaacagacaccaacggggacatcttcttcatggaggtgtgtgatgactgtgtggtgctgcggagcaacattggaacagtgtatgagcgctggtggtatgagaagctgatcaacatgacctactgccccaagaccaaggtgctgtgcctgtggaggagaaatggaagtgagacccagctgaacaagttctacaccaagaagtgccgggagctgtactactgtgtgaaggacagcatggagagagctgctgcccggcagcagagcatcaagccaggccctgagctgggcggggagttccctgtgcaggacctgaagacaggagagggcggcctgctgcaggtgaccctggagggcatcaacctgaagttcatgcacaaccagttcctgaagctgaagaagtggtag

SEQ ID NO: 158837 - DNA, 4698 bp, synthetic construct
  misc_feature 1..4698: note = Description of Artificial Sequence: Synthetic coding sequence
  source 1..4698: mol_type = other DNA
atggtgcagaagaagaagttctgcccccggctgctggactacctggtgattgtgggcgcccggcaccccagcagtgacagcgtggcccagaccccagagctgctgcggcgctaccccctggaggaccacacagagttccccctgcccccagatgtggtgttcttctgccagcctgagggctgcctgtctgtgcggcagaggaggatgagcctgagagatgacaccagctttgtgttcaccctgacagacaaggacaccggggtgaccaggtatggcatctgtgtgaacttctaccgctccttccagaagaggatcagcaaggagaagggggagggcggggccggcagccggggcaaggagggcacccacgccacctgtgccagcgaggagggcggcacagagagcagcgagagcggcagcagcctgcagcccctgtctgctgacagcaccccagatgtgaaccagagcccccggggcaagagaagagccaaggccggcagccgcagcaggaacagcaccctgaccagcctgtgtgtgctgagccactaccccttcttcagcaccttcagagaatgtctgtacaccctgaagaggctggtggactgctgcagcgagcggctgctgggcaagaagctgggcatcccccggggcgtgcagagggacaccatgtggaggatcttcaccggcagcctgctggtggaggagaagagcagcgccctgctgcatgacctgcgggagattgaggcctggatctaccgcctgctgcggagccctgtgcctgtgtctggccagaagagggtggacatcgaggtgctgccccaggagctgcagcctgccctgacctttgccctgcctgaccccagccgcttcaccctggtggacttccccctgcacctgcccctggagctgctgggcgtggatgcctgcctgcaggtgctgacctgcatcctgctggagcacaaggtggtgctgcagagccgggactacaatgccctgtccatgtctgtgatggcctttgtggccatgatctaccccctggagtacatgtttcctgtgatccccctgctgcccacctgcatggccagcgctgagcagctgctgctggcccccaccccctacatcattggagtgcctgccagcttcttcctgtacaagctggacttcaagatgccagatgatgtgtggctggtggacctggacagcaacagagtgattgcccccaccaatgctgaggtgctgcccatcctgcctgagcctgagagcctggagctgaagaagcacctgaagcaggccctggcctccatgagcctgaacacccagcccatcctgaacctggagaagttccacgagggccaggagatccccctgctgctgggccggcccagcaatgacctgcagagcacccccagcacagagttcaaccccctcatctatggaaatgatgtggacagcgtggatgtggccaccagggtggccatggtgcgcttcttcaacagcgccaacgtgctgcagggcttccagatgcacaccaggaccctgcggctcttccccaggcctgtggtggccttccaggccggcagcttcctggccagccggccccggcagaccccatttgctgagaagctggcccggacccaggccgtggagtactttggagagtggatcctgaaccccaccaactatgccttccagaggatccacaacaacatgtttgatcctgccctgattggagacaagcccaagtggtacgcccaccagctgcagcccatccactacagagtgtatgacagcaacagccagctggccgaggccctgtctgtgcccccagagcgggacagcgacagcgagcccacagatgattctggcagtgacagcatggactatgatgacagcagcagcagctacagcagcctgggggactttgtgtctgagatgatgaagtgtgacatcaatggagacacccccaacgtggaccccctgacccatgctgccctgggagatgccagcgaggtggagattgatgagctgcagaaccagaaggaggccgaggagcccggcccagattctgagaacagccaggagaacccccccctgcggagcagcagcagcaccacagccagcagcagccccagcaccgtcatccatggagccaacagcgagcctgctgacagcacagagatggatgacaaggctgctgtgggcgtgtccaagcccctgcccagcgtgcccccatccatcggcaagagcaatgtggaccggcggcaggccgagatcggggagggcgcccagaagctgctgcggcccaacagcctgcggctggccagtgacagtgatgctgagagtgacagccgggccagcagccccaacagcacagtgagcaacaccagcacagagggctttggaggcatcatgagctttgccagcagcctgtacagaaaccacagcaccagcttcagcctgagcaacctgaccctgcccaccaagggggcccgggagaaggccacccccttccccagcctgaaggtgtttggcctgaacaccctgatggagatcgtgacagaagctggccctggcagcggggagggcaacagaagagccctggtggaccagaagagcagcgtcatcaagcacagccccaccgtgaagcgggagccccccagcccccagggccgcagcagcaacagcagcgagaaccagcagttcctgaaggaggtggtgcacagcgtgctggatggccagggcgtgggctggctgaacatgaagaaggtgcggcggctgctggagagcgagcagctgcgggtgtttgtgctgagcaagctgaacaggatggtgcagagtgaagatgatgcccggcaggacatcatcccagatgtggagatcagcaggaaggtgtacaagggcatgctggacctgctgaagtgcaccgtgctgagcctggagcagagctatgcccacgccggcctgggcggcatggccagcatcttcggcctgctggagatcgcccagacccactactacagcaaggagccagacaagaggaagaggagccccacagagagcgtgaacacccctgtgggcaaggaccccggcctggccggccgcggggaccccaaggccatggcccagctgcgggtgccccagctgggcccccgggcccccagcgccaccgggaagggccccaaggagctggacaccaggagcctgaaggaggagaacttcatcgccagcatcggccctgaggtgatcaagcctgtgtttgacctgggggagacagaggagaagaagagccagatctctgctgacagcggcgtgtccctgaccagcagcagccagaggacagaccaggacagcgtgattggagtgtccccagctgtgatgatccgcagcagcagccaggacagcgaggtgtccacagtggtgagcaacagcagcggggagaccctgggcgctgacagcgacctgagcagcaatgctggagatggccctggaggagagggctctgtgcacctggccagcagccggggcaccctgagtgacagcgagattgagaccaacagcgccaccagcaccatctttgggaaggcccacagcctgaagcccagcatcaaggagaagctggccggcagccccatccgcaccagtgaagatgtgtcccagagggtgtacctgtatgagggcctgctgggcaaggagaggagcaccctgtgggaccagatgcagttctgggaggatgccttcctggatgctgtgatgctggagcgggagggcatgggcatggaccagggcccccaggagatgattgaccgctacctgagcctgggggagcatgacaggaagaggctggaggatgatgaagatcggctgctggccaccctgctgcacaacctgatctcctacatgctgctgatgaaggtgaacaagaatgacatcaggaagaaggtgcggcggctgatgggcaagagccacatcggcctggtgtacagccagcagatcaatgaggtgctggaccagctggccaacctgaatggccgggacctgagcatctggagcagcggcagccgccacatgaagaagcagacctttgtggtgcatgctggaacagacaccaacggggacatcttcttcatggaggtgtgtgatgactgtgtggtgctgcggagcaacattggaacagtgtatgagcgctggtggtatgagaagctgatcaacatgacctactgccccaagaccaaggtgctgtgcctgtggaggagaaatggaagtgagacccagctgaacaagttctacaccaagaagtgccgggagctgtactactgtgtgaaggacagcatggagagagctgctgcccggcagcagagcatcaagccaggccctgagctgggcggggagttccctgtgcaggacctgaagacaggagagggcggcctgctgcaggtgaccctggagggcatcaacctgaagttcatgcacaaccaggtgttcatcgagctgaaccacatcaagaagtgcaacacagtgcggggcgtgtttgtgctggaggagtttgtgcctgagatcaaggaggtggtgagccacaagtacaagacccccatggcccacgagatctgctacagcgtgctgtgcctcttctcctatgtggccgctgtgcacagcagcgaggaggacctgcggaccccacccaggcctgtgagcagctag

SEQ ID NO: 158838 - DNA, 588 bp, synthetic construct
  misc_feature 1..588: note = Description of Artificial Sequence: Synthetic coding sequence
  source 1..588: mol_type = other DNA
atgggcagccagagcagcaaggcccccagaggagatgtgacagctgaggaggccgccggggccagccctgccaaggccaacggccaggagaatggacatgtgaagagcaatggagacctgagccccaagggggagggggagagcccccctgtgaatggaacagatgaagctgctggggccactggagatgccattgaaccagccccacccagccagggcgctgaggccaagggggaggtgccccccaaggagacccccaagaagaagaagaagttctccttcaagaagcccttcaagctgagcggcctgtccttcaagaggaacaggaaggagggcggcggggacagcagcgccagcagccccacagaggaggagcaggagcagggcgagattggagcctgcagtgatgagggcacagcccaggagggcaaggccgccgccaccccagagagccaggagccccaggccaagggagctgaggccagcgctgccagcgaggaggaggccggcccccaggccacagagcccagcacccccagcggccctgagagcggccccaccccagccagcgctgagcagaatgaatag

SEQ ID NO: 158839 - DNA, 1377 bp, synthetic construct
  misc_feature 1..1377: note = Description of Artificial Sequence: Synthetic coding sequence
  source 1..1377: mol_type = other DNA
atgagcaatgatggccgcagcaggaacagagaccggcgctatgatgaggtgcccagcgacctgccctaccaggacaccaccatccgcacccaccccaccctgcatgattctgaaagagctgtgtctgctgaccccctgcccccaccacccctgcccctgcagcccccatttggaccagacttctacagcagtgacacagaggagcccgccatcgccccagacctgaagcctgtgagaagatttgtgcctgacagctggaagaacttcttccggggcaagaagaaggaccctgagtgggacaagcctgtgtctgacatccgctacatcagtgatggagtggagtgcagccccccagccagccctgcccggcccaaccacaggagccccctgaacagctgcaaggacccctatggaggcagcgagggcaccttcagcagcaggaaggaggctgatgctgtgttcccccgggacccctacggcagcctggacagacacacccagacagtgaggacctacagcgagaaggtggaggagtacaacctgcgctacagctacatgaagtcctgggccggcctgctgcgcatcctgggcgtggtggagctgctgctgggcgctggggtgtttgcctgtgtgacagcctacatccacaaggacagcgagtggtacaacctgtttggctacagccagccctacggcatgggcggcgtgggcggcctgggctccatgtatggaggctactactacacaggccccaagaccccatttgtgctggtggtggccggcctggcctggatcaccaccatcatcatcctggtgctgggcatgtccatgtactaccgcaccatcctgctggacagcaactggtggcccctgacagaatttggcatcaacgtggccctcttcatcctgtacatggctgctgccatcgtgtatgtgaatgacaccaacagaggaggcctgtgctactaccccctcttcaacacccctgtgaatgctgtgttctgccgggtggagggcggccagattgctgccatgatcttcctgtttgtgaccatgattgtgtacctgatcagcgccctggtgtgcctgaagctgtggaggcatgaggccgcccggcggcaccgggagtacatggagcagcaggagatcaatgagcccagcctgagcagcaagaggaagatgtgtgagatggccaccagcggggaccggcagagggacagcgaggtgaacttcaaggagctgaggacagccaagatgaagccagagctgctgagcggccacatccccccacccaggcctgccaacttctttgtgttcctggtggagatgggcttccaccgggtgtcccaggatgacctggacctgctgaccagctag

SEQ ID NO: 158840 - DNA, 1677 bp, synthetic construct
  misc_feature 1..1677: note = Description of Artificial Sequence: Synthetic coding sequence
  source 1..1677: mol_type = other DNA
atgagcaatgatggccgcagcaggaacagagaccggcgctatgatgaggtgcccagcgacctgccctaccaggacaccaccatccgcacccaccccaccctgcatgattctgaaagagctgtgtctgctgaccccctgcccccaccacccctgcccctgcagcccccatttggaccagacttctacagcagtgacacagaggagcccgccatcgccccagacctgaagcctgtgagaagatttgtgcctgacagctggaagaacttcttccggggcaagaagaaggaccctgagtgggacaagcctgtgtctgacatccgctacatcagtgatggagtggagtgcagccccccagccagccctgcccggcccaaccacaggagccccctgaacagctgcaaggacccctatggaggcagcgagggcaccttcagcagcaggaaggaggctgatgctgtgttcccccgggacccctacggcagcctggacagacacacccagacagtgaggacctacagcgagaaggtggaggagtacaacctgcgctacagctacatgaagtcctgggccggcctgctgcgcatcctgggcgtggtggagctgctgctgggcgctggggtgtttgcctgtgtgacagcctacatccacaaggacagcgagtggtacaacctgtttggctacagccagccctacggcatgggcggcgtgggcggcctgggctccatgtatggaggctactactacacaggccccaagaccccatttgtgctggtggtggccggcctggcctggatcaccaccatcatcatcctggtgctgggcatgtccatgtactaccgcaccatcctgctggacagcaactggtggcccctgacagaatttggcatcaacgtggccctcttcatcctgtacatggctgctgccatcgtgtatgtgaatgacaccaacagaggaggcctgtgctactaccccctcttcaacacccctgtgaatgctgtgttctgccgggtggagggcggccagattgctgccatgatcttcctgtttgtgaccatgattgtgtacctgatcagcgccctggtgtgcctgaagctgtggaggcatgaggccgcccggcggcaccgggagtacatggagcagcaggagatcaatgagcccagcctgagcagcaagaggaagatgtgtgagatggccaccagcggggaccggcagagggacagcgaggtgaacttcaaggagctgaggacagccaagatgaagccagagctgctgagcggccacatccccccaggccacatccccaagcccatcgtgatgccagactatgtggccaagtaccctgtgatccagacagatgatgagcgggagcgctacaaggctgtgttccaggaccagttcagcgagtacaaggagctgtctgctgaggtgcaggccgtgctgaggaagtttgatgagctggatgctgtgatgagccggctgccccaccacagcgagagccggcaggagcacgagcgcatcagccgcatccacgaggagttcaagaagaagaagaatgaccccaccttcctggagaagaaggagcgctgtgactacctgaagaacaagctgagccacatcaagcagaggatccaggagtatgacaaggtgatgaactgggatgtgcagggctacagctag

SEQ ID NO: 158841 - DNA, 1329 bp, synthetic construct
  misc_feature 1..1329: note = Description of Artificial Sequence: Synthetic coding sequence
  source 1..1329: mol_type = other DNA
atgagcaatgatggccgcagcaggaacagagaccggcgctatgatgaggtgcccagcgacctgccctaccaggacaccaccatccgcacccaccccaccctgcatgattctgaaagagctgtgtctgctgaccccctgcccccaccacccctgcccctgcagcccccatttggaccagacttctacagcagtgacacagaggagcccgccatcgccccagacctgaagcctgtgagaagatttgtgcctgacagctggaagaacttcttccggggcaagaagaaggaccctgagtgggacaagcctgtgtctgacatccgctacatcagtgatggagtggagtgcagccccccagccagccctgcccggcccaaccacaggagccccctgaacagctgcaaggacccctatggaggcagcgagggcaccttcagcagcaggaaggaggctgatgctgtgttcccccgggacccctacggcagcctggacagacacacccagacagtgaggacctacagcgagaaggtggaggagtacaacctgcgctacagctacatgaagtcctgggccggcctgctgcgcatcctgggcgtggtggagctgctgctgggcgctggggtgtttgcctgtgtgacagcctacatccacaaggacagcgagtggtacaacctgtttggctacagccagccctacggcatgggcggcgtgggcggcctgggcagcatcgccctggtgtgcctgaagctgtggaggcatgaggccgcccggcggcaccgggagtacatggagcagcaggagatcaatgagcccagcctgagcagcaagaggaagatgtgtgagatggccaccagcggggaccggcagagggacagcgaggtgaacttcaaggagctgaggacagccaagatgaagccagagctgctgagcggccacatccccccaggccacatccccaagcccatcgtgatgccagactatgtggccaagtaccctgtgatccagacagatgatgagcgggagcgctacaaggctgtgttccaggaccagttcagcgagtacaaggagctgtctgctgaggtgcaggccgtgctgaggaagtttgatgagctggatgctgtgatgagccggctgccccaccacagcgagagccggcaggagcacgagcgcatcagccgcatccacgaggagttcaagaagaagaagaatgaccccaccttcctggagaagaaggagcgctgtgactacctgaagaacaagctgagccacatcaagcagaggatccaggagtatgacaaggtgatgaactgggatgtgcagggctacagctag

SEQ ID NO: 158842 - DNA, 1641 bp, synthetic construct
  misc_feature 1..1641: note = Description of Artificial Sequence: Synthetic coding sequence
  source 1..1641: mol_type = other DNA
atgagcaatgatggccgcagcaggaacagagaccggcgctatgatgaggtgcccagcgacctgccctaccaggacaccaccatccgcacccaccccaccctgcatgattctgaaagagctgtgtctgctgaccccctgcccccaccacccctgcccctgcagcccccatttggaccagacttctacagcagtgacacagaggagcccgccatcgccccagacctgaagcctgtgagaagatttgtgcctgacagctggaagaacttcttccggggcaagaagaaggaccctgagtgggacaagcctgtgtctgacatccgctacatcagtgatggagtggagtgcagccccccagccagccctgcccggcccaaccacaggagccccctgaacagctgcaaggacccctatggaggcagcgagggcaccttcagcagcaggaaggaggctgatgctgtgttcccccgggacccctacggcagcctggacagacacacccagacagtgaggacctacagcgagaaggtggaggagtacaacctgcgctacagctacatgaagtcctgggccggcctgctgcgcatcctgggcgtggtggagctgctgctgggcgctggggtgtttgcctgtgtgacagcctacatccacaaggacagcgagtggtacaacctgtttggctacagccagccctacggcatgggcggcgtgggcggcctgggctccatgtatggaggctactactacacaggccccaagaccccatttgtgctggtggtggccggcctggcctggatcaccaccatcatcatcctggtgctgggcatgtccatgtactaccgcaccatcctgctggacagcaactggtggcccctgacagaatttggcatcaacgtggccctcttcatcctgtacatggctgctgccatcgtgtatgtgaatgacaccaacagaggaggcctgtgctactaccccctcttcaacacccctgtgaatgctgtgttctgccgggtggagggcggccagattgctgccatgatcttcctgtttgtgaccatgattgtgtacctgatcagcgccctggtgtgcctgaagctgtggaggcatgaggccgcccggcggcaccgggagtacatggagcagcaggagtgtgagatggccaccagcggggaccggcagagggacagcgaggtgaacttcaaggagctgaggacagccaagatgaagccagagctgctgagcggccacatccccccaggccacatccccaagcccatcgtgatgccagactatgtggccaagtaccctgtgatccagacagatgatgagcgggagcgctacaaggctgtgttccaggaccagttcagcgagtacaaggagctgtctgctgaggtgcaggccgtgctgaggaagtttgatgagctggatgctgtgatgagccggctgccccaccacagcgagagccggcaggagcacgagcgcatcagccgcatccacgaggagttcaagaagaagaagaatgaccccaccttcctggagaagaaggagcgctgtgactacctgaagaacaagctgagccacatcaagcagaggatccaggagtatgacaaggtgatgaactgggatgtgcagggctacagctag

SEQ ID NO: 158843 - DNA, 1551 bp, synthetic construct
  misc_feature 1..1551: note = Description of Artificial Sequence: Synthetic coding sequence
  source 1..1551: mol_type = other DNA
atgagcaatgatggccgcagcaggaacagagaccggcgctatgatgaggtgcccagcgacctgccctaccaggacaccaccatccgcacccaccccaccctgcatgattctgaaagagctgtgtctgctgaccccctgcccccaccacccctgcccctgcagcccccatttggaccagacttctacagcagtgacacagaggagcccgccatcgccccagacctgaagcctgtgagaagatttgtgcctgacagctggaagaacttcttccggggcaagaagaaggaccctgagtgggacaagcctgtgtctgacatccgctacatcagtgatggagtggagtgcagccccccagccagccctgcccggcccaaccacaggagccccctgaacagctgcaaggacccctatggaggcagcgagggcaccttcagcagcaggaaggaggctgatgctgtgttcccccgggacccctacggcagcctggacagacacacccagacagtgaggacctacagcgagaaggtggaggagtacaacctgcgctacagctacatgaagtcctgggccggcctgctgcgcatcctgggcgtggtggagctgctgctgggcgctggggtgtttgcctgtgtgacagcctacatccacaaggacagcgagtggtacaacctgtttggctacagccagccctacggcatgggcggcgtgggcggcctgggctccatgtatggaggctactactacacaggccccaagaccccatttgtgctggtggtggccggcctggcctggatcaccaccatcatcatcctggtgctgggcatgtccatgtactaccgcaccatcctgctggacagcaactggtggcccctgacagaatttggcatcaacgtggccctcttcatcctgtacatggctgctgccatcgtgtatgtgaatgacaccaacagaggaggcctgtgctactaccccctcttcaacacccctgtgaatgctgtgttctgccgggtggagggcggccagattgctgccatgatcttcctgtttgtgaccatgattgtgtacctgatcagcgccctggtgtgcctgaagctgtggaggcatgaggccgcccggcggcaccgggagtacatggagcagcaggagatcaatgagcccagcctgagcagcaagaggaagatgtgtgagatggccaccagcggggaccggcagagggacagcgaggtgaacttcaaggagctgaggacagccaagatgaagccagagctgctgagcggccacatccccccaggccacatccccaagcccatcgtgatgccagactatgtggccaagtaccctgtgatccagacagatgatgagcgggagcgctacaaggctgtgttccaggaccagttcagcgagtacaaggagctgtctgctgaggtgcaggccgtgctgaggaagtttgatgagctggatgctgtgatgagccggctgccccaccacagcgagagccggcaggagcacgagcgcatcagccgcatccacgaggagttcaagaagaagtag

SEQ ID NO: 158844 - DNA, 438 bp, synthetic construct
  misc_feature 1..438: note = Description of Artificial Sequence: Synthetic coding sequence
  source 1..438: mol_type = other DNA
atgagcaatgatggccgcagcaggaacagagaccggcgctatgatgaggtgcccagcgacctgccctaccaggacaccaccatccgcacccaccccaccctgcatgattctgaaagagctgtgtctgctgaccccctgcccccaccacccctgcccctgcagcccccatttggaccagacttctacagcagtgacacagaggagcccgccatcgccccagacctgaagcctgtgagaagatttgtgcctgacagctggaagaacttcttccggggcaagaagaaggaccctgagtgggacaagcctgtgtctgacatccgctacatcagtgatggagtggagtgcagccccccagccagccctgcccggcccaaccacaggagccccctgaacagctgcaaggacccctatggaggcagcgagggcaccttctcctag

SEQ ID NO: 158845 - DNA, 1206 bp, synthetic construct
  misc_feature 1..1206: note = Description of Artificial Sequence: Synthetic coding sequence
  source 1..1206: mol_type = other DNA
atggaggaccccagcggggcccgggagccccgggcccggccccgggagcgggaccctggaagaagaccccacccagaccagggccgcacccatgaccggccccgggacaggcctggggaccccaggaggaagaggagcagtgatggcaacagaagaagagatggagaccgggaccctgagcgggaccaggagagagatggcaacagagacaggaacagagaccgggagcgggagcgggagcgggagcgggaccctgaccggggcccccggcgggacacccacagagatgctggccccagggctggggagcacggcgtgtgggagaagccccggcagagcaggaccagagatggagcccggggcctgacctgggatgctgctgcccctcctggccctgccccctgggaggcccctgagcccccccagccccagaggaagggggaccctggaagaagaagacctgagagcgagccccccagcgagcgctacctgcccagcaccccccggcccggccgggaggaggtggagtactaccagagcgaggccgagggcctgctggagtgccacaagtgcaagtacctgtgcaccggccgggcctgctgccagatgctggaggtgctgctgaacctgctgatcctggcctgcagctctgtgtcctacagcagcactggaggctacacaggcatcaccagcctgggcggcatctactactaccagtttggaggagcctacagcggctttgatggagcagatggagagaaggcccagcagctggatgtgcagttctaccagctgaagctgcccatggtgacagtggccatggcctgcagcggggccctgacagccctgtgctgcctgtttgtggccatgggcgtgctgcgggtgccctggcactgccccctgctgctggtgacagagggcctgctggacatgctgattgctgggggctacatcccagccctgtacttctacttccactacctgtctgctgcctacggcagccctgtgtgcaaggagcggcaggccctgtaccagagcaagggctacagcggcttcggctgcagcttccatggagctgacattggagctggcatctttgctgccctgggcatcgtggtgtttgccctgggcgctgtgctggccatcaagggctacaggaaggtgaggaagctgaaggagaagccagctgagatgtttgagttctag

SEQ ID NO: 158846 - DNA, 1233 bp, synthetic construct
  misc_feature 1..1233: note = Description of Artificial Sequence: Synthetic coding sequence
  source 1..1233: mol_type = other DNA
atggaggaccccagcggggcccgggagccccgggcccggccccgggagcgggaccctggaagaagaccccacccagaccagggccgcacccatgaccggccccgggacaggcctggggaccccaggaggaagaggagcagtgatggcaacagaagaagagatggagaccgggaccctgagcgggaccaggagagagatggcaacagagacaggaacagagaccgggagcgggagcgggagcgggagcgggaccctgaccggggcccccggcgggacacccacagagatgctggccccagggctggggagcacggcgtgtgggagaagccccggcagagcaggaccagagatggagcccggggcctgacctgggatgctgctgcccctcctggccctgccccctgggaggcccctgagcccccccagccccagaggaagggggaccctggaagaagaagacctgagagcgagccccccagcgagcgctacctgcccagcaccccccggcccggccgggaggaggtggagtactaccagagcgaggccgagggcctgctggagtgccacaagtgcaagtacctgtgcaccggccggggcgtggtgcagatcgtggaggtggtgctgaatggcatggtgctgatctgcatcgtggccagctactttgtgctggccggcttcagcgccagcttcagcagcggcggcggcttcggcaacaactactacagcccctttgagggcacagagctggagcaggtgcggcagctggaccagcagtacaccatcctgcggagccccctcatctacggcggcgtggccgtgtccctgggcctgggcgtgctgaccatgggcgtgctgctgcagggcgccaagagcaggaccatgctgagcggcaagtggctgctgacagaggccgccttcagcctgctggccgctgtgggctactgcaccggcatcggcgtgtacctgcacgtggccctgcagatcaacagcacagacacctgcaagacccgggagcggctgtatgccaggaagggcctgacctggatggactgccagctggccggcacagatggagctgctgccacctttgcctgcctgctggtgatcatgtatggagcctctgtggtgctggccctgcggagctaccgggagcagaagcgctacaagggcagccgggagcagcccggcagctacagtgatgcccctgagtacctgtggagcggcaccctgtag

SEQ ID NO: 158847 - DNA, 978 bp, synthetic construct
  misc_feature 1..978: note = Description of Artificial Sequence: Synthetic coding sequence
  source 1..978: mol_type = other DNA
atggatggcagcaatgtgaccagctttgtggtggaggagcccaccaacatcagcactggaagaaatgcctctgtgggcaatgcccaccggcagatccccatcgtgcactgggtgatcatgagcatcagccctgtgggctttgtggagaatggcatcctgctgtggttcctgtgcttcaggatgagaagaaaccccttcaccgtgtacatcacccacctgagcattgctgacatcagcctgctcttctgcatcttcatcctgagcattgattatgccctggactatgagctgagcagcggccactactacaccatcgtgaccctgtctgtgaccttcctgtttggctacaacacaggcctgtacctgctgacagccatctctgtggagcgctgcctgtctgtgctgtaccccatctggtaccgctgccaccggcccaagtaccagagcgccctggtgtgtgccctgctgtgggccctgagctgcctggtgaccaccatggagtatgtgatgtgcatcgaccgggaggaggagagccacagcagaaatgactgccgggccgtcatcatcttcatcgccatcctgtccttcctggtgttcacccccctgatgctggtgagcagcaccatcctggtggtgaagatcaggaagaacacctgggccagccacagcagcaagctgtacatcgtcatcatggtgaccatcatcatcttcctgatctttgccatgcccatgaggctgctgtacctgctgtactatgagtactggagcaccttcggcaacctgcaccacatcagcctgctcttcagcaccatcaacagcagcgccaaccccttcatctacttctttgtgggcagcagcaagaagaagcgcttcaaggagagcctgaaggtggtgctgacccgggccttcaaggatgagatgcagccccggcggcagaaggacaactgcaacacagtgacagtggagaccgtggtgtag

SEQ ID NO: 158848 - DNA, 1137 bp, synthetic construct
  misc_feature 1..1137: note = Description of Artificial Sequence: Synthetic coding sequence
  source 1..1137: mol_type = other DNA
atggtgtggggcaagatctgctggttcagccagagagctggctggacagtgtttgctgagagccagatcagcctgagctgcagcctgtgcctgcacagcggggaccaggaggcccagaaccccaacctggtgtcccagctgtgtggggtcttcctgcagaatgagaccaatgagaccatccacatgcagatgtccatggctgtgggccagcaggccctgcccctgaacatcatcgcccccaaggctgtgctggtgtccctgtgtggggtgctgctgaatggaacagtgttctggctgctgtgctgcggggccaccaacccctacatggtgtacatcctgcacctggtggccgcagatgtgatctacctgtgctgcagcgctgtgggcttcctgcaggtgaccctgctgacctaccatggagtggtgttcttcatcccagacttcctggccatcctgagccccttctcctttgaggtgtgcctgtgcctgctggtggccatcagcacagagcgctgtgtgtgtgtgctcttccccatctggtaccgctgccaccggcccaagtacaccagcaatgtggtgtgcaccctcatctggggcctgcccttctgcatcaacatcgtgaagagcctcttcctgacctactggaagcacgtgaaggcctgtgtgatcttcctgaagctgagcggcctcttccacgccatcctgagcctggtgatgtgtgtgagcagcctgaccctgctgatccgcttcctgtgctgcagccagcagcagaaggccaccagggtgtatgctgtggtgcagatcagcgcccccatgttcctgctgtgggccctgcccctgtctgtggcccccctcatcacagacttcaagatgtttgtgaccaccagctacctgatcagcctcttcctgatcatcaacagcagcgccaaccccatcatctacttctttgtgggcagcctgaggaagaagaggctgaaggagagcctgcgggtcatcctgcagagggccctggccgacaagccagaggtgggcaggaacaagaaggccgccggcatcgaccccatggagcagccccacagcacccagcacgtggagaacctgctgccccgggagcaccgggtggatgtggagacctag

SEQ ID NO: 158849 - DNA, 1137 bp, synthetic construct; identical to SEQ ID NO: 158848
  misc_feature 1..1137: note = Description of Artificial Sequence: Synthetic coding sequence
  source 1..1137: mol_type = other DNA

SEQ ID NO: 158850 - DNA, 1137 bp, synthetic construct; identical to SEQ ID NO: 158848
  misc_feature 1..1137: note = Description of Artificial Sequence: Synthetic coding sequence
  source 1..1137: mol_type = other DNA

SEQ ID NO: 158851 - DNA, 1137 bp, synthetic construct; identical to SEQ ID NO: 158848
  misc_feature 1..1137: note = Description of Artificial Sequence: Synthetic coding sequence
  source 1..1137: mol_type = other DNA

SEQ ID NO: 158852 - DNA, 1137 bp, synthetic construct; identical to SEQ ID NO: 158848
  misc_feature 1..1137: note = Description of Artificial Sequence: Synthetic coding sequence
  source 1..1137: mol_type = other DNA

SEQ ID NO: 158853 - DNA, 1137 bp, synthetic construct; identical to SEQ ID NO: 158848
  misc_feature 1..1137: note = Description of Artificial Sequence: Synthetic coding sequence
  source 1..1137: mol_type = other DNA

SEQ ID NO: 158854 - DNA, 1137 bp, synthetic construct; identical to SEQ ID NO: 158848
  misc_feature 1..1137: note = Description of Artificial Sequence: Synthetic coding sequence
  source 1..1137: mol_type = other DNA

SEQ ID NO: 158855 - DNA, 1137 bp, synthetic construct; identical to SEQ ID NO: 158848
  misc_feature 1..1137: note = Description of Artificial Sequence: Synthetic coding sequence
  source 1..1137: mol_type = other DNA

SEQ ID NO: 158856 - DNA, 966 bp, synthetic construct
  misc_feature 1..966: note = Description of Artificial Sequence: Synthetic coding sequence
  source 1..966: mol_type = other DNA
atgaaccagaccctgaacagcagcggcaccgtggagagcgccctgaactacagccggggcagcacagtgcacacagcctacctggtgctgagcagcctggccatgttcacctgcctgtgtggcatggccggcaacagcatggtgatctggctgctgggcttcaggatgcacaggaaccccttctgcatctacatcctgaacctggccgctgctgacctgctcttcctgttctccatggccagcaccctgagcctggagacccagcccctggtgaacaccacagacaaggtgcatgagctgatgaagaggctgatgtactttgcctacacagtgggcctgagcctgctgacagccatcagcacccagcgctgcctgtctgtgctcttccccatctggttcaagtgccaccggcccaggcacctgagcgcctgggtgtgtggcctgctgtggaccctgtgcctgctgatgaatggcctgaccagcagcttctgcagcaagttcctgaagttcaatgaagatcgctgcttccgggtggacatggtgcaggccgccctgatcatgggcgtgctgacccctgtgatgaccctgagcagcctgaccctgtttgtgtgggtgcggcgcagcagccagcagtggaggcggcagcccacccggctgtttgtggtggtgctggcctctgtgctggtgttcctgatctgcagcctgcccctgagcatctactggtttgtgctgtactggctgagcctgcccccagagatgcaggtgctgtgcttcagcctgagccggctgagcagctctgtgagcagcagcgccaaccctgtgatctacttcctggtgggcagccgccgcagccaccggctgcccaccaggagcctgggcaccgtgctgcagcaggccctgcgggaggagcctgagctggagggcggggagacccccaccgtgggcaccaatgagatgggcgcctag

SEQ ID NO: 158857 - DNA, 936 bp, synthetic construct
  misc_feature 1..936: note = Description of Artificial Sequence: Synthetic coding sequence
  source 1..936: mol_type = other DNA
atggagccccgggaggccggccagcacgtgggcgccgccaacggggcccaggaggatgtggccttcaacctgatcatcctgagcctgacagagggcctgggcctgggcggcctgctgggcaatggagctgtgctgtggctgctgagcagcaatgtgtacagaaacccctttgccatctacctgctggatgtggcctgtgccgacctgatcttcctgggctgccacatggtggccatcgtgcctgacctgctgcagggccgcctggacttccctggctttgtgcagaccagcctggccaccctgcgcttcttctgctacatcgtgggcctgagcctgctggccgctgtgtctgtggagcagtgcctggccgccctcttccctgcctggtacagctgcagaagacccaggcacctgaccacctgtgtgtgtgccctgacctgggccctgtgcctgctgctgcacctgctgctgagcggggcctgcacccagttctttggagagcccagccgccacctgtgcaggaccctgtggctggtggccgctgtgctgctggccctgctgtgctgcaccatgtgtggggccagcctgatgctgctgctgcgggtggagcggggcccccagaggcccccaccccggggcttccctggcctcatcctgctgactgtgctgctcttcctgttctgtggcctgcccttcggcatctactggctgagcaggaacctgctgtggtacatcccccactacttctaccacttctccttcctgatggctgctgtgcactgtgccgccaagcctgtggtgtacttctgcctgggcagcgcccagggccgccgcctgcccctgcggctggtgctgcagagggccctgggagatgaagctgagctgggcgctgtgcgggagaccagcagaagaggcctggtggacattgctgcctag

SEQ ID NO: 158858 - DNA, 939 bp, synthetic construct
  misc_feature 1..939: note = Description of Artificial Sequence: Synthetic coding sequence
  source 1..939: mol_type = other DNA
atgatggagccccgggaggccggccagcacgtgggcgccgccaatggagcccaggaggatgtggccttcaacctgatcatcctgagcctgacagagggcctgggcctgggcggcctgctgggcaatggagctgtgctgtggctgctgagcagcaatgtgtacagaaacccctttgccatctacctgctggatgtggcctgtgccgacctgatcttcctgggctgccacatggtggccatcgtgcctgacctgctgcagggccgcctggacttccctggctttgtgcagaccagcctggccaccctgcgcttcttctgctacatcgtgggcctgagcctgctggccgctgtgtctgtggagcagtgcctggccgccctcttccctgcctggtacagctgccggcggcccaggcacctgaccacctgtgtgtgtgccctgacctgggccctgtgcctgctgctgcacctgctgctgagcggggcctgcacccagttcttcggggagcccagccgccacctgtgcaggaccctgtggctggtggccgctgtgctgctggccctgctgtgctgcaccatgtgtggggccagcctgatgctgctgctgcgggtggagcggggcccccagaggcccccaccccggggcttccctggcctcatcctgctgactgtgctgctcttcctgttctgtggcctgcccttcggcatctactggctgagcaggaacctgctgtggtacatcccccactacttctaccacttctccttcctgatggctgctgtgcactgtgccgccaagcctgtggtgtacttctgcctgggcagcgcccagggccggcggctgcccctgcggctggtgctgcagagggccctgggagatgaggccgagctgggcgctgtgcgggagaccagccggcggggcctggtggacattgctgcctag

SEQ ID NO: 158859 - DNA, 1032 bp, synthetic construct
  misc_feature 1..1032: note = Description of Artificial Sequence: Synthetic coding sequence
  source 1..1032: mol_type = other DNA
atggccggcaactgctcctgggaggcccaccctggcaacagaaacaagatgtgccccggcctgtctgaggcccctgagctgtacagccggggcttcctgaccatcgagcagatcgccatgctgcccccacctgctgtgatgaactacatcttcctgctgctgtgcctgtgtggcctggtgggcaatggcctggtgctgtggttcttcggcttcagcatcaagaggaaccccttcagcatctacttcctgcacctggccagcgcagatgtgggctacctgttcagcaaggctgtgttcagcatcctgaacacaggaggcttcctgggcacctttgctgactacatccgctctgtgtgccgggtgctgggcctgtgcatgttcctgactggagtgtccctgctgcctgctgtgtctgctgagcgctgtgccagcgtcatcttccctgcctggtactggaggcggcggcccaagaggctgtctgctgtggtgtgtgccctgctgtgggtgctgagcctgctggtgacctgcctgcacaactacttctgtgtgttcctgggccgcggggcccctggggccgcctgccgccacatggacatcttcctgggcatcctgctcttcctgctgtgctgccccctgatggtgctgccctgcctggccctgatcctgcacgtggagtgccgggcccggcggcggcagaggtctgccaagctgaaccacgtgatcctggccatggtgtctgtgttcctggtgagcagcatctacctgggcatcgactggttcctgttctgggtgttccagatcccagcccccttcccagaatatgtgacagacctgtgcatctgcatcaacagcagcgccaagcccatcgtgtacttcctggccggccgggacaagagccagaggctgtgggagcccctgcgggtggtgttccagagggccctgagagatggagctgagctgggggaggccggcggcagcacccccaacacagtgaccatggagatgcagtgccccccaggaaatgccagctag

SEQ ID NO: 158860 - DNA, 948 bp, synthetic construct
  misc_feature 1..948: note = Description of Artificial Sequence: Synthetic coding sequence
  source 1..948: mol_type = other DNA
atggccggcaactgctcctgggaggcccaccctggcaacagaaacaagatgtgccccggcctgtctgaggcccctgagctgtacagccggggcttcctgaccatcgagcagatcgccatgctgcccccacctgctgtgatgaactacatcttcctgctgctgtgcctgtgtggcctggtgggcaatggcctggtgctgtggttcttcggcttcagcatcctgaacacaggaggcttcctgggcacctttgctgactacatccgctctgtgtgccgggtgctgggcctgtgcatgttcctgactggagtgtccctgctgcctgctgtgtctgctgagcgctgtgccagcgtcatcttccctgcctggtactggaggcggcggcccaagaggctgtctgctgtggtgtgtgccctgctgtgggtgctgagcctgctggtgacctgcctgcacaactacttctgtgtgttcctgggccgcggggcccctggggccgcctgccgccacatggacatcttcctgggcatcctgctcttcctgctgtgctgccccctgatggtgctgccctgcctggccctgatcctgcacgtggagtgccgggcccggcggcggcagaggtctgccaagctgaaccacgtgatcctggccatggtgtctgtgttcctggtgagcagcatctacctgggcatcgactggttcctgttctgggtgttccagatcccagcccccttcccagaatatgtgacagacctgtgcatctgcatcaacagcagcgccaagcccatcgtgtacttcctggccggccgggacaagagccagaggctgtgggagcccctgcgggtggtgttccagagggccctgagagatggagctgagctgggggaggccggcggcagcacccccaacacagtgaccatggagatgcagtgccccccaggaaatgccagctag

SEQ ID NO: 158861 - DNA, 1032 bp, synthetic construct; identical to SEQ ID NO: 158859
  misc_feature 1..1032: note = Description of Artificial Sequence: Synthetic coding sequence
  source 1..1032: mol_type = other DNA

SEQ ID NO: 158862 - DNA, 870 bp, synthetic construct
  misc_feature 1..870: note = Description of Artificial Sequence: Synthetic coding sequence
  source 1..870: mol_type = other DNA
atgtttggcctgtttggcctgtggaggacctttgattctgtggtgttctacctgaccctgattgtgggcctgggcggccctgtgggcaatggcctggtgctgtggaacctgggcttccgcatcaagaagggccccttcagcatctacctgctgcacctggccgctgctgacttcctgttcctgagctgccgggtgggcttctctgtggcccaggccgccctgggcgcccaggacaccctgtactttgtgctgaccttcctgtggtttgctgtgggcctgtggctgctggccgccttctctgtggagcgctgcctgagtgacctcttccctgcctgctaccagggctgccggcccaggcatgccagcgctgtgctgtgtgccctggtgtggacccccaccctgcctgctgtgcccctgcctgccaatgcctgtggcctgctgaggaacagcgcctgccccctggtgtgcccccgctaccacgtggcctctgtgacctggttcctggtgctggcccgggtggcctggacagctggggtggtgctgtttgtgtgggtgacctgctgcagcacccggccccggccccggctgtatggaattgtgctgggcgccctgctgctgctcttcttctgtggcctgcccagcgtcttctactggagcctgcagcccctgctgaacttcctgctgcctgtgttcagccccctggccaccctgctggcctgtgtgaacagcagcagcaagcccctcatctacagcggcctgggccggcagcccgggaagcgggagcccctgcggtctgtgctgcggcgggccctgggggagggcgctgagctgggcgcccggggccagagcctgcccatgggcctgctgtag

SEQ ID NO: 158863 - DNA, 969 bp, synthetic construct
  misc_feature 1..969: note = Description of Artificial Sequence: Synthetic coding sequence
  source 1..969: mol_type = other DNA
atggaccccaccatcagcaccctggacacagagctgacccccatcaatggaacagaggagaccctgtgctacaagcagaccctgagcctgactgtgctgacctgcatcgtgtccctggtgggcctgactggaaatgctgtggtgctgtggctgctgggctgcaggatgagaagaaatgccttcagcatctacatcctgaacctggccgctgctgacttcctgttcctgagcggccgcctcatctacagcctgctgtccttcatcagcatcccccacaccatcagcaagatcctgtaccctgtgatgatgttctcctactttgctggcctgtccttcctgtctgctgtgtccacagagcgctgcctgtctgtgctgtggcccatctggtaccgctgccaccggcccacccacctgtctgctgtggtgtgtgtgctgctgtgggccctgagcctgctgcggagcatcctggagtggatgctgtgtggcttcctgttcagcggggctgacagcgcctggtgccagaccagtgacttcatcaccgtggcctggctgatcttcctgtgtgtggtgctgtgtggcagcagcctggtgctgctgatccgcatcctgtgtggcagcaggaagatccccctgacccggctgtatgtgaccatcctgctgactgtgctggtgttcctgctgtgtggcctgcccttcggcatccagttcttcctgttcctgtggattcatgtggaccgggaggtgctcttctgccacgtgcacctggtgtccatcttcctgagcgccctgaacagcagcgccaaccccatcatctacttctttgtgggcagcttccggcagaggcagaaccggcagaacctgaagctggtgctgcagagggccctgcaggatgccagcgaggtggatgagggcggcggccagctgcctgaggagatcctggagctgagcggcagccggctggagcagtag

SEQ ID NO: 158864 - DNA, 993 bp, synthetic construct
  misc_feature 1..993: note = Description of Artificial Sequence: Synthetic coding sequence
  source 1..993: mol_type = other DNA
atggaccccaccaccccagcctggggcacagagagcaccaccgtgaatggaaatgaccaggccctgctgctgctgtgtgggaaggagaccctcatccctgtgttcctgatcctcttcatcgccctggtgggcctggtgggcaatggatttgtgctgtggctgctgggcttcaggatgagaagaaatgccttctctgtgtatgtgctgagcctggccggggctgacttcctgttcctgtgcttccagatcatcaactgcctggtgtacctgagcaacttcttctgcagcatcagcatcaacttccccagcttcttcaccaccgtgatgacctgtgcctacctggccggcctgtccatgctgagcacagtgtccacagagcgctgcctgtctgtgctgtggcccatctggtaccgctgccggcggcccaggcacctgtctgctgtggtgtgtgtgctgctgtgggccctgagcctgctgctgagcatcctggagggcaagttctgtggcttcctgttcagtgatggagacagcggctggtgccagacctttgacttcatcacagctgcctggctgatcttcctgttcatggtgctgtgtggcagcagcctggccctgctggtgcgcatcctgtgtggcagccggggcctgcccctgacccggctgtacctgaccatcctgctgactgtgctggtgttcctgctgtgtggcctgcccttcggcatccagtggttcctgatcctgtggatctggaaggacagtgatgtgctcttctgccacatccaccctgtgtctgtggtgctgagcagcctgaacagcagcgccaaccccatcatctacttctttgtgggcagcttcaggaagcagtggaggctgcagcagcccatcctgaagctggccctgcagagggccctgcaggacattgctgaggtggaccacagcgagggctgcttccggcagggcaccccagagatgagccgcagcagcctggtgtag

SEQ ID NO: 158865 - DNA, 969 bp, synthetic construct
  misc_feature 1..969: note = Description of Artificial Sequence: Synthetic coding sequence
  source 1..969: mol_type = other DNA
atggacagcaccatccctgtgctgggcacagagctgacccccatcaatggccgggaggagaccccctgctacaagcagaccctgtccttcaccggcctgacctgcatcgtgtccctggtggccctgactggaaatgctgtggtgctgtggctgctgggctgcaggatgagaagaaatgctgtgtccatctacatcctgaacctggtggccgctgacttcctgttcctgagcggccacatcatctgcagccccctgcggctcatcaacatccgccaccccatcagcaagatcctgagccctgtgatgaccttcccctacttcatcggcctgtccatgctgagcgccatcagcacagagcgctgcctgagcatcctgtggcccatctggtaccactgcagaagaccccgctacctgagctctgtgatgtgtgtgctgctgtgggccctgagcctgctgcggagcatcctggagtggatgttctgtgacttcctgttcagcggggccaacagcgtgtggtgtgagaccagtgacttcatcaccatcgcctggctggtgttcctgtgtgtggtgctgtgtggcagcagcctggtgctgctggtgcgcatcctgtgtggcagcaggaagatgcccctgacccggctgtatgtgaccatcctgctgactgtgctggtgttcctgctgtgtggcctgcccttcggcatccagtgggccctcttcagccgcatccacctggactggaaggtgctcttctgccacgtgcacctggtgtccatcttcctgagcgccctgaacagcagcgccaaccccatcatctacttctttgtgggcagcttccggcagaggcagaaccggcagaacctgaagctggtgctgcagagggccctgcaggacaccccagaggtggatgagggcggcggctggctgccccaggagaccctggagctgagcggcagccggctggagcagtag

SEQ ID NO: 158866 - DNA, 741 bp, synthetic construct
  misc_feature 1..741: note = Description of Artificial Sequence: Synthetic coding sequence
  source 1..741: mol_type = other DNA
atggacagcaccatccctgtgctgggcacagagctgacccccatcaatggccgggaggagaccccctgctacaagcagaccctgtccttcaccggcctgacctgcatcgtgtccctggtggccctgactggaaatgctgtggtgctgtggctgctgggctgcaggatgagaagaaatgctgtgtccatctacatcctgaacctggtggccgctgacttcctgttcctgagcggccacatcatctgcagccccctgcggctcatcaacatccgccaccccatcagcaagatcctgagccctgtgatgaccttcccctacttcatcggcctgtccatgctgagcgccatcagcacagagcgctgcctgagcatcctgtggcccatctggtaccactgcagaagaccccgctacctgagctctgtgatgtgtgtgctgctgtgggccctgagcctgctgcggagcatcctggagtggatgttctgtgacttcctgttcagcggggccaacagcgtgtggtgtgagaccagtgacttcatcaccatcgcctggctggtgttcctgtgtgtggtgctgtgtggcagcagcctggtgctgctggtgcgcatcctgtgtggcagcaggaagatgcccctgacccggctgtatgtgaccatcctgctgactgtgctggtgttcctgctgtgtggcctgcccttcggcatccagtgggccctcttcagccgcatccacctggactggtag

SEQ ID NO: 158867 - DNA, 969 bp, synthetic construct
  misc_feature 1..969: note = Description of Artificial Sequence: Synthetic coding sequence
  source 1..969: mol_type = other DNA
atggaccccaccgtgcctgtgtttggcaccaagctgacccccatcaatggccgggaggagaccccctgctacaaccagaccctgtccttcaccgtgctgacctgcatcatcagcctggtgggcctgactggaaatgctgtggtgctgtggctgctgggctacaggatgagaagaaatgctgtgtccatctacatcctgaacctggccgctgctgacttcctgttcctgtccttccagatcatccggctgcccctgcggctcatcaacatcagccacctgatcaggaagatcctggtgtctgtgatgaccttcccctacttcaccggcctgtccatgctgagcgccatcagcacagagcgctgcctgtctgtgctgtggcccatctggtaccgctgcagaagacccacccacctgtctgctgtggtgtgtgtgctgctgtggggcctgagcctgctcttctccatgctggagtggaggttctgtgacttcctgttcagcggggctgacagctcctggtgtgagaccagtgacttcatccctgtggcctggctgatcttcctgtgtgtggtgctgtgtgtgagcagcctggtgctgctggtgcgcatcctgtgtggcagcaggaagatgcccctgacccggctgtatgtgaccatcctgctgactgtgctggtgttcctgctgtgtggcctgcccttcggcatcctgggcgccctgatctacaggatgcacctgaacctggaggtgctgtactgccacgtgtacctggtgtgcatgagcctgagcagcctgaacagcagcgccaaccccatcatctacttctttgtgggcagcttccggcagaggcagaaccggcagaacctgaagctggtgctgcagagggccctgcaggacaagccagaggtggacaagggggagggccagctgcctgaggagagcctggagctgagcggcagccggctgggcccctag

SEQ ID NO: 158868 - DNA, 3051 bp, synthetic construct
  misc_feature 1..3051: note = Description of Artificial Sequence: Synthetic coding sequence
  source 1..3051: mol_type = other DNA
atggtgctgcccacctgccccatggccgagtttgccctgcccaggcacagcgctgtgatggagcggctgcggaggagaattgagctgtgcagaagacaccacagcacctgtgaggcccgctatgaagctgtgtccccagagcggctggagctggagcggcagcacacctttgccctgcaccagcgctgcatccaggccaaggccaagagagctgggaagcaccggcagcccccagctgccacagccccagccccagctgccccagccccccggctggatgctgctgatggccctgagcacggccgcccagccacccacctgcatgacacagtgaagaggaacctggacagcgccaccagcccccagaatggagaccagcagaatggctacggggacctcttccctggccacaagaagacccggcgggaggcccccctgggcgtggccatcagcagcaatggcctgcccccagccagccccctgggccagagcgacaagcccagcggggctgatgccctgcagagcagcggcaagcacagcctgggcctggacagcctgaacaagaagaggctggccgacagcagcctgcacctgaatggaggcagcaaccccagcgagagcttccccctgagcctgaacaaggagctgaagcaggagcctgtggaggacctgccctgcatgatcactggaacagtgggcagcatcagccagagcaacctgatgccagacctgaacctgaatgagcaggagtggaaggagctgattgaggagctgaacagatctgtgcctgatgaggacatgaaggacctcttcaatgaagattttgaggagaagaaggaccctgagagcagcggcagcgccacccagacccccctggcccaggacatcaacatcaagacagagttcagccctgctgcctttgagcaggagcagctgggcagcccccaggtgcgggccggcagcgctggccagaccttcctgggccccagcagcgcccctgtgtccacagacagccccagcctgggcggcagccagaccctcttccacaccagcggccagcccagggctgacaaccccagccccaacctgatgcctgccagcgcccaggcccagaatgcccagagggccctggccggcgtggtgctgcccagccagggccctggaggagccagcgagctgagcagcgcccaccagctgcagcagattgctgccaagcagaagcgggagcagatgctgcagaacccccagcaggccaccccagccccagcccctggccagatgagcacctggcagcagacaggccccagccacagcagcctggatgtgccctaccccatggagaagccagccagccccagcagctacaagcaggacttcaccaacagcaagctgctgatgatgcccagcgtgaacaagagcagccccaggcctgggggcccctacctgcagcccagccacgtgaacctgctgagccaccagccccccagcaacctgaaccagaacagcgccaacaaccagggctctgtgctggactatggcaacaccaagcccctgagccactacaaggctgactgtggccagggcagccctggcagcggccagagcaagccagccctgatggcctacctgccccagcagctgagccacatcagccatgagcagaacagcctcttcctgatgaagcccaagccaggcaacatgcccttccgcagcctggtgcccccaggccaggagcagaaccccagctctgtgcctgtgcaggcccaggccacctctgtgggcacccagcccccagctgtgtctgtggccagcagccacaacagcagcccctacctgagcagccagcagcaggccgctgtgatgaagcagcaccagctgctgctggaccagcagaagcagcgggagcagcagcagaagcacctgcagcagcagcagttcctgcagaggcagcagcacctgctggccgagcaggagaagcagcagttccagaggcacctgacccggcccccaccccagtaccaggaccccacccagggcagcttcccccagcaggtgggccagttcaccggcagcagcgctgctgtgcccggcatgaacaccctgggccccagcaacagcagctgccccagggtcttcccccaggccggcaacctgatgcccatgggccctggccacgcctctgtgagcagcctgcccaccaacagcggccagcaggacagaggagtggcccagtttcctggcagccagaacatgccccagagcagcctgtatggcatggccagcggcatcacccagatcgtggcccagcccccaccccaggccaccaacggccacgcccacatcccccggcagaccaacgtgggccagaacacctctgtgtctgctgcctacggccagaacagcctgggcagcagcggcctgagccagcagcacaacaagggcaccctgaaccctggcctgaccaagccccctgtgccccgggtgtccccagccatgggcggccagaacagctcctggcagcaccagggcatgcccaacctgagcggccagaccccaggcaacagcaatgtgagccccttcaccgctgccagcagcttccacatgcagcagcaggcccacctgaagatgagcagcccccagttcagccaggccgtgcccaaccggcccatggcccccatgagcagcgctgctgctgtgggcagcctgctgccccctgtgtctgcccagcagaggaccagcgccccagccccagcccccccacccacagccccccagcagggcctgcccggcctgagccctgctggccctgagctgggcgccttcagccagagccctgccagccagatgggcggccgggccggcctgcactgcacccaggcctaccctgtgaggacagctggccaggagctgccctttgcctacagcggccagcccggcggcagcggcctgagctctgtggccggccacacagacctgattgacagcctgctgaagaacagaaccagcgaggagtggatgtctgacctggatgacctgctgggcagccagtag

SEQ ID NO: 158869 - DNA, 2286 bp, synthetic construct
  misc_feature 1..2286: note = Description of Artificial Sequence: Synthetic coding sequence
  source 1..2286: mol_type = other DNA
cggggcaagcagtggggccggggcggcggggagcggccccggctggaggtgggcagcaagaggcggctgggcgtgggccccagcggggccggcggcaagccagctgctgcccgggagcccgcccccctgcccagcggggcctggaggggccgggaggccgagcggggcagcagaggagagaggagcccccagtgccagcctgccccccggggccctgcccctggccctgcccgggccgcccggggcccctggtgctgccccccagccccctggaggagcagccgctgccggggcacagcccgctcctggagcgcctttgctggggccagcagctgtgccggggccaccacagccccagcccggcctgctgccccagccccccggctggatgctgctgatggccctgagcacggccggcctgccacccacctgcatgacacagtgaagaggaacctggacagcgccaccagcccccagaatggagaccagcagaatggctatggagacctcttccctggccacaagaagacccggcgggaggcccccctgggcgtggccatcagcagcaatggcctgcccccagccagccccctgggccagagcgacaagcccagcggggctgatgccctgcagagcagcggcaagcacagcctgggcctggacagcctgaacaagaagaggctggccgacagcagcctgcacctgaatggaggcagcaaccccagcgagagcttccccctgagcctgaacaaggagctgaagcaggagcctgtggaggacctgccctgcatgatcaccggcaccgtgggcagcatcagccagagcaacctgatgccagacctgaacctgaatgagcaggagtggaaggagctgattgaggagctgaacagatctgtgcctgatgaggacatgaaggacctcttcaatgaagattttgaggagaagaaggaccctgagagcagcggcagcgccacccagacccccctggcccaggacatcaacatcaagacagagttctccccagctgcctttgagcaggagcagctgggcagcccccaggtgcgggccggcagcgctggccagaccttcctgggccccagcagcgcccctgtgtccacagacagccccagcctgggcggcagccagaccctcttccacaccagcggccagcccagggctgacaaccccagccccaacctgatgcctgccagcgcccaggcccagaatgcccagagggccctggccggcgtggtgctgcccagccagggccctgggggcgccagcgagctgagcagcgcccaccagctgcagcagattgctgccaagcagaagcgggagcagatgctgcagaacccccagcaggccaccccagccccagcccctggccagatgagcacctggcagcagacaggccccagccacagcagcctggatgtgccctaccccatggagaagccagccagccccagcagctacaagcaggacttcaccaacagcaagctgctgatgatgcccagcgtgaacaagagcagccccaggcctgggggcccctacctgcagcccagccacgtgaacctgctgagccaccagccccccagcaacctgaaccagaacagcgccaacaaccagggctctgtgctggactatggcaacaccaagcccctgagccactacaaggctgactgtggccagggcagccctggcagcggccagagcaagccagccctgatggcctacctgccccagcagctgagccacatcagccatgagcagaacagcctcttcctgatgaagcccaagccaggcaacatgcccttccgcagcctggtgcccccaggccaggagcagaaccccagctctgtgcctgtgcaggcccaggccacctctgtgggcacccagcccccagctgtgtctgtggccagcagccacaacagcagcccctacctgagcagccagcagcaggccgctgtgatgaagcagcaccagctgctgctggaccagcagaagcagcgggagcagcagcagaagcacctgcagcagcagcagttcctgcagaggcagcagcacctgctggccgagcaggagaagcagcagttccagaggcacctgacccggcccccaccccagtaccaggaccccacccagggcagcttcccccagcaggtgggccagttcaccgcccagggcctgagctgtgccctgcccatgatccacagcacagaggtgctgatcagcagcctgtgcaatggatctgctggcctgtctgctgcccagaggtcctggtag

SEQ ID NO: 158870 - DNA, 3471 bp, synthetic construct
  misc_feature 1..3471: note = Description of Artificial Sequence: Synthetic coding sequence
  source 1..3471: mol_type = other DNA
atgggagacacagccccaccccaggccccagctgggggcctgggcggggccagcggggccggcctgctgggcggcggctctgtgaccccccgggtgcacagcgccatcgtggagcggctgcgggccagaattgctgtgtgccggcagcaccacctgagctgtgagggccgctatgaaagaggccgggcagagagcagtgaccgggagcgggagagcaccctgcagctgctgagcctggtgcagcacggccagggcgccaggaaggccggcaagcacaccaaggccacagccacagctgccaccaccacagcccctcctcctcctcctgctgcccccccagctgccagccaggccgccgccacagctgcccctcctcctcctccagactaccaccaccaccaccagcagcacctgctgaacagcagcaacaacggcggcagcggcggcatcaatggagagcagcagcccccagccagcacccctggggaccagagaaattctgccctgattgccctgcagggcagcctgaagaggaagcaggtggtgaacctgagccctgccaacagcaagaggcccaatggatttgtggacaacagcttcctggacatcaagaggatccgggtgggggagaacctgtctgctggccagggcggcctgcagatcaacaacggccagagccagatcatgagcggcaccctgcccatgagccaggcccccctgaggaagaccaacaccctgcccagccacacccacagccctggaaatggcctcttcaacatgggcctgaaggaggtgaagaaggagcctggagagaccctgagctgcagcaagcacatggatggccagatgacccaggagaacatcttccccaacagatatggagatgatcctggagagcagctgatggaccctgagctgcaggagctgttcaatgagctgaccaacatctctgtgccccccatgtctgacctggagctggagaacatgatcaatgccaccatcaagcaggatgaccccttcaacatcgacctgggccagcagagccagaggagcaccccccggcccagcctgcccatggagaagatcgtcatcaagtctgagtacagccctggcctgacccagggccccagcggcagcccccagctgcggccccccagcgctggccctgccttctccatggccaacagcgccctgagcaccagcagccccatccccagcgtgccccagagccaggcccagccccagacaggcagcggggccagccgggccctgcccagctggcaggaggtgagccacgcccagcagctgaagcagattgctgccaaccggcagcagcacgccaggatgcagcagcaccagcagcagcaccagcccaccaactggagcgccctgcccagcagcgctggccccagccctggccccttcggccaggagaagatccccagccccagctttggccagcagaccttcagcccccagagcagccccatgcctggggtggccggcggcagcggccagagcaaggtgatggccaactacatgtacaaggccggccccagcgcccagggcggccacctggatgtgctgatgcagcagaagccccaggacctgagccgctccttcatcaacaacccccacccagccatggagccccggcagggcaacaccaagcccctcttccacttcaacagcgaccaggccaaccagcagatgcccagcgtgctgcccagccagaacaagcccagcctgctgcactacacccagcagcagcagcagcagcagcagcagcagcagcagcagcagcagcagcagcagcagcagcagcagcagcagcagcagcagcagcagcagcagcagcagcagagcagcatcagcgcccagcagcagcagcagcagcagagcagcatcagcgcccagcagcagcagcagcagcagcagcagcagcagcagcagcagcagcagcagcagcagcagcagcagcagcagcagcagcagcccagcagccagcctgcccagagcctgcccagccagcccctgctgcggagccccctgcccctgcagcagaagctgctgctgcagcagatgcagaaccagcccatcgccggcatgggctaccaggtgtcccagcagcagaggcaggaccagcacagcgtggtgggccagaacacaggccccagccccagccccaacccctgcagcaaccccaacacaggcagcggctacatgaacagccagcagagcctgctgaaccagcagctgatgggcaagaagcagaccctgcagaggcagatcatggagcagaagcagcagctgctgctgcagcagcagatgctggctgatgctgagaagatcgccccccaggaccagatcaacagacacctgagcaggcctcctccagactacaaggaccagaggagaaatgtgggcaacatgcagcccacagcccagtacagcggcggcagcagcaccatcagcctgaacagcaaccaggccctggccaaccctgtgtccacccacaccatcctgacccccaacagcagcctgctgagcaccagccacggcaccaggatgcccagcctgagcacagctgtgcagaacatgggcatgtatggcaacctgccctgcaaccagcccaacacctacagcgtgaccagcggcatgaaccagctgacccagcagaggaaccccaagcagctgctggccaaccagaacaaccccatgatgcccaggcctcccaccctgggccccagcaacaacaacaacgtggccacctttggagctggctctgtgggcaacagccagcagctgcggcccaacctgacccacagcatggcctccatgccaccccagaggaccagcaatgtgatgatcaccagcaacaccacagcccccaactgggccagccaggagggcaccagcaagcagcaggaggccctgaccagcgctggggtgcgcttccccaccggcaccccagctgcctacacccccaaccagagcctgcagcaggccgtgggcagccagcagttcagccagagagctgtggccccacccaaccagctgaccccagctgtgcagatgaggcccatgaaccagatgagccagaccctgaatggccagaccatgggccccctgcggggcctgaacctgcggcccaaccagctgagcacccagatcctgcccaacctgaaccagagcggcaccggcctgaaccagagcaggacaggcatcaaccagccccccagcctgacccccagcaacttccccagccccaaccagagcagccgggccttccagggcacagaccacagcagtgacctggcctttgacttcctgagccagcagaatgacaacatgggccctgccctgaacagtgatgctgacttcatcgacagcctgctgaagacagagcctggaaatgatgactggatgaaggacatcaacctggatgagatcctgggcaacaacagctag

SEQ ID NO: 158871 - DNA, 3471 bp, synthetic construct; identical to SEQ ID NO: 158870
  misc_feature 1..3471: note = Description of Artificial Sequence: Synthetic coding sequence
  source 1..3471: mol_type = other DNA

SEQ ID NO: 158872 - DNA, 1632 bp, synthetic construct
  misc_feature 1..1632: note = Description of Artificial Sequence: Synthetic coding sequence
  source 1..1632: mol_type = other DNA
ctgcaggagaccgtgaagaggaagctggagggcgcccggagccccctgaatggagaccagcagaatggagcctgtgatggcaacttcagccccaccagcaagaggatcaggaaggacatctctgctggcatggaggccatcaacaacctgcccagcaacatgcccctgcccagcgccagccccctgcaccagctggacctgaagcccagcctgcccctgcagaacagcggcacccacaccccaggcctgctggaggacctgagcaagaatggccgcctgcctgagatcaagctgcctgtgaatggctgcagcgacctggaggacagcttcaccatcctgcagagcaaggacctgaagcaggagcccctggatgaccccacctgcatcgacaccagcgagaccagcctgagcaaccagaacaagctgttcagtgacatcaacctgaatgaccaggagtggcaggagctgattgatgagctggccaacacagtgcctgaagatgacatccaggacctcttcaatgaagattttgaggagaagaaggagcctgagttcagccagcctgccacagagacccccctgagccaggagagcgcctctgtgaagagtgaccccagccacagcccctttgcccacgtgtccatgggcagcccccaggcccggcccagcagcagcggcccccccttcagcacagtgtccacagccaccagcctgcccagcgtggccagcaccccagctgcccccaacccagccagcagccctgccaactgtgctgtgcagagcccccagacccccaaccaggcccacaccccaggccaggccccacccaggcctggaaatggctacctgctgaacccagctgctgtgacagtggccggcagcgccagcggccctgtggccgtgcccagcagtgacatgagccctgctgagcagctgaagcagatggccgcccagcagcagcagagggccaagctgatgcagcagaagcagcagcagcagcagcagcagcagcagcagcagcagcagcagcagcagcagcagcagcagcagcagcagcagcagcacagcaaccagaccagcaactggagccccctgggcccccccagcagcccctacggggccgccttcaccgctgagaagcccaacagccccatgatgtacccccaggccttcaacaaccagaaccccatcgtgccccccatggccaacaacctgcagaagaccaccatgaacaactacctgccccagaaccacatgaacatgatcaaccagcagcccaacaacctgggcaccaacagcctgaacaagcagcacaacatcctgacctacggcaacaccaagcccctgacccacttcaatgctgacctgagccagaggatgaccccacctgtggccaaccccaacaagaaccccctgatgccctacatccagcagcagcagcagcagcagcagcagcagcagcagcagcagcagcagcagcagcccccaccaccccagctgcaggccccccgggcccacctgtctgaggaccagaagaggctgctgctgatgaagcagaagggcgtgatgaaccagcccatggcctatgctgccctgcccagccacggccaggagcagcagcctgtgggctag

SEQ ID NO: 158873 - DNA, 831 bp, synthetic construct
  misc_feature 1..831: note = Description of Artificial Sequence: Synthetic coding sequence
  source 1..831: mol_type = other DNA
atgagccctgctgagcagctgaagcagatggccgcccagcagcagcagagggccaagctgatgcagcagaagcagcagcagcagcagcagcagcagcagcagcagcagcagcagcacagcaaccagaccagcaactggagccccctgggcccccccagcagcccctacggggccgccttcaccgctgagaagcccaacagccccatgatgtacccccaggccttcaacaaccagaaccccatcgtgccccccatggccaacaacctgcagaagaccaccatgaacaactacctgccccagaaccacatgaacatgatcaaccagcagcccaacaacctgggcaccaacagcctgaacaagcagcacaacatcctgacctacggcaacaccaagcccctgacccacttcaatgctgacctgagccagaggatgaccccacctgtggccaaccccaacaagaaccccctgatgccctacatccagcagcagcagcagcagcagcagcagcagcagcagcagcagcagcagcagcagcccccaccaccccagctgcaggccccccgggcccacctgtctgaggaccagaagaggctgctgctgatgaagcagaagggcgtgatgaaccagcccatggcctatgctgccctgcccagccacggccaggtgtctgtgaaggtgacccacagcagcagcagcagctgtggggcctttgactgccgctgtgtgatgttctacaagagcacagtggtgggcagcaactgcctgcagaagaccagcctgcacccccaggtggtggccaggtttggagtcttcttcttccacttctcctag

SEQ ID NO: 158874 - DNA, 3417 bp, synthetic construct
  misc_feature 1..3417: note = Description of Artificial Sequence: Synthetic coding sequence
  source 1..3417: mol_type = other DNA
atgggagactttgctgccccagctgctgctgccaacggcagcagcatctgcatcaacagcagcctgaacagcagcctgggcggggccggcattggagtgaacaacacccccaacagcaccccagctgcccccagcagcaaccaccctgctgctgggggctgcggcggcagcggcggccctgggggcggcagcgctgctgtgcccaagcacagcacagtggtggagcggctgcggcagagaattgagggctgcagaagacaccacgtgaactgtgagaaccgctaccagcaggcccaggtggagcagctggagctggagcggcgggacacagtgtccctgtaccagaggaccctggagcagagggccaagaagtctggagctggcaccgggaagcagcagcaccccagcaagccccagcaggatgctgaggccgccagcgctgagcagaggaaccacaccctcatcatgctgcaggagaccgtgaagaggaagctggagggcgcccggagccccctgaatggagaccagcagaatggagcctgtgatggcaacttcagccccaccagcaagaggatcaggaaggacatctctgctggcatggaggccatcaacaacctgcccagcaacatgcccctgcccagcgccagccccctgcaccagctggacctgaagcccagcctgcccctgcagaacagcggcacccacaccccaggcctgctggaggacctgagcaagaatggccgcctgcctgagatcaagctgcctgtgaatggctgcagcgacctggaggacagcttcaccatcctgcagagcaaggacctgaagcaggagcccctggatgaccccacctgcatcgacaccagcgagaccagcctgagcaaccagaacaagctgttcagtgacatcaacctgaatgaccaggagtggcaggagctgattgatgagctggccaacacagtgcctgaagatgacatccaggacctcttcaatgaagattttgaggagaagaaggagcctgagttcagccagcctgccacagagacccccctgagccaggagagcgcctctgtgaagagtgaccccagccacagcccctttgcccacgtgtccatgggcagcccccaggcccggcccagcagcagcggcccccccttcagcacagtgtccacagccaccagcctgcccagcgtggccagcaccccagctgcccccaacccagccagcagccctgccaactgtgctgtgcagagcccccagacccccaaccaggcccacaccccaggccaggccccacccaggcctggaaatggctacctgctgaacccagctgctgtgacagtggccggcagcgccagcggccctgtggccgtgcccagcagtgacatgagccctgctgagcagctgaagcagatggccgcccagcagcagcagagggccaagctgatgcagcagaagcagcagcagcagcagcagcagcagcagcagcagcagcagcagcagcagcagcagcagcagcagcagcagcagcagcacagcaaccagaccagcaactggagccccctgggcccccccagcagcccctacggggccgccttcaccgctgagaagcccaacagccccatgatgtacccccaggccttcaacaaccagaaccccatcgtgccccccatggccaacaacctgcagaagaccaccatgaacaactacctgccccagaaccacatgaacatgatcaaccagcagcccaacaacctgggcaccaacagcctgaacaagcagcacaacatcctgacctacggcaacaccaagcccctgacccacttcaatgctgacctgagccagaggatgaccccacctgtggccaaccccaacaagaaccccctgatgccctacatccagcagcagcagcagcagcagcagcagcagcagcagcagcagcagcagcagcagcccccaccaccccagctgcaggccccccgggcccacctgtctgaggaccagaagaggctgctgctgatgaagcagaagggcgtgatgaaccagcccatggcctatgctgccctgcccagccacggccaggagcagcaccctgtgggcctgcccaggaccaccggccccatgcagagctctgtgcccccaggcagcggcggcatggtgtctggggccagccctgctggccctggcttcctgggcagccagccccaggccgccatcatgaagcagatgctgattgaccagagggcccagctgattgagcagcagaagcagcagttcctgcgggagcagaggcagcagcagcagcagcagcagcagcagatcctggccgagcagcagctgcagcagagccacctgccccggcagcacctgcagccccagaggaacccctaccctgtgcagcaggtgaaccagttccagggcagcccccaggacattgctgctgtgcgcagccaggccgccctgcagagcatgaggaccagccggctgatggcccagaatgccggcatgatgggcatcggccccagccagaaccctggcaccatggccacagctgctgcccagagcgagatgggcctggccccctacagcaccacccccaccagccagcccggcatgtacaacatgagcacaggcatgacccagatgctgcagcaccccaaccagagcggcatgagcatcacccacaaccaggcccagggcccccggcagcctgccagcggccagggcgtgggcatggtgtctggcttcggccagagcatgctggtgaacagcgccatcacccagcagcacccccagatgaagggccctgtgggccaggccctgccccggccccaggccccaccccggctgcagagcctgatgggcaccgtgcagcagggcgcccagagctggcagcagaggagcctgcagggcatgcctggccgcaccagcggggagctgggccccttcaacaacggggccagctaccccctgcaggccggccagccccggctgaccaagcagcacttcccccagggcctgagccagagcgtggtggatgccaacacaggaacagtgaggaccctgaacccagctgccatgggccggcagatgatgcccagcctgcccggccagcagggcaccagccaggcccggcccatggtgatgagcggcctgagccagggcgtgcccggcatgcctgccttcagccagcccccagcccagcagcagatccccagcggcagctttgcccccagcagccagagccaggcctatgaaagaaatgccccccaggatgtgtcctacaactacagcggagatggagctgggggcagcttccctggcctgcctgatggagctgacctggtggacagcatcatcaagggcggccctggagatgagtggatgcaggagctggatgagctgtttggaaacccctag

SEQ ID NO: 158875 - DNA, 1338 bp, synthetic construct
  misc_feature 1..1338: note = Description of Artificial Sequence: Synthetic coding sequence
  source 1..1338: mol_type = other DNA
gagcagcaccctgtgggcctgcccaggaccaccggccccatgcagagctctgtgcccccaggcagcggcggcatggtgtctggggccagccctgctggccctggcttcctgggcagccagccccaggccgccatcatgaagcagatgctgattgaccagagggcccagctgattgagcagcagaagcagcagttcctgcgggagcagaggcagcagcagcagcagcagcagcagcagatcctggccgagcagcagctgcagcagagccacctgccccggcagcacctgcagccccagaggaacccctaccctgtgcagcaggtgaaccagttccagggcagcccccaggacattgctgctgtgcgcagccaggccgccctgcagagcatgaggaccagccggctgatggcccagaatgccggcatgatgggcatcggccccagccagaaccctggcaccatggccacagctgctgcccagagcgagatgggcctggccccctacagcaccacccccaccagccagcccggcatgtacaacatgagcacaggcatgacccagatgctgcagcaccccaaccagagcggcatgagcatcacccacaaccaggcccagggcccccggcagcctgccagcggccagggcgtgggcatggtgtctggcttcggccagagcatgctggtgaacagcgccatcacccagcagcacccccagatgaagggccctgtgggccaggccctgccccggccccaggccccaccccggctgcagagcctgatgggcaccgtgcagcagggcgcccagagctggcagcagaggagcctgcagggcatgcctggccgcaccagcggggagctgggccccttcaacaatggagccagctaccccctgcaggccggccagccccggctgaccaagcagcacttcccccagggcctgagccagagcgtggtggatgccaacacaggcaccgtgaggaccctgaacccagctgccatgggccggcagatgatgcccagcctgcccggccagcagggcaccagccaggcccggcccatggtgatgagcggcctgagccagggcgtgcccggcatgcctgccttcagccagcccccagcccagcagcagatccccagcggcagctttgcccccagcagccagagccaggcctatgaaagaaatgccccccaggatgtgtcctacaactacagcggagatggagctgggggcagcttccctggcctgcctgatggagctgacctggtggacagcatcatcaagggcggccctggagatgagtggatgcaggagctggatgagctgtttggaaacccctag

SEQ ID NO: 158876 - DNA, 2325 bp, synthetic construct
  misc_feature 1..2325: note = Description of Artificial Sequence: Synthetic coding sequence
  source 1..2325: mol_type = other DNA
atggatgactggaagagccggctggtgatcaagtccatgctgccccactttgccatggtgggcaaccggcaggagcccaggaagctgcaggagagcggcaagaagcccagctggatggaggaggaggacctgtccttcctgtacaagagcagccctggcaggaagcaccagggcaccgtgaagaggcggcaggaggaggaccacttccagttcccagacatggctgatggcggctaccccaacaagatcaagaggccctgcctggaggatgtgaccctggccatgggccctggggcccaccccagcacagcctgtgccgagctgcaggtgccccccctgaccatcaaccccagccctgctgccatgggcgtggccggccagagcctgctgctggagaacaaccccatgaatggaaacatcatgggcagcccctttgtggtgccccagaccacagaggtgggcctgaagggccccaccgtgccctactatgagaagatcaacagcgtgcctgctgtggaccaggagctgcaggagctgctggaggagctgaccaagatccaggaccccagccccaatgagctggacctggagaagatcctgggcaccaagccagaggagcccctggtgctggaccacccccaggccaccctgagcaccacccccaagcccagcgtgcagatgagccacctggagagcctggccagcagcaaggagtttgccagcagctgcagccaggtgacaggcatgagcctgcagatccccagcagcagcacaggcatctcctacagcatccccagcaccagcaagcagatcgtgagccccagcagctccatggcccagagcaagagccaggtgcaggccatgctgcctgtggccctgccccccctgcctgtgccccagtggcaccacgcccaccagctgaaggccctggccgccagcaagcagggcagcgccaccaagcagcagggccccacccccagctggagcggcctgcccccacctggcctgagccccccctacagacctgtgcccagcccccaccccccacccctgcccctgcccccacctcctccacccttcagcccccagagcctgatggtgtcctgcatgagcagcaacaccctgagcggcagcaccctgcggggcagccccaatgccctgctgagctccatgaccagcagcagcaatgctgccctgggccctgccatgccctatgcccctgagaagctgcccagccctgccctgacccagcagccccagtttggcccccagagcagcatcctggccaacctgatgagcagcaccatcaagaccccccagggccacctgatgtctgccctgcctgccagcaaccctggccccagccccccctacagacctgagaagctgagcagccctggcctgccccagcagagcttcaccccccagtgcagcctcatccgcagcctgacccccaccagcaacctgctgagccagcagcagcagcagcagcagcagcagcagcaggccaacgtcatcttcaagcccatcagcagcaacagcagcaagaccctgtccatgatcatgcagcagggcatggccagcagcagccctggggccacagagcccttcacctttggaaacaccaagcccctgagccactttgtgtctgagcccggcccccagaagatgcccagcatgcccaccaccagccggcagcccagcctgctgcactacctgcagcagcccacccccacccaggccagcagcgccacagccagcagcacagccacagccaccctgcagctgcagcagcagcagcagcagcagcagcagcagcctgaccacagcagcttcctgctgcagcagatgatgcagcagccccagcgcttccagaggtctgtggccagtgacagcatgcctgccctgccccggcagggctgctgccacctgtttgcctggaccagcgctgccagctctgtgaagccccagcaccagcacggcaacagcttcaccagccggcaggacccccagcctggagatgtgagccccagcaacatcacccacgtggacaaggcctgcaagctgggggaggcccggcacccccaggtgtccctgggccggcagccccccagctgccaggccctgggcagcgagagcttcctgcccggcagcagctttgcccacgagctggcccgggtgaccagcagctacagcaccagcgaggccgccccctggggctcctgggaccccaaggcctggaggcaggtgcctgcccccctgctgcccagctgtgatgccacagcccggggcacagagatccgctcctatggaaatgacccctag

SEQ ID NO: 158877 - DNA, 411 bp, synthetic construct
  misc_feature 1..411: note = Description of Artificial Sequence: Synthetic coding sequence
  source 1..411: mol_type = other DNA
atggatgactggaagagccggctggtgatcaagtccatgctgccccactttgccatggtgggcaaccggcaggagcccaggaagctgcaggagagcggcaagaagcccagctggatggaggaggaggacctgtccttcctgtacaagagcagccctggcaggaagcaccagggcaccgtgaagaggcggcaggaggaggaccacttccagttcccagacatggctgatggcggctaccccaacaagatcaagaggccctgcctggaggatgtgaccctggccatgggccctggggcccaccccagcacagcctgtgccgagctgcaggtgccccccctgaccatcaaccccagccctgctgccatgggcgtggccggccagagcctgctgctggagaacaaccccatgtag

SEQ ID NO: 158878 - DNA, 2325 bp, synthetic construct; identical to SEQ ID NO: 158876
  misc_feature 1..2325: note = Description of Artificial Sequence: Synthetic coding sequence
  source 1..2325: mol_type = other DNA

SEQ ID NO: 158879 - DNA, 2250 bp, synthetic construct
  misc_feature 1..2250: note = Description of Artificial Sequence: Synthetic coding sequence
  source 1..2250: mol_type = other DNA
atggatgactggaagagccggctggtgatcaagtccatgctgccccactttgccatggtgggcaaccggcaggagcccaggaagctgcaggagagcggcaccgtgaagaggcggcaggaggaggaccacttccagttcccagacatggctgatggcggctaccccaacaagatcaagaggccctgcctggaggatgtgaccctggccatgggccctggggcccaccccagcacagcctgtgccgagctgcaggtgccccccctgaccatcaaccccagccctgctgccatgggcgtggccggccagagcctgctgctggagaacaaccccatgaatggaaacatcatgggcagcccctttgtggtgccccagaccacagaggtgggcctgaagggccccaccgtgccctactatgagaagatcaacagcgtgcctgctgtggaccaggagctgcaggagctgctggaggagctgaccaagatccaggaccccagccccaatgagctggacctggagaagatcctgggcaccaagccagaggagcccctggtgctggaccacccccaggccaccctgagcaccacccccaagcccagcgtgcagatgagccacctggagagcctggccagcagcaaggagtttgccagcagctgcagccaggtgacaggcatgagcctgcagatccccagcagcagcacaggcatctcctacagcatccccagcaccagcaagcagatcgtgagccccagcagctccatggcccagagcaagagccaggtgcaggccatgctgcctgtggccctgccccccctgcctgtgccccagtggcaccacgcccaccagctgaaggccctggccgccagcaagcagggcagcgccaccaagcagcagggccccacccccagctggagcggcctgcccccacctggcctgagccccccctacagacctgtgcccagcccccaccccccacccctgcccctgcccccacctcctccacccttcagcccccagagcctgatggtgtcctgcatgagcagcaacaccctgagcggcagcaccctgcggggcagccccaatgccctgctgagctccatgaccagcagcagcaatgctgccctgggccctgccatgccctatgcccctgagaagctgcccagccctgccctgacccagcagccccagtttggcccccagagcagcatcctggccaacctgatgagcagcaccatcaagaccccccagggccacctgatgtctgccctgcctgccagcaaccctggccccagccccccctacagacctgagaagctgagcagccctggcctgccccagcagagcttcaccccccagtgcagcctcatccgcagcctgacccccaccagcaacctgctgagccagcagcagcagcagcagcagcagcagcagcaggccaacgtcatcttcaagcccatcagcagcaacagcagcaagaccctgtccatgatcatgcagcagggcatggccagcagcagccctggggccacagagcccttcaccttcggcaacaccaagcccctgagccactttgtgtctgagcccggcccccagaagatgcccagcatgcccaccaccagccggcagcccagcctgctgcactacctgcagcagcccacccccacccaggccagcagcgccacagccagcagcacagccacagccaccctgcagctgcagcagcagcagcagcagcagcagcagcagcctgaccacagcagcttcctgctgcagcagatgatgcagcagccccagcgcttccagaggtctgtggccagtgacagcatgcctgccctgccccggcagggctgctgccacctgtttgcctggaccagcgctgccagctctgtgaagccccagcaccagcacggcaacagcttcaccagccggcaggacccccagcctggagatgtgagccccagcaacatcacccacgtggacaaggcctgcaagctgggggaggcccggcacccccaggtgtccctgggccggcagccccccagctgccaggccctgggcagcgagagcttcctgcccggcagcagctttgcccacgagctggcccgggtgaccagcagctacagcaccagcgaggccgccccctggggctcctgggaccccaaggcctggaggcaggtgcctgcccccctgctgcccagctgtgatgccacagcccggggcacagagatccgctcctatggaaatgacccctag

SEQ ID NO: 158880 - DNA, 2997 bp, synthetic construct
  misc_feature 1..2997: note = Description of Artificial Sequence: Synthetic coding sequence
  source 1..2997: mol_type = other DNA
atggatgactggaagagccggctggtgatcaagtccatgctgccccactttgccatggtgggcaaccggcaggagcccaggaagctgcaggagagcggcaccgtgaagaggcggcaggaggaggaccacttccagttcccagacatggctgatggcggctaccccaacaagatcaagaggccctgcctggaggatgtgaccctggccatgggccctggggcccaccccagcacagcctgtgccgagctgcaggtgccccccctgaccatcaaccccagccctgctgccatgggcgtggccggccagagcctgctgctggagaacaaccccatgaatggaaacatcatgggcagcccctttgtggtgccccagaccacagaggtgggcctgaagggccccaccgtgccctactatgagaagatcaacagcgtgcctgctgtggaccaggagctgcaggagctgctggaggagctgaccaagatccaggaccccagccccaatgagctggacctggagaagatcctgggcaccaagccagaggagcccctggtgctggaccacccccaggccaccctgagcaccacccccaagcccagcgtgcagatgagccacctggagagcctggccagcagcaaggagtttgccagcagctgcagccaggtgacaggcatgagcctgcagatccccagcagcagcacaggcatctcctacagcatccccagcaccagcaagcagatcgtgagccccagcagctccatggcccagagcaagagccaggtgcaggccatgctgcctgtggccctgccccccctgcctgtgccccagtggcaccacgcccaccagctgaaggccctggccgccagcaagcagggcagcgccaccaagcagcagggccccacccccagctggagcggcctgcccccacctggcctgagccccccctacagacctgtgcccagcccccaccccccacccctgcccctgcccccacctcctccacccttcagcccccagagcctgatggtgtcctgcatgagcagcaacaccctgagcggcagcaccctgcggggcagccccaatgccctgctgagctccatgaccagcagcagcaatgctgccctgggccctgccatgccctatgcccctgagaagctgcccagccctgccctgacccagcagccccagtttggcccccagagcagcatcctggccaacctgatgagcagcaccatcaagaccccccagggccacctgatgtctgccctgcctgccagcaaccctggccccagccccccctacagacctgagaagctgagcagccctggcctgccccagcagagcttcaccccccagtgcagcctcatccgcagcctgacccccaccagcaacctgctgagccagcagcagcagcagcagcagcagcagcagcaggccaacgtcatcttcaagcccatcagcagcaacagcagcaagaccctgtccatgatcatgcagcagggcatggccagcagcagccctggggccacagagcccttcaccttcggcaacaccaagcccctgagccactttgtgtctgagcccggcccccagaagatgcccagcatgcccaccaccagccggcagcccagcctgctgcactacctgcagcagcccacccccacccaggccagcagcgccacagccagcagcacagccacagccaccctgcagctgcagcagcagcagcagcagcagcagcagcagcctgaccacagcagcttcctgctgcagcagatgatgcagcagccccagcgcttccagaggtctgtggccagtgacagcatgcctgccctgccccggcagcaggaggagcagaggagcggcctgatggccatgaccccagagcggcagaatgcctacatcagccagcagatgagcccctttgaagctgtgcaggagcaggtgaccagcaagtgcagccgcatcaaggccagcccccccagcagcaagcacctgatgccacccaggacaggcctgctgcagaacaacctgagccctggcatgatccccctgaccaggcaccagagctgtgagggcatgggcgtcatcagccccaccctgggcaagaggcagggcatcttcaccagcagcccccagtgccccatcctgagccacagcggccagacccccctgggccgcctggacagcgtgtgccagcacatgcagagccccaaggccaccccacctgaggtgcccctgcccggcttctgccccagcagcctgggcacccagagcctgagcccccaccagctgcggcggcccagcgtgcccaggatgcccacagccttcaacaatgctgcctgggtgacagctgctgctgctgtgaccacagctgtgtctgggaagacccccctgagccaggtggacaacagcgtgcagcagcacagccccagcggccaggcctgcctgcagaggcccagcgactgggaggcccaggtgcctgctgccatgggcacccaggtgcccctggccaacaaccccagcttcagcctgctgggcagccagagcctgcggcagagccctgtgcagggccctgtgcctgtggccaacaccaccaagttcctgcagcagggcatggccagcttcagccccctgagccccatccagggcatcgagccccccagctatgtggccgctgctgccacagctgctgctgccagcgctgtggccgccagccagtttcctggcccctttgacagaacagacatccccccagagctgcccccagctgacttcctgcggcagccccagccccccctgaatgacctgatcagcagcccagactgcaatgaggtggacttcatcgaggccctgctgaagggcagctgtgtgtccccagatgaggactgggtgtgcaacctgcggctgattgatgacatcctggagcagcacgccgccgcccagaatgccacagcccagaacagcggccaggtgacccaggatgctggggccctgtag

SEQ ID NO: 158881 - DNA, 1941 bp, synthetic construct
  misc_feature 1..1941: note = Description of Artificial Sequence: Synthetic coding sequence
  source 1..1941: mol_type = other DNA
atggaggaggaggacctgtccttcctgtacaagagcagccctggcaggaagcaccagggcaccgtgaagaggcggcaggaggaggaccacttccagttcccagacatggctgatggcggctaccccaacaagatcaagaggccctgcctggaggatgtgaccctggccatgggccctggggcccaccccagcacagcctgtgccgagctgcaggtgccccccctgaccatcaaccccagccctgctgccatgggcgtggccggccagagcctgctgctggagaacaaccccatgaatggaaacatcatgggcagcccctttgtggtgccccagaccacagaggtgggcctgaagggccccaccgtgccctactatgagaagatcaacagcgtgcctgctgtggaccaggagctgcaggagctgctggaggagctgaccaagatccaggaccccagccccaatgagctggacctggagaagatcctgggcaccaagccagaggagcccctggtgctggaccacccccaggccaccctgagcaccacccccaagcccagcgtgcagatgagccacctggagagcctggccagcagcaaggagtttgccagcagctgcagccaggtgacaggcatgagcctgcagatccccagcagcagcacaggcatctcctacagcatccccagcaccagcaagcagatcgtgagccccagcagctccatggcccagagcaagagccaggtgcaggccatgctgcctgtggccctgccccccctgcctgtgccccagtggcaccacgcccaccagctgaaggccctggccgccagcaagcagggcagcgccaccaagcagcagggccccacccccagctggagcggcctgcccccacctggcctgagccccccctacagacctgtgcccagcccccaccccccacccctgcccctgcccccacctcctccacccttcagcccccagagcctgatggtgtcctgcatgagcagcaacaccctgagcggcagcaccctgcggggcagccccaatgccctgctgagctccatgaccagcagcagcaatgctgccctgggccctgccatgccctatgcccctgagaagctgcccagccctgccctgacccagcagccccagtttggcccccagagcagcatcctggccaacctgatgagcagcaccatcaagaccccccagggccacctgatgtctgccctgcctgccagcaaccctggccccagccccccctacagacctgagaagctgagcagccctggcctgccccagcagagcttcaccccccagtgcagcctgctgcactacctgcagcagcccacccccacccaggccagcagcgccacagccagcagcacagccacagccaccctgcagctgcagcagcagcagcagcagcagcagcagcagcctgaccacagcagcttcctgctgcagcagatgatgcagcagccccagcgcttccagaggtctgtggccagtgacagcatgcctgccctgccccggcagggctgctgccacctgtttgcctggaccagcgctgccagctctgtgaagccccagcaccagcacggcaacagcttcaccagccggcaggacccccagcctggagatgtgagccccagcaacatcacccacgtggacaaggcctgcaagctgggggaggcccggcacccccaggtgtccctgggccggcagccccccagctgccaggccctgggcagcgagagcttcctgcccggcagcagctttgcccacgagctggcccgggtgaccagcagctacagcaccagcgaggccgccccctggggctcctgggaccccaaggcctggaggcaggtgcctgcccccctgctgcccagctgtgatgccacagcccggggcacagagatccgctcctatggaaatgacccctag

SEQ ID NO: 158882 - DNA, 645 bp, synthetic construct
  misc_feature 1..645: note = Description of Artificial Sequence: Synthetic coding sequence
  source 1..645: mol_type = other DNA
atgatcatgcagcagggcatggccagcagcagccctggggccacagagcccttcaccttcggcaacaccaagcccctgagccactttgtgtctgagcccggcccccagaagatgcccagcatgcccaccaccagccggcagcccagcctgctgcactacctgcagcagcccacccccacccaggccagcagcgccacagccagcagcacagccacagccaccctgcagctgcagcagcagcagcagcagcagcagcagcagcctgaccacagcagcttcctgctgcagcagatgatgcagcagccccagcgcttccagaggtctgtggccagtgacagcatgcctgccctgccccggcagacccacgtggacaaggcctgcaagctgggggaggcccggcacccccaggtgtccctgggccggcagccccccagctgccaggccctgggcagcgagagcttcctgcccggcagcagctttgcccacgagctggcccgggtgaccagcagctacagcaccagcgaggccgccccctggggctcctgggaccccaaggcctggaggcaggtgcctgcccccctgctgcccagctgtgatgccacagcccggggcacagagatccgctcctatggaaatgacccctag

SEQ ID NO: 158883 - DNA, 1956 bp, synthetic construct
  misc_feature 1..1956: note = Description of Artificial Sequence: Synthetic coding sequence
  source 1..1956: mol_type = other DNA
atgaaggactatgatgagctgctgaagtactatgagctgcacgagaccatcggcactggaggctttgccaaggtgaagctggcctgccacatcctgactggagagatggtggccatcaagatcatggacaagaacaccctgggcagtgacctgccccgcatcaagacagaaattgaggccctgaagaacctgcggcaccagcacatctgccagctgtaccacgtgctggagacagccaacaagatcttcatggtgctggagtactgccctggaggagagctgtttgactacatcatcagccaggaccggctgtctgaggaggagaccagggtggtgttccggcagatcgtgtctgctgtggcctacgtgcacagccagggctacgcccaccgggacctgaagccagagaacctgctgtttgatgagtaccacaagctgaagctgattgactttggcctgtgtgccaagcccaagggcaacaaggactaccacctgcagacctgctgcggcagcctggcctatgctgcccctgagctgatccagggcaagagctacctgggcagcgaggctgatgtgtggagcatgggcatcctgctgtatgtgctgatgtgtggcttcctgccctttgatgatgacaacgtgatggccctgtacaagaagatcatgaggggcaagtatgatgtgcccaagtggctgagccccagcagcatcctgctgctgcagcagatgctgcaggtggaccccaagaagaggatctccatgaagaacctgctgaaccacccctggatcatgcaggactacaactaccctgtggagtggcagagcaagaaccccttcatccacctggatgatgactgtgtgacagagctgtctgtgcaccacaggaacaaccggcagaccatggaggacctgatcagcctgtggcagtatgaccacctgacagccacctacctgctgctgctggccaagaaggcccggggcaagcctgtgcggctgcggctgagcagcttcagctgtggccaggccagcgccacccccttcacagacatcaagagcaacaactggagcctggaggatgtgacagccagtgacaagaactacgtggccggcctgattgattatgactggtgtgaagatgacctgagcactggagctgccacccccaggaccagccagttcaccaagtactggacagagagcaatggagtggagagcaagagcctgaccccagccctgtgcaggaccccagccaacaagctgaagaacaaggaaaatgtgtacacccccaagtctgctgtgaagaatgaggagtacttcatgtttcctgagcccaagacccctgtgaacaagaaccagcacaagcgggagatcctgaccacccccaaccgctacaccacccccagcaaggccaggaaccagtgcctgaaggagacccccatcaagatccctgtgaacagcactggaacagacaagctgatgactggagtcatcagccctgagcggcgctgccgctctgtggagctggacctgaaccaggcccacatggaggagacccccaagaggaagggggccaaggtgtttggcagcctggagcggggcctggacaaggtgatcaccgtgctgaccaggagcaagaggaaaggaagtgccagagatggcccccggcggctgaagctgcactacaacgtgaccaccacccggctggtgaacccagaccagctgctgaatgagatcatgagcatcctgcccaagaagcacgtggactttgtgcagaagggctacaccctgaagtgccagacccagagcgactttgggaaggtgaccatgcagtttgagctggaggtgtgccagctgcagaagccagatgtggtgggcatccggcggcagaggctgaagggagatgcctgggtgtacaagaggctggtggaggacatcctgagcagctgcaaggtgtag

SEQ ID NO: 158884 - DNA, 1743 bp, synthetic construct
  misc_feature 1..1743: note = Description of Artificial Sequence: Synthetic coding sequence
  source 1..1743: mol_type = other DNA
atgatgaacttcagcaacatcatgaactacatgaagctgctgggccagtactgccctggaggagagctgtttgactacatcatcagccaggaccggctgtctgaggaggagaccagggtggtgttccggcagatcgtgtctgctgtggcctacgtgcacagccagggctacgcccaccgggacctgaagccagagaacctgctgtttgatgagtaccacaagctgaagctgattgactttggcctgtgtgccaagcccaagggcaacaaggactaccacctgcagacctgctgcggcagcctggcctatgctgcccctgagctgatccagggcaagagctacctgggcagcgaggctgatgtgtggagcatgggcatcctgctgtatgtgctgatgtgtggcttcctgccctttgatgatgacaacgtgatggccctgtacaagaagatcatgaggggcaagtatgatgtgcccaagtggctgagccccagcagcatcctgctgctgcagcagatgctgcaggtggaccccaagaagaggatctccatgaagaacctgctgaaccacccctggatcatgcaggactacaactaccctgtggagtggcagagcaagaaccccttcatccacctggatgatgactgtgtgacagagctgtctgtgcaccacaggaacaaccggcagaccatggaggacctgatcagcctgtggcagtatgaccacctgacagccacctacctgctgctgctggccaagaaggcccggggcaagcctgtgcggctgcggctgagcagcttcagctgtggccaggccagcgccacccccttcacagacatcaagagcaacaactggagcctggaggatgtgacagccagtgacaagaactacgtggccggcctgattgattatgactggtgtgaagatgacctgagcactggagctgccacccccaggaccagccagttcaccaagtactggacagagagcaatggagtggagagcaagagcctgaccccagccctgtgcaggaccccagccaacaagctgaagaacaaggaaaatgtgtacacccccaagtctgctgtgaagaatgaggagtacttcatgtttcctgagcccaagacccctgtgaacaagaaccagcacaagcgggagatcctgaccacccccaaccgctacaccacccccagcaaggccaggaaccagtgcctgaaggagacccccatcaagatccctgtgaacagcactggaacagacaagctgatgactggagtcatcagccctgagcggcgctgccgctctgtggagctggacctgaaccaggcccacatggaggagacccccaagaggaaaggagccaaggtgtttggcagcctggagcggggcctggacaaggtgatcaccgtgctgaccaggagcaagaggaagggcagcgccagagatggcccccggcggctgaagctgcactacaacgtgaccaccacccggctggtgaacccagaccagctgctgaatgagatcatgagcatcctgcccaagaagcacgtggactttgtgcagaagggctacaccctgaagtgccagacccagagcgactttgggaaggtgaccatgcagtttgagctggaggtgtgccagctgcagaagccagatgtggtgggcatccggcggcagaggctgaagggagatgcctgggtgtacaagaggctggtggaggacatcctgagcagctgcaaggtgtag

SEQ ID NO: 158885 - DNA, 1812 bp, synthetic construct
  misc_feature 1..1812: note = Description of Artificial Sequence: Synthetic coding sequence
  source 1..1812: mol_type = other DNA
atgaaggactatgatgagctgctgaagtactatgagctgcacgagaccatcggcactggaggctttgccaaggtgaagctggcctgccacatcctgactggagagatggtggccatcaagatcatggacaagaacaccctgggcagtgacctgccccgcatcaagacagaaattgaggccctgaagaacctgcggcaccagcacatctgccagctgtaccacgtgctggagacagccaacaagatcttcatggtgctggaggagaacctgctgtttgatgagtaccacaagctgaagctgattgactttggcctgtgtgccaagcccaagggcaacaaggactaccacctgcagacctgctgcggcagcctggcctatgctgcccctgagctgatccagggcaagagctacctgggcagcgaggctgatgtgtggagcatgggcatcctgctgtatgtgctgatgtgtggcttcctgccctttgatgatgacaacgtgatggccctgtacaagaagatcatgaggggcaagtatgatgtgcccaagtggctgagccccagcagcatcctgctgctgcagcagatgctgcaggtggaccccaagaagaggatctccatgaagaacctgctgaaccacccctggatcatgcaggactacaactaccctgtggagtggcagagcaagaaccccttcatccacctggatgatgactgtgtgacagagctgtctgtgcaccacaggaacaaccggcagaccatggaggacctgatcagcctgtggcagtatgaccacctgacagccacctacctgctgctgctggccaagaaggcccggggcaagcctgtgcggctgcggctgagcagcttcagctgtggccaggccagcgccacccccttcacagacatcaagagcaacaactggagcctggaggatgtgacagccagtgacaagaactacgtggccggcctgattgattatgactggtgtgaagatgacctgagcactggagctgccacccccaggaccagccagttcaccaagtactggacagagagcaatggagtggagagcaagagcctgaccccagccctgtgcaggaccccagccaacaagctgaagaacaaggaaaatgtgtacacccccaagtctgctgtgaagaatgaggagtacttcatgtttcctgagcccaagacccctgtgaacaagaaccagcacaagcgggagatcctgaccacccccaaccgctacaccacccccagcaaggccaggaaccagtgcctgaaggagacccccatcaagatccctgtgaacagcactggaacagacaagctgatgactggagtcatcagccctgagcggcgctgccgctctgtggagctggacctgaaccaggcccacatggaggagacccccaagaggaagggggccaaggtgtttggcagcctggagcggggcctggacaaggtgatcaccgtgctgaccaggagcaagaggaaaggaagtgccagagatggcccccggcggctgaagctgcactacaacgtgaccaccacccggctggtgaacccagaccagctgctgaatgagatcatgagcatcctgcccaagaagcacgtggactttgtgcagaagggctacaccctgaagtgccagacccagagcgactttgggaaggtgaccatgcagtttgagctggaggtgtgccagctgcagaagccagatgtggtgggcatccggcggcagaggctgaagggagatgcctgggtgtacaagaggctggtggaggacatcctgagcagctgcaaggtgtag

SEQ ID NO: 158886 - DNA, 1563 bp, synthetic construct
  misc_feature 1..1563: note = Description of Artificial Sequence: Synthetic coding sequence
  source 1..1563: mol_type = other DNA
atggtgctggaggagaacctgctgtttgatgagtaccacaagctgaagctgattgactttggcctgtgtgccaagcccaagggcaacaaggactaccacctgcagacctgctgcggcagcctggcctatgctgcccctgagctgatccagggcaagagctacctgggcagcgaggctgatgtgtggagcatgggcatcctgctgtatgtgctgatgtgtggcttcctgccctttgatgatgacaacgtgatggccctgtacaagaagatcatgaggggcaagtatgatgtgcccaagtggctgagccccagcagcatcctgctgctgcagcagatgctgcaggtggaccccaagaagaggatctccatgaagaacctgctgaaccacccctggatcatgcaggactacaactaccctgtggagtggcagagcaagaaccccttcatccacctggatgatgactgtgtgacagagctgtctgtgcaccacaggaacaaccggcagaccatggaggacctgatcagcctgtggcagtatgaccacctgacagccacctacctgctgctgctggccaagaaggcccggggcaagcctgtgcggctgcggctgagcagcttcagctgtggccaggccagcgccacccccttcacagacatcaagagcaacaactggagcctggaggatgtgacagccagtgacaagaactacgtggccggcctgattgattatgactggtgtgaagatgacctgagcactggagctgccacccccaggaccagccagttcaccaagtactggacagagagcaatggagtggagagcaagagcctgaccccagccctgtgcaggaccccagccaacaagctgaagaacaaggaaaatgtgtacacccccaagtctgctgtgaagaatgaggagtacttcatgtttcctgagcccaagacccctgtgaacaagaaccagcacaagcgggagatcctgaccacccccaaccgctacaccacccccagcaaggccaggaaccagtgcctgaaggagacccccatcaagatccctgtgaacagcactggaacagacaagctgatgactggagtcatcagccctgagcggcgctgccgctctgtggagctggacctgaaccaggcccacatggaggagacccccaagaggaaaggagccaaggtgtttggcagcctggagcggggcctggacaaggtgatcaccgtgctgaccaggagcaagaggaagggcagcgccagagatggcccccggcggctgaagctgcactacaacgtgaccaccacccggctggtgaacccagaccagctgctgaatgagatcatgagcatcctgcccaagaagcacgtggactttgtgcagaagggctacaccctgaagtgccagacccagagcgactttgggaaggtgaccatgcagtttgagctggaggtgtgccagctgcagaagccagatgtggtgggcatccggcggcagaggctgaagggagatgcctgggtgtacaagaggctggtggaggacatcctgagcagctgcaaggtgtag

SEQ ID NO: 158887 - DNA, 1374 bp, synthetic construct
  misc_feature 1..1374: note = Description of Artificial Sequence: Synthetic coding sequence
  source 1..1374: mol_type = other DNA
atgggcatcctgctgtatgtgctgatgtgtggcttcctgccctttgatgatgacaacgtgatggccctgtacaagaagatcatgaggggcaagtatgatgtgcccaagtggctgagccccagcagcatcctgctgctgcagcagatgctgcaggtggaccccaagaagaggatctccatgaagaacctgctgaaccacccctggatcatgcaggactacaactaccctgtggagtggcagagcaagaaccccttcatccacctggatgatgactgtgtgacagagctgtctgtgcaccacaggaacaaccggcagaccatggaggacctgatcagcctgtggcagtatgaccacctgacagccacctacctgctgctgctggccaagaaggcccggggcaagcctgtgcggctgcggctgagcagcttcagctgtggccaggccagcgccacccccttcacagacatcaagagcaacaactggagcctggaggatgtgacagccagtgacaagaactacgtggccggcctgattgattatgactggtgtgaagatgacctgagcactggagctgccacccccaggaccagccagttcaccaagtactggacagagagcaatggagtggagagcaagagcctgaccccagccctgtgcaggaccccagccaacaagctgaagaacaaggaaaatgtgtacacccccaagtctgctgtgaagaatgaggagtacttcatgtttcctgagcccaagacccctgtgaacaagaaccagcacaagcgggagatcctgaccacccccaaccgctacaccacccccagcaaggccaggaaccagtgcctgaaggagacccccatcaagatccctgtgaacagcactggaacagacaagctgatgactggagtcatcagccctgagcggcgctgccgctctgtggagctggacctgaaccaggcccacatggaggagacccccaagaggaagggggccaaggtgtttggcagcctggagcggggcctggacaaggtgatcaccgtgctgaccaggagcaagaggaaaggaagtgccagagatggcccccggcggctgaagctgcactacaacgtgaccaccacccggctggtgaacccagaccagctgctgaatgagatcatgagcatcctgcccaagaagcacgtggactttgtgcagaagggctacaccctgaagtgccagacccagagcgactttgggaaggtgaccatgcagtttgagctggaggtgtgccagctgcagaagccagatgtggtgggcatccggcggcagaggctgaagggagatgcctgggtgtacaagaggctggtggaggacatcctgagcagctgcaaggtgtag

SEQ ID NO: 158888 - DNA, 1833 bp, synthetic construct
  misc_feature 1..1833: note = Description of Artificial Sequence: Synthetic coding sequence
  source 1..1833: mol_type = other DNA
atgaaggactatgatgagctgctgaagtactatgagctgcacgagaccatcggcactggaggctttgccaaggtgaagctggcctgccacatcctgactggagagatggtggccatcaagatcatggacaagaacaccctgggcagtgacctgccccgcatcaagacagaaattgaggccctgaagaacctgcggcaccagcacatctgccagctgtaccacgtgctggagacagccaacaagatcttcatggtgctggagtactgccctggaggagagctgtttgactacatcatcagccaggaccggctgtctgaggaggagaccagggtggtgttccggcagatcgtgtctgctgtggcctacgtgcacagccagggctacgcccaccgggacctgaagccagagaacctgctgtttgatgagtaccacaagctgaagctgattgactttggcctgtgtgccaagcccaagggcaacaaggactaccacctgcagacctgctgcggcagcctggcctatgctgcccctgagctgatccagggcaagagctacctgggcagcgaggctgatgtgtggagcatgggcatcctgctgtatgtgctgatgtgtggcttcctgccctttgatgatgacaacgtgatggccctgtacaagaagatcatgaggggcaagtatgatgtgcccaagtggctgagccccagcagcatcctgctgctgcagcagatgctgcaggtggaccccaagaagaggatctccatgaagaacctgctgaaccacccctggatcatgcaggactacaactaccctgtggagtggcagagcaagaaccccttcatccacctggatgatgactgtgtgacagagctgtctgtgcaccacaggaacaaccggcagaccatggaggacctgatcagcctgtggcagtatgaccacctgacagccacctacctgctgctgctggccaagaaggcccggggcaagcctgtgcggctgcggctgagcagcttcagctgtggccaggccagcgccacccccttcacagacatcaagttcaccaagtactggacagagagcaatggagtggagagcaagagcctgaccccagccctgtgcaggaccccagccaacaagctgaagaacaaggaaaatgtgtacacccccaagtctgctgtgaagaatgaggagtacttcatgtttcctgagcccaagacccctgtgaacaagaaccagcacaagcgggagatcctgaccacccccaaccgctacaccacccccagcaaggccaggaaccagtgcctgaaggagacccccatcaagatccctgtgaacagcactggaacagacaagctgatgactggagtcatcagccctgagcggcgctgccgctctgtggagctggacctgaaccaggcccacatggaggagacccccaagaggaaaggagccaaggtgtttggcagcctggagcggggcctggacaaggtgatcaccgtgctgaccaggagcaagaggaagggcagcgccagagatggcccccggcggctgaagctgcactacaacgtgaccaccacccggctggtgaacccagaccagctgctgaatgagatcatgagcatcctgcccaagaagcacgtggactttgtgcagaagggctacaccctgaagtgccagacccagagcgactttgggaaggtgaccatgcagtttgagctggaggtgtgccagctgcagaagccagatgtggtgggcatccggcggcagaggctgaagggagatgcctgggtgtacaagaggctggtggaggacatcctgagcagctgcaaggtgtag

SEQ ID NO: 158889 - DNA, 1860 bp, synthetic construct
  misc_feature 1..1860: note = Description of Artificial Sequence: Synthetic coding sequence
  source 1..1860: mol_type = other DNA
atgatgaacttcagcaacatcatgaactacatgaagctgctgggccagagcgacctgccccgcatcaagacagaaattgaggccctgaagaacctgcggcaccagcacatctgccagctgtaccacgtgctggagacagccaacaagatcttcatggtgctggagtactgccctggaggagagctgtttgactacatcatcagccaggaccggctgtctgaggaggagaccagggtggtgttccggcagatcgtgtctgctgtggcctacgtgcacagccagggctacgcccaccgggacctgaagccagagaacctgctgtttgatgagtaccacaagctgaagctgattgactttggcctgtgtgccaagcccaagggcaacaaggactaccacctgcagacctgctgcggcagcctggcctatgctgcccctgagctgatccagggcaagagctacctgggcagcgaggctgatgtgtggagcatgggcatcctgctgtatgtgctgatgtgtggcttcctgccctttgatgatgacaacgtgatggccctgtacaagaagatcatgaggggcaagtatgatgtgcccaagtggctgagccccagcagcatcctgctgctgcagcagatgctgcaggtggaccccaagaagaggatctccatgaagaacctgctgaaccacccctggatcatgcaggactacaactaccctgtggagtggcagagcaagaaccccttcatccacctggatgatgactgtgtgacagagctgtctgtgcaccacaggaacaaccggcagaccatggaggacctgatcagcctgtggcagtatgaccacctgacagccacctacctgctgctgctggccaagaaggcccggggcaagcctgtgcggctgcggctgagcagcttcagctgtggccaggccagcgccacccccttcacagacatcaagagcaacaactggagcctggaggatgtgacagccagtgacaagaactacgtggccggcctgattgattatgactggtgtgaagatgacctgagcactggagctgccacccccaggaccagccagttcaccaagtactggacagagagcaatggagtggagagcaagagcctgaccccagccctgtgcaggaccccagccaacaagctgaagaacaaggaaaatgtgtacacccccaagtctgctgtgaagaatgaggagtacttcatgtttcctgagcccaagacccctgtgaacaagaaccagcacaagcgggagatcctgaccacccccaaccgctacaccacccccagcaaggccaggaaccagtgcctgaaggagacccccatcaagatccctgtgaacagcactggaacagacaagctgatgactggagtcatcagccctgagcggcgctgccgctctgtggagctggacctgaaccaggcccacatggaggagacccccaagaggaagggggccaaggtgtttggcagcctggagcggggcctggacaaggtgatcaccgtgctgaccaggagcaagaggaaaggaagtgccagagatggcccccggcggctgaagctgcactacaacgtgaccaccacccggctggtgaacccagaccagctgctgaatgagatcatgagcatcctgcccaagaagcacgtggactttgtgcagaagggctacaccctgaagtgccagacccagagcgactttgggaaggtgaccatgcagtttgagctggaggtgtgccagctgcagaagccagatgtggtgggcatccggcggcagaggctgaagggagatgcctgggtgtacaagaggctggtggaggacatcctgagcagctgcaaggtgtag

SEQ ID NO: 158890 - DNA, 1743 bp, synthetic construct
  misc_feature 1..1743: note = Description of Artificial Sequence: Synthetic coding sequence
  source 1..1743: mol_type = other DNA
atgaaggactatgatgagctgctgaagtactatgagctgcacgagaccatcggcactggaggctttgccaaggtgaagctggcctgccacatcctgactggagagatggtggccatcaagatcatggacaagaacaccctgggcagtgacctgccccgcatcaagacagaaattgaggccctgaagaacctgcggcaccagcacatctgccagctgtaccacgtgctggagacagccaacaagatcttcatggtgctggagggcaacaaggactaccacctgcagacctgctgcggcagcctggcctatgctgcccctgagctgatccagggcaagagctacctgggcagcgaggctgatgtgtggagcatgggcatcctgctgtatgtgctgatgtgtggcttcctgccctttgatgatgacaacgtgatggccctgtacaagaagatcatgaggggcaagtatgatgtgcccaagtggctgagccccagcagcatcctgctgctgcagcagatgctgcaggtggaccccaagaagaggatctccatgaagaacctgctgaaccacccctggatcatgcaggactacaactaccctgtggagtggcagagcaagaaccccttcatccacctggatgatgactgtgtgacagagctgtctgtgcaccacaggaacaaccggcagaccatggaggacctgatcagcctgtggcagtatgaccacctgacagccacctacctgctgctgctggccaagaaggcccggggcaagcctgtgcggctgcggctgagcagcttcagctgtggccaggccagcgccacccccttcacagacatcaagagcaacaactggagcctggaggatgtgacagccagtgacaagaactacgtggccggcctgattgattatgactggtgtgaagatgacctgagcactggagctgccacccccaggaccagccagttcaccaagtactggacagagagcaatggagtggagagcaagagcctgaccccagccctgtgcaggaccccagccaacaagctgaagaacaaggaaaatgtgtacacccccaagtctgctgtgaagaatgaggagtacttcatgtttcctgagcccaagacccctgtgaacaagaaccagcacaagcgggagatcctgaccacccccaaccgctacaccacccccagcaaggccaggaaccagtgcctgaaggagacccccatcaagatccctgtgaacagcactggaacagacaagctgatgactggagtcatcagccctgagcggcgctgccgctctgtggagctggacctgaaccaggcccacatggaggagacccccaagaggaaaggagccaaggtgtttggcagcctggagcggggcctggacaaggtgatcaccgtgctgaccaggagcaagaggaagggcagcgccagagatggcccccggcggctgaagctgcactacaacgtgaccaccacccggctggtgaacccagaccagctgctgaatgagatcatgagcatcctgcccaagaagcacgtggactttgtgcagaagggctacaccctgaagtgccagacccagagcgactttgggaaggtgaccatgcagtttgagctggaggtgtgccagctgcagaagccagatgtggtgggcatccggcggcagaggctgaagggagatgcctgggtgtacaagaggctggtggaggacatcctgagcagctgcaaggtgtag

SEQ ID NO: 158891 - DNA, 1491 bp, synthetic construct
  misc_feature 1..1491: note = Description of Artificial Sequence: Synthetic coding sequence
  source 1..1491: mol_type = other DNA
atgagggtgctgagcggcaccagcctgatgctgtgcagcctgctgctgctgctgcaggccctgtgcagccctggcctggccccccagagccggggccacctgtgcaggacccggcccacagacctggtgtttgtggtggacagcagccgctctgtgcggcctgtggagtttgagaaggtgaaggtgttcctgagccaggtgattgagagcctggatgtgggccccaatgccaccagggtgggcatggtgaactatgccagcacagtgaagcaggagttcagcctgcgggcccacgtgtccaaggccgccctgctgcaggccgtgcggcgcatccagcccctgagcacaggcaccatgacaggcctggccatccagtttgccatcaccaaggcctttggagatgctgagggcggccgcagccgcagcccagacatcagcaaggtggtgattgtggtgacagatggccggccccaggacagcgtgcaggatgtgtctgcccgggcccgggccagcggcgtggagctgtttgccatcggcgtgggctctgtggacaaggccaccctgcggcagatcgccagcgagccccaggatgaacatgtggactatgtggagagctacagcgtgattgagaagctgagcaggaagttccaggaggccttctgtgtggtgtctgacctgtgtgccactggagaccatgactgtgagcaggtgtgcatcagcagccctggcagctacacctgtgcctgccacgagggcttcaccctgaacagtgatggcaagacctgcaatgtgtgcagcggcggcggcggcagcagcgccacagacctggtgttcctgattgatggcagcaagtctgtgcggccagaaaattttgagctggtgaagaagttcatcagccagatcgtggacaccctggatgtgtctgacaagctggcccaggtgggcctggtgcagtacagcagctctgtgcggcaggagttccccctgggccgcttccacaccaagaaggacatcaaggctgctgtgaggaacatgagctacatggagaagggcaccatgaccggggccgccctgaagtacctgattgacaacagcttcaccgtgagcagcggggcccggcctggggcccagaaggtgggcatcgtgttcacagatggccgcagccaggactacatcaatgatgctgccaagaaggccaaggacctgggcttcaagatgtttgctgtgggcgtgggcaatgctgtggaggatgagctgcgggagatcgccagcgagcctgtggccgagcactacttctacacagctgacttcaagaccatcaaccagatcggcaagaagctgcagaagaagatctgtgtggaggaggacccctgtgcctgtgagagcctggtgaagttccaggccaaggtggagggcctgctgcaggccctgaccaggaagctggaggccgtgtccaagaggctggccatcctggagaacacagtggtgtag

SEQ ID NO: 158892 - DNA, 2874 bp, synthetic construct
  misc_feature 1..2874: note = Description of Artificial Sequence: Synthetic coding sequence
  source 1..2874: mol_type = other DNA
atggagaagatgctggccggctgcttcctgctgatcctgggccagatcgtgctgctgcctgctgaggcccgggagaggagccggggccgcagcatcagccggggcagacatgcccggacccacccccagacagccctgctggagagcagctgtgagaacaagagagctgacctggtgttcatcatcgacagcagccgctctgtgaacacccatgactatgccaaggtgaaggagttcatcgtggacatcctgcagttcctggacattggaccagatgtgaccagggtgggcctgctgcagtatggcagcacagtgaagaatgagttcagcctgaagaccttcaagaggaagtctgaggtggagagagctgtgaagaggatgaggcacctgagcacaggcaccatgacaggcctggccatccagtatgccctgaacatcgccttcagcgaggccgagggcgcccggcccctgagagaaaatgtgcccagggtcatcatgattgtgacagatggccggccccaggacagcgtggccgaggtggccgccaaggcccgggacaccggcatcctgatctttgccatcggcgtgggccaggtggacttcaacaccctgaagagcatcggcagcgagccccatgaagatcatgtgttcctggtggccaacttcagccagatcgagaccctgaccagcgtcttccagaagaagctgtgcacagcccacatgtgcagcaccctggagcacaactgtgcccacttctgcatcaacatccctggcagctatgtgtgccgctgcaagcagggctacatcctgaacagcgaccagaccacctgccgcatccaggacctgtgtgccatggaggaccacaactgtgagcagctgtgtgtgaatgtgcccggcagctttgtgtgccagtgctacagcggctacgccctggctgaagatggcaagagatgtgtggccgtggactactgtgcctctgaaaatcatggctgtgaacatgaatgtgtgaatgctgatggcagctacctgtgccagtgccacgagggctttgccctgaacccagacaagaagacctgcaccaagattgactactgtgccagcagcaaccacggctgccagcatgaatgtgtgaacacagatgacagctacagctgccactgcctgaagggcttcaccctgaacccagacaagaagacctgccgccgcatcaactactgtgccctgaacaagccaggctgtgaacatgaatgtgtgaacatggaggagagctactactgccgctgccaccggggctacaccctggaccccaacgggaagacctgcagccgggtggaccactgtgcccagcaggaccacggctgtgagcagctgtgcctgaacacagaggacagctttgtgtgccagtgcagcgagggcttcctgatcaatgaagacctgaagacctgcagccgggtggactactgcctgctgagtgaccacggctgtgagtacagctgtgtgaacatggacaggagctttgcctgccagtgcccagagggccacgtgctgcggagtgatggcaagacctgtgccaagctggacagctgtgccctgggggaccacggctgtgagcacagctgtgtgtcctctgaggacagctttgtgtgccagtgctttgagggctacatcctgagagaagatggcaagacctgcaggaggaaggatgtgtgccaggccatcgaccacggctgtgagcacatctgtgtgaacagtgatgacagctacacctgtgaatgtctggagggcttccggctggccgaggatggcaagcgctgcaggaggaaggatgtgtgcaagagcacccaccacggctgtgagcacatctgtgtgaacaatggaaacagctacatctgcaagtgcagcgagggctttgtgctggctgaagatggccgccgctgcaagaagtgcacagagggccccatcgacctggtgtttgtgattgatggcagcaagagcctgggggaggagaactttgaggtggtgaagcagtttgtgacaggcatcatcgacagcctgaccatcagccccaaggccgcccgggtgggcctgctgcagtacagcacccaggtgcacacagagttcaccctgaggaacttcaacagcgccaaggacatgaagaaggctgtggcccacatgaagtacatgggcaagggctccatgacaggcctggccctgaagcacatgtttgagaggagcttcacccagggcgagggcgcccggcccctgagcaccagggtgccccgggccgccatcgtgttcacagatggccgggcccaggatgatgtgtctgagtgggccagcaaggccaaggccaacggcatcaccatgtatgctgtgggcgtgggcaaggccatcgaggaggagctgcaggagatcgccagcgagcccaccaacaagcacctgttctatgcagaggacttcagcaccatggatgagatcagcgagaagctgaagaagggcatctgtgaggccctggaggacagtgatggccggcaggacagccctgctggggagctgcccaagacagtgcagcagcccacagagagcgagcctgtgaccatcaacatccaggacctgctgagctgcagcaactttgctgtgcagcaccgctacctgtttgaggaggacaacctgctgcggagcacccagaagctgagccacagcaccaagcccagcggcagccccctggaggagaagcatgaccagtgcaagtgtgaaaatctcatcatgttccagaacctggccaatgaggaggtgaggaagctgacccagaggctgctggaggagatgacccagaggatggaggccctggagaaccggctgcgctacagatag

SEQ ID NO: 158893 - DNA, 2754 bp, synthetic construct
  misc_feature 1..2754: note = Description of Artificial Sequence: Synthetic coding sequence
  source 1..2754: mol_type = other DNA
atggagaagatgctggccggctgcttcctgctgatcctgggccagatcgtgctgctgcctgctgaggcccgggagaggagccggggccgcagcatcagccggggcagacatgcccggacccacccccagacagccctgctggagagcagctgtgagaacaagagagctgacctggtgttcatcatcgacagcagccgctctgtgaacacccatgactatgccaaggtgaaggagttcatcgtggacatcctgcagttcctggacattggaccagatgtgaccagggtgggcctgctgcagtatggcagcacagtgaagaatgagttcagcctgaagaccttcaagaggaagtctgaggtggagagagctgtgaagaggatgaggcacctgagcacaggcaccatgacaggcctggccatccagtatgccctgaacatcgccttcagcgaggccgagggcgcccggcccctgagagaaaatgtgcccagggtcatcatgattgtgacagatggccggccccaggacagcgtggccgaggtggccgccaaggcccgggacaccggcatcctgatctttgccatcggcgtgggccaggtggacttcaacaccctgaagagcatcggcagcgagccccatgaagatcatgtgttcctggtggccaacttcagccagatcgagaccctgaccagcgtcttccagaagaagctgtgcacagcccacatgtgcagcaccctggagcacaactgtgcccacttctgcatcaacatccctggcagctatgtgtgccgctgcaagcagggctacatcctgaacagcgaccagaccacctgccgcatccaggacctgtgtgccatggaggaccacaactgtgagcagctgtgtgtgaatgtgcccggcagctttgtgtgccagtgctacagcggctacgccctggctgaagatggcaagagatgtgtggccgtggactactgtgcctctgaaaatcatggctgtgaacatgaatgtgtgaatgctgatggcagctacctgtgccagtgccacgagggctttgccctgaacccagacaagaagacctgcacccgcatcaactactgtgccctgaacaagccaggctgtgaacatgaatgtgtgaacatggaggagagctactactgccgctgccaccggggctacaccctggaccccaacgggaagacctgcagccgggtggaccactgtgcccagcaggaccacggctgtgagcagctgtgcctgaacacagaagattcttttgtgtgccagtgcagcgagggcttcctgatcaatgaagacctgaagacctgcagccgggtggactactgcctgctgagtgaccacggctgtgagtacagctgtgtgaacatggacaggagctttgcctgccagtgcccagagggccacgtgctgcggagtgatggcaagacctgtgccaagctggacagctgtgccctgggggaccacggctgtgagcacagctgtgtgtccagtgaagattcttttgtgtgccagtgctttgagggctacatcctgcgggaggatggcaagacctgcaggaggaaggatgtgtgccaggccatcgaccacggctgtgagcacatctgtgtgaacagtgatgacagctacacctgtgagtgcctggagggcttccggctggctgaagatggcaagcgctgcaggaggaaggatgtgtgcaagagcacccaccacggctgtgagcacatctgtgtgaacaacggcaacagctacatctgcaagtgcagcgagggctttgtgctggccgaggatggaagacgctgcaagaagtgcacagagggccccatcgacctggtgtttgtgattgatggcagcaagagcctgggggaggagaactttgaggtggtgaagcagtttgtgacaggcatcatcgacagcctgaccatcagccccaaggccgcccgggtgggcctgctgcagtacagcacccaggtgcacacagagttcaccctgaggaacttcaacagcgccaaggacatgaagaaggctgtggcccacatgaagtacatgggcaagggctccatgacaggcctggccctgaagcacatgtttgagaggagcttcacccagggcgagggcgcccggcccctgagcaccagggtgcccagggctgccatcgtgttcacagatggccgggcccaggatgatgtgtctgagtgggccagcaaggccaaggccaacggcatcaccatgtatgctgtgggcgtgggcaaggccatcgaggaggagctgcaggagatcgccagcgagcccaccaacaagcacctgttctatgcagaggacttcagcaccatggatgagatcagcgagaagctgaagaagggcatctgtgaggccctggaggacagtgatggccggcaggacagccctgctggggagctgcccaagacagtgcagcagcccacagaaagtgagcctgtgaccatcaacatccaggacctgctgagctgcagcaactttgctgtgcagcaccgctacctgtttgaggaggacaacctgctgcggagcacccagaagctgagccacagcaccaagcccagcggcagccccctggaggagaagcatgaccagtgcaagtgtgagaacctgatcatgttccagaacctggccaatgaggaggtgaggaagctgacccagcgctacctgctggaggagatgacccagaggatggaggccctggagaaccggctgcgctacagatag

SEQ ID NO: 158894 - DNA, 348 bp, synthetic construct
  misc_feature 1..348: note = Description of Artificial Sequence: Synthetic coding sequence
  source 1..348: mol_type = other DNA
atggaggaccacaactgtgagcagctgtgtgtgaatgtgcccggcagctttgtgtgccagtgctacagcggctacgccctggctgaagatggcaagagatgtgtggccgtggactactgtgcctctgaaaatcatggctgtgaacatgaatgtgtgaatgctgatggcagctacctgtgccagtgccacgagggctttgccctgaacccagacaagaagacctgcaccaagattgactactgtgccagcagcaaccacggctgccagcatgaatgtgtgaacacagatgacagctacagctgccactgcctgaagggcttcaccctgaacccagacaagaagacctag

SEQ ID NO: 158895 - DNA, 2871 bp, synthetic construct
  misc_feature 1..2871: note = Description of Artificial Sequence: Synthetic coding sequence
  source 1..2871: mol_type = other DNA
atggagaagatgctggccggctgcttcctgctgatcctgggccagatcgtgctgctgcctgctgaggcccgggagaggagccggggccgcagcatcagccggggcagacatgcccggacccacccccagacagccctgctggagagcagctgtgagaacaagagagctgacctggtgttcatcatcgacagcagccgctctgtgaacacccatgactatgccaaggtgaaggagttcatcgtggacatcctgcagttcctggacattggaccagatgtgaccagggtgggcctgctgcagtatggcagcacagtgaagaatgagttcagcctgaagaccttcaagaggaagtctgaggtggagagagctgtgaagaggatgaggcacctgagcacaggcaccatgacaggcctggccatccagtatgccctgaacatcgccttcagcgaggccgagggcgcccggcccctgagagaaaatgtgcccagggtcatcatgattgtgacagatggccggccccaggacagcgtggccgaggtggccgccaaggcccgggacaccggcatcctgatctttgccatcggcgtgggccaggtggacttcaacaccctgaagagcatcggcagcgagccccatgaagatcatgtgttcctggtggccaacttcagccagatcgagaccctgaccagcgtcttccagaagaagctgtgcacagcccacatgtgcagcaccctggagcacaactgtgcccacttctgcatcaacatccctggcagctatgtgtgccgctgcaagcagggctacatcctgaacagcgaccagaccacctgccgcatccaggacctgtgtgccatggaggaccacaactgtgagcagctgtgtgtgaatgtgcccggcagctttgtgtgccagtgctacagcggctacgccctggctgaagatggcaagagatgtgtggccgtggactactgtgcctctgaaaatcatggctgtgaacatgaatgtgtgaatgctgatggcagctacctgtgccagtgccacgagggctttgccctgaacccagacaagaagacctgcaccaagattgactactgtgccagcagcaaccacggctgccagcatgaatgtgtgaacacagatgacagctacagctgccactgcctgaagggcttcaccctgaacccagacaagaagacctgccgccgcatcaactactgtgccctgaacaagccaggctgtgaacatgaatgtgtgaacatggaggagagctactactgccgctgccaccggggctacaccctggaccccaacgggaagacctgcagccgggtggaccactgtgcccagcaggaccacggctgtgagcagctgtgcctgaacacagaggacagctttgtgtgccagtgcagcgagggcttcctgatcaatgaagacctgaagacctgcagccgggtggactactgcctgctgagtgaccacggctgtgagtacagctgtgtgaacatggacaggagctttgcctgccagtgcccagagggccacgtgctgcggagtgatggcaagacctgtgccaagctggacagctgtgccctgggggaccacggctgtgagcacagctgtgtgtcctctgaggacagctttgtgtgccagtgctttgagggctacatcctgagagaagatggcaagacctgcaggaggaaggatgtgtgccaggccatcgaccacggctgtgagcacatctgtgtgaacagtgatgacagctacacctgtgaatgtctggagggcttccggctggccgaggatggcaagcgctgcaggaggaaggatgtgtgcaagagcacccaccacggctgtgagcacatctgtgtgaacaatggaaacagctacatctgcaagtgcagcgagggctttgtgctggctgaagatggccgccgctgcaagaagtgcacagagggccccatcgacctggtgtttgtgattgatggcagcaagagcctgggggaggagaactttgaggtggtgaagcagtttgtgacaggcatcatcgacagcctgaccatcagccccaaggccgcccgggtgggcctgctgcagtacagcacccaggtgcacacagagttcaccctgaggaacttcaacagcgccaaggacatgaagaaggctgtggcccacatgaagtacatgggcaagggctccatgacaggcctggccctgaagcacatgtttgagaggagcttcacccagggcgagggcgcccggcccctgagcaccagggtgccccgggccgccatcgtgttcacagatggccgggcccaggatgatgtgtctgagtgggccagcaaggccaaggccaacggcatcaccatgtatgctgtgggcgtgggcaaggccatcgaggaggagctgcaggagatcgccagcgagcccaccaacaagcacctgttctatgcagaggacttcagcaccatggatgagatcagcgagaagctgaagaagggcatctgtgaggccctggaggacagtgatggccggcaggacagccctgctggggagctgcccaagacagtgcagcagcccacagagagcgagcctgtgaccatcaacatccaggacctgctgagctgcagcaactttgctgtgcagcaccgctacctgtttgaggaggacaacctgctgcggagcacccagaagctgagccacagcaccaagcccagcggcagccccctggaggagaagcatgaccagtgcaagtgtgaaaatctcatcatgttccagaacctggccaatgaggaggtgaggaagctgacccagaggctggaggagatgacccagaggatggaggccctggagaaccggctgcgctacagatag

SEQ ID NO: 158896 - DNA, 2814 bp, synthetic construct
  misc_feature 1..2814: note = Description of Artificial Sequence: Synthetic coding sequence
  source 1..2814: mol_type = other DNA
atggagaagatgctggccggctgcttcctgctgatcctgggccagatcgtgctgctgcctgctgaggcccgggagaggagccggggccgcagcatcagccggggcagacatgcccggacccacccccagacagccctgctggagagcagctgtgagaacaagagagctgacctggtgttcatcatcgacagcagccgctctgtgaacacccatgactatgccaaggtgaaggagttcatcgtggacatcctgcagttcctggacattggaccagatgtgaccagggtgggcctgctgcagtatggcagcacagtgaagaatgagttcagcctgaagaccttcaagaggaagtctgaggtggagagagctgtgaagaggatgaggcacctgagcacaggcaccatgacaggcctggccatccagtatgccctgaacatcgccttcagcgaggccgagggcgcccggcccctgagagaaaatgtgcccagggtcatcatgattgtgacagatggccggccccaggacagcgtggccgaggtggccgccaaggcccgggacaccggcatcctgatctttgccatcggcgtgggccaggtggacttcaacaccctgaagagcatcggcagcgagccccatgaagatcatgtgttcctggtggccaacttcagccagatcgagaccctgaccagcgtcttccagaagaagctgtgcacagcccacatgtgcagcaccctggagcacaactgtgcccacttctgcatcaacatccctggcagctatgtgtgccgctgcaagcagggctacatcctgaacagcgaccagaccacctgccgcatccaggacctgtgtgccatggaggaccacaactgtgagcagctgtgtgtgaatgtgcccggcagctttgtgtgccagtgctacagcggctacgccctggctgaagatggcaagagatgtgtggccgtggactactgtgcctctgaaaatcatggctgtgaacatgaatgtgtgaatgctgatggcagctacctgtgccagtgccacgagggctttgccctgaacccagacaagaagacctgcaccaagattgactactgtgccagcagcaaccacggctgccagcatgaatgtgtgaacacagatgacagctacagctgccactgcctgaagggcttcaccctgaacccagacaagaagacctgccgccgcatcaactactgtgccctgaacaagccaggctgtgaacatgaatgtgtgaacatggaggagagctactactgccgctgccaccggggctacaccctggaccccaacgggaagacctgcagccgggtggaccactgtgcccagcaggaccacggctgtgagcagctgtgcctgaacacagaggacagctttgtgtgccagtgcagcgagggcttcctgatcaatgaagacctgaagacctgcagccgggtggactactgcctgctgagtgaccacggctgtgagtacagctgtgtgaacatggacaggagctttgcctgccagtgcccagagggccacgtgctgcggagtgatggcaagacctgtgccaagctggacagctgtgccctgggggaccacggctgtgagcacagctgtgtgtcctctgaggacagctttgtgtgccagtgctttgagggctacatcctgagagaagatggcaagacctgcaggaggaaggatgtgtgccaggccatcgaccacggctgtgagcacatctgtgtgaacagtgatgacagctacacctgtgaatgtctggagggcttccggctggccgaggatggcaagcgctgcaggaggaaggatgtgtgcaagagcacccaccacggctgtgagcacatctgtgtgaacaatggaaacagctacatctgcaagtgcagcgagggctttgtgctggctgaagatggccgccgctgcaagaagtgcacagagggccccatcgacctggtgtttgtgattgatggcagcaagagcctgggggaggagaactttgaggtggtgaagcagtttgtgacaggcatcatcgacagcctgaccatcagccccaaggccgcccgggtgggcctgctgcagtacagcacccaggtgcacacagagttcaccctgaggaacttcaacagcgccaaggacatgaagaaggctgtggcccacatgaagtacatgggcaagggctccatgacaggcctggccctgaagcacatgtttgagaggagcttcacccagggcgagggcgcccggcccctgagcaccagggtgccccgggccgccatcgtgttcacagatggccgggcccaggatgatgtgtctgagtgggccagcaaggccaaggccaacggcatcaccatgtatgctgtgggcgtgggcaaggccatcgaggaggagctgcaggagatcgccagcgagcccaccaacaagcacctgttctatgcagaggacttcagcaccatggatgagatcagcgagaagctgaagaagggcatctgtgaggccctggaggacagtgatggccggcaggacagccctgctggggagctgcccaagacagtgcagcagcccaccgtgcagcaccgctacctgtttgaggaggacaacctgctgcggagcacccagaagctgagccacagcaccaagcccagcggcagccccctggaggagaagcatgaccagtgcaagtgtgagaacctgatcatgttccagaacctggccaatgaggaggtgaggaagctgacccagaggctggaggagatgacccagaggatggaggccctggagaaccggctgcgctacagatag

SEQ ID NO: 158897 - DNA, 2019 bp, synthetic construct
  misc_feature 1..2019: note = Description of Artificial Sequence: Synthetic coding sequence
  source 1..2019: mol_type = other DNA
atggaggaccacaactgtgagcagctgtgtgtgaatgtgcccggcagctttgtgtgccagtgctacagcggctacgccctggctgaagatggcaagagatgtgtggccgtggactactgtgcctctgaaaatcatggctgtgaacatgaatgtgtgaatgctgatggcagctacctgtgccagtgccacgagggctttgccctgaacccagacaagaagacctgcaccaagattgactactgtgccagcagcaaccacggctgccagcatgaatgtgtgaacacagatgacagctacagctgccactgcctgaagggcttcaccctgaacccagacaagaagacctgccgccgcatcaactactgtgccctgaacaagccaggctgtgaacatgaatgtgtgaacatggaggagagctactactgccgctgccaccggggctacaccctggaccccaacgggaagacctgcagccgggtggaccactgtgcccagcaggaccacggctgtgagcagctgtgcctgaacacagaggacagctttgtgtgccagtgcagcgagggcttcctgatcaatgaagacctgaagacctgcagccgggtggactactgcctgctgagtgaccacggctgtgagtacagctgtgtgaacatggacaggagctttgcctgccagtgcccagagggccacgtgctgcggagtgatggcaagacctgtgccaagctggacagctgtgccctgggggaccacggctgtgagcacagctgtgtgtcctctgaggacagctttgtgtgccagtgctttgagggctacatcctgagagaagatggcaagacctgcaggaggaaggatgtgtgccaggccatcgaccacggctgtgagcacatctgtgtgaacagtgatgacagctacacctgtgaatgtctggagggcttccggctggccgaggatggcaagcgctgcaggaggaaggatgtgtgcaagagcacccaccacggctgtgagcacatctgtgtgaacaatggaaacagctacatctgcaagtgcagcgagggctttgtgctggctgaagatggccgccgctgcaagaagtgcacagagggccccatcgacctggtgtttgtgattgatggcagcaagagcctgggggaggagaactttgaggtggtgaagcagtttgtgacaggcatcatcgacagcctgaccatcagccccaaggccgcccgggtgggcctgctgcagtacagcacccaggtgcacacagagttcaccctgaggaacttcaacagcgccaaggacatgaagaaggctgtggcccacatgaagtacatgggcaagggctccatgacaggcctggccctgaagcacatgtttgagaggagcttcacccagggcgagggcgcccggcccctgagcaccagggtgccccgggccgccatcgtgttcacagatggccgggcccaggatgatgtgtctgagtgggccagcaaggccaaggccaacggcatcaccatgtatgctgtgggcgtgggcaaggccatcgaggaggagctgcaggagatcgccagcgagcccaccaacaagcacctgttctatgcagaggacttcagcaccatggatgagatcagcgagaagctgaagaagggcatctgtgaggccctggaggacagtgatggccggcaggacagccctgctggggagctgcccaagacagtgcagcagcccacagagagcgagcctgtgaccatcaacatccaggacctgctgagctgcagcaactttgctgtgcagcaccgctacctgtttgaggaggacaacctgctgcggagcacccagaagctgagccacagcaccaagcccagcggcagccccctggaggagaagcatgaccagtgcaagtgtgaaaatctcatcatgttccagaacctggccaatgaggaggtgaggaagctgacccagaggctggaggagatgacccagaggatggaggccctggagaaccggctgcgctacagatag

SEQ ID NO: 158898 - DNA, 2748 bp, synthetic construct
  misc_feature 1..2748: note = Description of Artificial Sequence: Synthetic coding sequence
  source 1..2748: mol_type = other DNA
atggagaagatgctggccggctgcttcctgctgatcctgggccagatcgtgctgctgcctgctgaggcccgggagaggagccggggccgcagcatcagccggggcagacatgcccggacccacccccagacagccctgctggagagcagctgtgagaacaagagagctgacctggtgttcatcatcgacagcagccgctctgtgaacacccatgactatgccaaggtgaaggagttcatcgtggacatcctgcagttcctggacattggaccagatgtgaccagggtgggcctgctgcagtatggcagcacagtgaagaatgagttcagcctgaagaccttcaagaggaagtctgaggtggagagagctgtgaagaggatgaggcacctgagcacaggcaccatgacaggcctggccatccagtatgccctgaacatcgccttcagcgaggccgagggcgcccggcccctgagagaaaatgtgcccagggtcatcatgattgtgacagatggccggccccaggacagcgtggccgaggtggccgccaaggcccgggacaccggcatcctgatctttgccatcggcgtgggccaggtggacttcaacaccctgaagagcatcggcagcgagccccatgaagatcatgtgttcctggtggccaacttcagccagatcgagaccctgaccagcgtcttccagaagaagctgtgcacagcccacatgtgcagcaccctggagcacaactgtgcccacttctgcatcaacatccctggcagctatgtgtgccgctgcaagcagggctacatcctgaacagcgaccagaccacctgccgcatccaggacctgtgtgccatggaggaccacaactgtgagcagctgtgtgtgaatgtgcccggcagctttgtgtgccagtgctacagcggctacgccctggctgaagatggcaagagatgtgtggccgtggactactgtgcctctgaaaatcatggctgtgaacatgaatgtgtgaatgctgatggcagctacctgtgccagtgccacgagggctttgccctgaacccagacaagaagacctgcacccgcatcaactactgtgccctgaacaagccaggctgtgaacatgaatgtgtgaacatggaggagagctactactgccgctgccaccggggctacaccctggaccccaacgggaagacctgcagccgggtggaccactgtgcccagcaggaccacggctgtgagcagctgtgcctgaacacagaagattcttttgtgtgccagtgcagcgagggcttcctgatcaatgaagacctgaagacctgcagccgggtggactactgcctgctgagtgaccacggctgtgagtacagctgtgtgaacatggacaggagctttgcctgccagtgcccagagggccacgtgctgcggagtgatggcaagacctgtgccaagctggacagctgtgccctgggggaccacggctgtgagcacagctgtgtgtccagtgaagattcttttgtgtgccagtgctttgagggctacatcctgcgggaggatggcaagacctgcaggaggaaggatgtgtgccaggccatcgaccacggctgtgagcacatctgtgtgaacagtgatgacagctacacctgtgagtgcctggagggcttccggctggctgaagatggcaagcgctgcaggaggaaggatgtgtgcaagagcacccaccacggctgtgagcacatctgtgtgaacaacggcaacagctacatctgcaagtgcagcgagggctttgtgctggccgaggatggaagacgctgcaagaagtgcacagagggccccatcgacctggtgtttgtgattgatggcagcaagagcctgggggaggagaactttgaggtggtgaagcagtttgtgacaggcatcatcgacagcctgaccatcagccccaaggccgcccgggtgggcctgctgcagtacagcacccaggtgcacacagagttcaccctgaggaacttcaacagcgccaaggacatgaagaaggctgtggcccacatgaagtacatgggcaagggctccatgacaggcctggccctgaagcacatgtttgagaggagcttcacccagggcgagggcgcccggcccctgagcaccagggtgcccagggctgccatcgtgttcacagatggccgggcccaggatgatgtgtctgagtgggccagcaaggccaaggccaacggcatcaccatgtatgctgtgggcgtgggcaaggccatcgaggaggagctgcaggagatcgccagcgagcccaccaacaagcacctgttctatgcagaggacttcagcaccatggatgagatcagcgagaagctgaagaagggcatctgtgaggccctggaggacagtgatggccggcaggacagccctgctggggagctgcccaagacagtgcagcagcccacagaaagtgagcctgtgaccatcaacatccaggacctgctgagctgcagcaactttgctgtgcagcaccgctacctgtttgaggaggacaacctgctgcggagcacccagaagctgagccacagcaccaagcccagcggcagccccctggaggagaagcatgaccagtgcaagtgtgagaacctgatcatgttccagaacctggccaatgaggaggtgaggaagctgacccagaggctggaggagatgacccagaggatggaggccctggagaaccggctgcgctacagatag

SEQ ID NO: 158899 - DNA, 1461 bp, synthetic construct
  misc_feature 1..1461: note = Description of Artificial Sequence: Synthetic coding sequence
  source 1..1461: mol_type = other DNA
atgcccaggcctgccccagcccggcggctgcccggcctgctgctgctgctgtggcccctgctgctgctgcccagcgctgccccagaccctgtggcccggcccggcttccggcggctggagacccggggccctgggggcagccctggccggcggcccagccctgctgccccagatggagccccagccagcggcaccagcgagcccggccgggcccggggggccggcgtgtgcaagagccggcccctggacctggtgttcatcatcgacagcagccgctctgtgcggcccctggagttcaccaaggtgaagacctttgtgagccgcatcatcgacaccctggacatcggccctgctgacaccagggtggccgtggtgaactatgccagcacagtgaagattgagttccagctgcaggcctacacagacaagcagagcctgaagcaggccgtgggccgcatcacccccctgagcacaggcaccatgagcggcctggccatccagacagccatggatgaggccttcaccgtggaggccggggcccgggagcccagcagcaacatccccaaggtggccatcatcgtgacagatggccggccccaggaccaggtgaatgaggtggccgcccgggcccaggccagcggcatcgagctgtatgctgtgggcgtggacagagctgacatggccagcctgaagatgatggccagcgagcccctggaggagcacgtgttctacgtggagacctacggcgtgattgagaagctgagcagccgcttccaggagaccttctgtgccctggacccctgtgtgctgggcacccaccagtgccagcacgtgtgcatcagtgatggagagggcaagcaccactgtgagtgcagccagggctacaccctgaatgctgacaagaagacctgcagcgccctggacagatgtgccctgaacacccacggctgtgagcacatctgtgtgaatgacaggagcggcagctaccactgtgagtgctatgagggctacaccctgaatgaagacaggaagacctgcagcgcccaggacaagtgtgccctgggcacccacggctgccagcacatctgtgtgaatgacagaacaggcagccaccactgtgagtgctatgagggctacaccctgaatgctgacaagaagacctgcagcgtgcgggacaagtgtgccctgggcagccacggctgccagcacatctgtgtgtctgatggagctgccagctaccactgtgactgctacccaggctacaccctgaatgaagacaagaagacctgcagcgccacagaggaggcccggcggctggtgtccacagaagatgcctgtggctgtgaggccaccctggccttccaggacaaggtgagcagctacctgcagaggctgaacaccaagctggatgacatcctggagaagctgaagatcaatgaatatggccagatccacaggtag

SEQ ID NO: 158900 - DNA, 1335 bp, synthetic construct
  misc_feature 1..1335: note = Description of Artificial Sequence: Synthetic coding sequence
  source 1..1335: mol_type = other DNA
atgcccaggcctgccccagcccggcggctgcccggcctgctgctgctgctgtggcccctgctgctgctgcccagcgctgccccagaccctgtggcccggcccggcttccggcggctggagacccggggccctgggggcagccctggccggcggcccagccctgctgccccagatggagccccagccagcggcaccagcgagcccggccgggcccggggggccggcgtgtgcaagagccggcccctggacctggtgttcatcatcgacagcagccgctctgtgcggcccctggagttcaccaaggtgaagacctttgtgagccgcatcatcgacaccctggacatcggccctgctgacaccagggtggccgtggtgaactatgccagcacagtgaagattgagttccagctgcaggcctacacagacaagcagagcctgaagcaggccgtgggccgcatcacccccctgagcacaggcaccatgagcggcctggccatccagacagccatggatgaggccttcaccgtggaggccggggcccgggagcccagcagcaacatccccaaggtggccatcatcgtgacagatggccggccccaggaccaggtgaatgaggtggccgcccgggcccaggccagcggcatcgagctgtatgctgtgggcgtggacagagctgacatggccagcctgaagatgatggccagcgagcccctggaggagcacgtgttctacgtggagacctacggcgtgattgagaagctgagcagccgcttccaggagaccttctgtgccctggacagatgtgccctgaacacccacggctgtgagcacatctgtgtgaatgacaggagcggcagctaccactgtgagtgctatgagggctacaccctgaatgaagacaggaagacctgcagcgcccaggacaagtgtgccctgggcacccacggctgccagcacatctgtgtgaatgacagaacaggcagccaccactgtgagtgctatgagggctacaccctgaatgctgacaagaagacctgcagcgtgcgggacaagtgtgccctgggcagccacggctgccagcacatctgtgtgtctgatggagctgccagctaccactgtgactgctacccaggctacaccctgaatgaagacaagaagacctgcagcgccacagaggaggcccggcggctggtgtccacagaagatgcctgtggctgtgaggccaccctggccttccaggacaaggtgagcagctacctgcagaggctgaacaccaagctggatgacatcctggagaagctgaagatcaatgaatatggccagatccacaggtag

SEQ ID NO: 158901 - DNA, 1869 bp, synthetic construct
  misc_feature 1..1869: note = Description of Artificial Sequence: Synthetic coding sequence
  source 1..1869: mol_type = other DNA
atgaggggcctgctgtgctggcctgtgctgctgctgctgctgcagccctgggagacccagctgcagctgaccggcccccgctgccacacaggccccctggacctggtgtttgtgattgacagcagccgctctgtgcggccctttgaatttgagaccatgaggcagttcctgatgggcctgctgcggggcctgaatgtgggccccaatgccaccagggtgggcgtcatccagtacagcagccaggtgcagagcgtcttccccctgcgggccttcagcagaagagaggacatggagcgggccatccgggacctggtgcccctggcccagggcaccatgacaggcctggccatccagtatgccatgaatgtggccttctctgtggccgagggcgcccggcccccagaggagcgggtgccccgggtggccgtcatcgtgacagatggccggccccaggacagagtggccgaggtggccgcccaggcccgggcccggggcatcgagatctatgctgtgggcgtgcagagagcagatgtgggcagcctgcgggccatggccagcccccccctggatgagcacgtgttcctggtggagagctttgacctgatccaggagtttggcctgcagttccagagccggctgtgtgggaaggaccagtgtgccgagggcggccacggctgccagcaccagtgtgtgaatgcctgggccatgttccactgcacctgcaaccctggctacaagctggccgctgacaacaagagctgcctggccatcgacctgtgtgccgagggcacccacggctgtgagcaccactgtgtgaacagccctggcagctacttctgccactgccaggtgggctttgtgctgcagcaggaccagaggagctgccgggccatcgactactgcagctttggaaaccacagctgccagcatgaatgtgtgtccacccctgggggcccccgctgccactgccgggagggccatgacctgcagccagatggccgcagctgccaggtgcgggacctgtgcaatggagtggaccacggctgtgagttccagtgtgtgtctgagggcctgagctaccgctgcctgtgcccagagggccggcagctgcaggctgatggcaagagctgcaaccgctgccgggagggccacgtggacctggtgctgctggtggatggcagcaagtctgtgcggccccagaactttgagctggtgaagagatttgtgaaccagatcgtggacttcctggatgtgtccccagagggcaccagggtgggcctggtgcagttcagcagccgggtgaggacagagttccccctgggccgctatggaacagctgctgaggtgaagcaggccgtgctggccgtggagtacatggagcggggcaccatgacaggcctggccctgcggcacatggtggagcacagcttcagcgaggcccagggcgcccggccccgggccctgaatgtgccccgggtgggcctggtgttcacagatggccgcagccaggatgacatctctgtgtgggccgcccgggccaaggaggagggcatcgtgatgtatgctgtgggcgtgggcaaggctgtggaggccgagctgcgggagatcgccagcgagcctgctgagctgcacgtgtcctatgccccagactttggcaccatgacccacctgctggagaacctgcggggcagcatctgcccagaggagggcatctctgctggaacagagctgcggagcccctgtgaatgtgagagcctggtggagttccagggccgcaccctgggcgccctggagagcctgaccctgaacctggcccagctgacagcccggctggaggacctggagaaccagctggccaaccagaagtag

SEQ ID NO: 158902 - DNA, 1746 bp, synthetic construct
  misc_feature 1..1746: note = Description of Artificial Sequence: Synthetic coding sequence
  source 1..1746: mol_type = other DNA
atgaggggcctgctgtgctggcctgtgctgctgctgctgctgcagccctgggagacccagctgcagctgaccggcccccgctgccacacaggccccctggacctggtgtttgtgattgacagcagccgctctgtgcggccctttgaatttgagaccatgaggcagttcctgatgggcctgctgcggggcctgaatgtgggccccaatgccaccagggtgggcgtcatccagtacagcagccaggtgcagagcgtcttccccctgcgggccttcagcagaagagaggacatggagcgggccatccgggacctggtgcccctggcccagggcaccatgacaggcctggccatccagtatgccatgaatgtggccttctctgtggccgagggcgcccggcccccagaggagcgggtgccccgggtggccgtcatcgtgacagatggccggccccaggacagagtggccgaggtggccgcccaggcccgggcccggggcatcgagatctatgctgtgggcgtgcagagagcagatgtgggcagcctgcgggccatggccagcccccccctggatgagcacgtgttcctggtggagagctttgacctgatccaggagtttggcctgcagttccagagccggctgtgtgccatcgacctgtgtgccgagggcacccacggctgtgagcaccactgtgtgaacagccctggcagctacttctgccactgccaggtgggctttgtgctgcagcaggaccagaggagctgccgggccatcgactactgcagctttggaaaccacagctgccagcatgaatgtgtgtccaccccaggcggcccccgctgccactgccgggagggccatgacctgcagccagatggccgcagctgccaggtgcgggacctgtgcaatggagtggaccacggctgtgagttccagtgtgtgtctgagggcctgagctaccgctgcctgtgcccagagggccggcagctgcaggctgatggcaagagctgcaaccgctgccgggagggccacgtggacctggtgctgctggtggatggcagcaagtctgtgcggccccagaactttgagctggtgaagagatttgtgaaccagatcgtggacttcctggatgtgtccccagagggcaccagggtgggcctggtgcagttcagcagccgggtgaggacagagttccccctgggccgctatggaacagctgctgaggtgaagcaggccgtgctggccgtggagtacatggagcggggcaccatgacaggcctggccctgcggcacatggtggagcacagcttcagcgaggcccagggcgcccggccccgggccctgaatgtgccccgggtgggcctggtgttcacagatggccgcagccaggatgacatctctgtgtgggccgcccgggccaaggaggagggcatcgtgatgtatgctgtgggcgtgggcaaggctgtggaggccgagctgcgggagatcgccagcgagcctgctgagctgcacgtgtcctatgccccagactttggcaccatgacccacctgctggagaacctgcggggcagcatctgcccagaggagggcatctctgctggaacagagctgcggagcccctgtgaatgtgagagcctggtggagttccagggccgcaccctgggcgccctggagagcctgaccctgaacctggcccagctgacagcccggctggaggacctggagaaccagctggccaaccagaagtag

SEQ ID NO: 158903 - DNA, 1500 bp, synthetic construct
  misc_feature 1..1500: note = Description of Artificial Sequence: Synthetic coding sequence
  source 1..1500: mol_type = other DNA
atgaggggcctgctgtgctggcctgtgctgctgctgctgctgcagccctgggagacccagctgcagctgaccggcccccgctgccacacaggccccctggacctggtgtttgtgattgacagcagccgctctgtgcggccctttgaatttgagaccatgaggcagttcctgatgggcctgctgcggggcctgaatgtgggccccaatgccaccagggtgggcgtcatccagtacagcagccaggtgcagagcgtcttccccctgcgggccttcagcagaagagaggacatggagcgggccatccgggacctggtgcccctggcccagggcaccatgacaggcctggccatccagtatgccatgaatgtggccttctctgtggccgagggcgcccggcccccagaggagcgggtgccccgggtggccgtcatcgtgacagatggccggccccaggacagagtggccgaggtggccgcccaggcccgggcccggggcatcgagatctatgctgtgggcgtgcagagagcagatgtgggcagcctgcgggccatggccagcccccccctggatgagcacgtgttcctggtggagagctttgacctgatccaggagtttggcctgcagttccagagccggctgtgtgtgcgggacctgtgcaatggagtggaccacggctgtgagttccagtgtgtgtctgagggcctgagctaccgctgcctgtgcccagagggccggcagctgcaggctgatggcaagagctgcaaccgctgccgggagggccacgtggacctggtgctgctggtggatggcagcaagtctgtgcggccccagaactttgagctggtgaagagatttgtgaaccagatcgtggacttcctggatgtgtccccagagggcaccagggtgggcctggtgcagttcagcagccgggtgaggacagagttccccctgggccgctatggaacagctgctgaggtgaagcaggccgtgctggccgtggagtacatggagcggggcaccatgacaggcctggccctgcggcacatggtggagcacagcttcagcgaggcccagggcgcccggccccgggccctgaatgtgccccgggtgggcctggtgttcacagatggccgcagccaggatgacatctctgtgtgggccgcccgggccaaggaggagggcatcgtgatgtatgctgtgggcgtgggcaaggctgtggaggccgagctgcgggagatcgccagcgagcctgctgagctgcacgtgtcctatgccccagactttggcaccatgacccacctgctggagaacctgcggggcagcatctgcccagaggagggcatctctgctggaacagagctgcggagcccctgtgaatgtgagagcctggtggagttccagggccgcaccctgggcgccctggagagcctgaccctgaacctggcccagctgacagcccggctggaggacctggagaaccagctggccaaccagaagtag

SEQ ID NO: 158904 - DNA, 1623 bp, synthetic construct
  misc_feature 1..1623: note = Description of Artificial Sequence: Synthetic coding sequence
  source 1..1623: mol_type = other DNA
atgaggggcctgctgtgctggcctgtgctgctgctgctgctgcagccctgggagacccagctgcagctgaccggcccccgctgccacacaggccccctggacctggtgtttgtgattgacagcagccgctctgtgcggccctttgaatttgagaccatgaggcagttcctgatgggcctgctgcggggcctgaatgtgggccccaatgccaccagggtgggcgtcatccagtacagcagccaggtgcagagcgtcttccccctgcgggccttcagcagaagagaggacatggagcgggccatccgggacctggtgcccctggcccagggcaccatgacaggcctggccatccagtatgccatgaatgtggccttctctgtggccgagggcgcccggcccccagaggagcgggtgccccgggtggccgtcatcgtgacagatggccggccccaggacagagtggccgaggtggccgcccaggcccgggcccggggcatcgagatctatgctgtgggcgtgcagagagcagatgtgggcagcctgcgggccatggccagcccccccctggatgagcacgtgttcctggtggagagctttgacctgatccaggagtttggcctgcagttccagagccggctgtgtgccatcgactactgcagctttggaaaccacagctgccagcatgaatgtgtgtccacccctgggggcccccgctgccactgccgggagggccatgacctgcagccagatggccgcagctgccaggtgcgggacctgtgcaatggagtggaccacggctgtgagttccagtgtgtgtctgagggcctgagctaccgctgcctgtgcccagagggccggcagctgcaggctgatggcaagagctgcaaccgctgccgggagggccacgtggacctggtgctgctggtggatggcagcaagtctgtgcggccccagaactttgagctggtgaagagatttgtgaaccagatcgtggacttcctggatgtgtccccagagggcaccagggtgggcctggtgcagttcagcagccgggtgaggacagagttccccctgggccgctatggaacagctgctgaggtgaagcaggccgtgctggccgtggagtacatggagcggggcaccatgacaggcctggccctgcggcacatggtggagcacagcttcagcgaggcccagggcgcccggccccgggccctgaatgtgccccgggtgggcctggtgttcacagatggccgcagccaggatgacatctctgtgtgggccgcccgggccaaggaggagggcatcgtgatgtatgctgtgggcgtgggcaaggctgtggaggccgagctgcgggagatcgccagcgagcctgctgagctgcacgtgtcctatgccccagactttggcaccatgacccacctgctggagaacctgcggggcagcatctgcccagaggagggcatctctgctggaacagagctgcggagcccctgtgaatgtgagagcctggtggagttccagggccgcaccctgggcgccctggagagcctgaccctgaacctggcccagctgacagcccggctggaggacctggagaaccagctggccaaccagaagtag

SEQ ID NO: 158905 - DNA, 1299 bp, synthetic construct
  misc_feature 1..1299: note = Description of Artificial Sequence: Synthetic coding sequence
  source 1..1299: mol_type = other DNA
atgaggggcctgctgtgctggcctgtgctgctgctgctgctgcagccctgggagacccagctgcagctgaccgggaaggaccagtgtgccgagggcggccacggctgccagcaccagtgtgtgaatgcctgggccatgttccactgcacctgcaaccctggctacaagctggccgctgacaacaagagctgcctggccatcgacctgtgtgccgagggcacccacggctgtgagcaccactgtgtgaacagccctggcagctacttctgccactgccaggtgggctttgtgctgcagcaggaccagaggagctgccgggccatcgactactgcagctttggaaaccacagctgccagcatgaatgtgtgtccacccctgggggcccccgctgccactgccgggagggccatgacctgcagccagatggccgcagctgccaggtgcgggacctgtgcaatggagtggaccacggctgtgagttccagtgtgtgtctgagggcctgagctaccgctgcctgtgcccagagggccggcagctgcaggctgatggcaagagctgcaaccgctgccgggagggccacgtggacctggtgctgctggtggatggcagcaagtctgtgcggccccagaactttgagctggtgaagagatttgtgaaccagatcgtggacttcctggatgtgtccccagagggcaccagggtgggcctggtgcagttcagcagccgggtgaggacagagttccccctgggccgctatggaacagctgctgaggtgaagcaggccgtgctggccgtggagtacatggagcggggcaccatgacaggcctggccctgcggcacatggtggagcacagcttcagcgaggcccagggcgcccggccccgggccctgaatgtgccccgggtgggcctggtgttcacagatggccgcagccaggatgacatctctgtgtgggccgcccgggccaaggaggagggcatcgtgatgtatgctgtgggcgtgggcaaggctgtggaggccgagctgcgggagatcgccagcgagcctgctgagctgcacgtgtcctatgccccagactttggcaccatgacccacctgctggagaacctgcggggcagcatctgcccagaggagggcatctctgctggaacagagctgcggagcccctgtgaatgtgagagcctggtggagttccagggccgcaccctgggcgccctggagagcctgaccctgaacctggcccagctgacagcccggctggaggacctggagaaccagctggccaaccagaagtag

SEQ ID NO: 158906 - DNA, 1299 bp, synthetic construct; identical to SEQ ID NO: 158905
  misc_feature 1..1299: note = Description of Artificial Sequence: Synthetic coding sequence
  source 1..1299: mol_type = other DNA

SEQ ID NO: 158907 - DNA, 1869 bp, synthetic construct; identical to SEQ ID NO: 158901
  misc_feature 1..1869: note = Description of Artificial Sequence: Synthetic coding sequence
  source 1..1869: mol_type = other DNA

SEQ ID NO: 158908 - DNA, 1746 bp, synthetic construct; identical to SEQ ID NO: 158902
  misc_feature 1..1746: note = Description of Artificial Sequence: Synthetic coding sequence
  source 1..1746: mol_type = other DNA

SEQ ID NO: 158909 - DNA, 852 bp, synthetic construct
  misc_feature 1..852: note = Description of Artificial Sequence: Synthetic coding sequence
  source 1..852: mol_type = other DNA
atgagcaagagcttccagcagagcagcctgagccgggacagccagggccacggccgggacctgtctgctgctggcatcggcctgctggccgccgccacccagagcctgtccatgctgctggagagtgaagatgagctgctggtggatgaggaggaggccgccgccctgctggagagcggcagctctgtgggagatgaaacagacctggccaacctgggagatgtggccagtgatggcaagaaggagcccagcgacaaggctgtgaagaaggatggcagcgccagcgctgctgccaagaagaagctgaagaagaggcgcttccctggctccatggagggctttgtgaccctggatgaggtgggagatgaggaggacagcgagctgcagaagctgaggaagagcggcatggccttcaagagcggggacaagaatgatgatggcctggtggagatcaaggtggacaagattgaggagctggaccaggagaatgaagctgccctggagaatggcatcaagaatgaagaaaatacagagcctggagctgagagcagtgaaaatgctgatgaccccaacaaggacaccagtgaaaatgctgatggccagagtgatgagaacaaggatgactacaccatcccagatgagtacagaattggcccctaccagcccaacgtgcctgtgggcatcgactatgtgatccccaagacaggcttctactgcaagctgtgcagcctcttctacaccaatgaggaggtggccaagaacacccactgcagcagcctgccccactaccagaagctgaagaagttcctgaacaagctggccgaggagcggcggcagaagaaggagacctag

SEQ ID NO: 158910 - DNA, 2544 bp, synthetic construct
  misc_feature 1..2544: note = Description of Artificial Sequence: Synthetic coding sequence
  source 1..2544: mol_type = other DNA
atgagcaagagcttccagcagagcagcctgagccgggacagccagggccacggccgggacctgtctgctgctggcatcggcctgctggccgccgccacccagagcctgtccatgcctgccagcctgggccgcatgaaccagggcacagcccggctggccagcctgatgaacctgggcatgagcagcagcctgaaccagcagggcgcccacagcgccctgagcagcgccagcaccagcagccacaacctgcagagcatcttcaacatcggcagccggggccccctgcccctgagcagccagcacagaggagatgctgaccaggccagcaacatcctggccagctttggcctgagcgcccgggacctggatgagctgagccgctacccagaggacaagatcaccccagagaacctgccccagatcctgctgcagctgaagagaagaagaacagaggagggccccaccctgtcctatggaagagatggccgcagcgccacccgggagcccccctacagagtgcccagagatgactgggaggagaagaggcacttcagaagagacagctttgatgaccggggccccagcctgaaccctgtgctggactatgaccacggcagccgcagccaggagagcggctactatgacaggatggactatgaagatgaccggctgagagatggagagcgctgcagagatgacagcttcttcggggagaccagccacaactaccacaagtttgacagtgaatatgaaagaatgggccggggccctggccccctgcaggagaggagcctgtttgagaagaagagaggagccccacccagcagcaacatcgaggacttccacggcctgctgcccaagggctacccccacctgtgcagcatctgtgacctgcctgtgcacagcaacaaggagtggagccagcacatcaatggagccagccacagccgccgctgccagctgctgctggagatctacccagagtggaacccagacaatgacaccggccacaccatgggagaccccttcatgctgcagcagagcaccaacccagcccctggcatcctgggccccccaccacccagcttccacctgggcggccctgctgtgggcccccggggcaacctgggcgctggaaatggaaacctgcagggccccaggcacatgcagaagggccgggtggagaccagccgggtggtgcacatcatggacttccagaggggcaagaacctgcgctaccagctgctgcagctggtggagccctttggagtcatcagcaaccacctgatcctgaacaagatcaatgaggccttcatcgagatggccaccacagaagatgcccaggccgctgtggactactacaccaccaccccagccctggtgtttgggaagcctgtgcgggtgcacctgagccagaagtacaagaggatcaagaagccagagggcaagccagaccagaagtttgaccagaagcaggagctgggccgggtcatccacctgagcaacctgccccacagcggctacagcgacagcgctgtgctgaagctggccgagccctacggcaagatcaagaactacatcctgatgaggatgaagagccaggccttcatcgagatggagaccagagaagatgccatggccatggtggaccactgcctgaagaaggccctgtggttccagggccgctgtgtgaaggtggacctgtctgagaagtacaagaagctggtgctgcgcatccccaacagaggcatcgacctgctgaagaaggacaagagcaggaagaggagctacagcccagatggcaaggagagccccagcgacaagaagagcaagacagatggcagccagaagacagagagcagcacagagggcaaggagcaggaggagaagtctggagaagatggagagaaggacaccaaggatgaccagacagagcaggagcccaacatgctgctggagagtgaagatgagctgctggtggatgaggaggaggccgccgccctgctggagagcggcagctctgtgggagatgaaacagacctggccaacctgggagatgtggccagtgatggcaagaaggagcccagcgacaaggctgtgaagaaggatggcagcgccagcgctgctgccaagaagaagctgaagaaggtggacaagattgaggagctggaccaggagaatgaagctgccctggagaatggcatcaagaatgaagaaaatacagagcctggagctgagagcagtgaaaatgctgatgaccccaacaaggacaccagtgaaaatgctgatggccagagtgatgagaacaaggatgactacaccatcccagatgagtacagaattggcccctaccagcccaacgtgcctgtgggcatcgactatgtgatccccaagacaggcttctactgcaagctgtgcagcctcttctacaccaatgaggaggtggccaagaacacccactgcagcagcctgccccactaccagaagctgaagaagttcctgaacaagctggccgaggagcggcggcagaagaaggagacctag

SEQ ID NO: 158911 - DNA, 2544 bp, synthetic construct; identical to SEQ ID NO: 158910
  misc_feature 1..2544: note = Description of Artificial Sequence: Synthetic coding sequence
  source 1..2544: mol_type = other DNA

SEQ ID NO: 158912 - DNA, 300 bp, synthetic construct
  misc_feature 1..300: note = Description of Artificial Sequence: Synthetic coding sequence
  source 1..300: mol_type = other DNA
atgagcaagagcttccagcagagcagcctgagccgggacagccagggccacggccgggacctgtctgctgctggcatcggcctgctggccgccgccacccagagcctgtccatgcctgccagcctgggccgcatgaaccagggcacagcccggctggccagcctgatgaacctgggcatgagcagcagcctgaaccagcagggcgcccacagcgccctgagcagcgccagcaccagcagccacaacctgcagagcatcttcaacatcggcagccggggccccctgcccctgagcagctag

SEQ ID NO: 158913 - DNA, 1530 bp, synthetic construct
  misc_feature 1..1530: note = Description of Artificial Sequence: Synthetic coding sequence
  source 1..1530: mol_type = other DNA
atgggagaccccttcatgctgcagcagagcaccaacccagcccctggcatcctgggccccccaccacccagcttccacctgggcggccctgctgtgggcccccggggcaacctgggcgctggaaatggaaacctgcagggccccaggcacatgcagaagggccgggtggagaccagccgggtggtgcacatcatggacttccagaggggcaagaacctgcgctaccagctgctgcagctggtggagccctttggagtcatcagcaaccacctgatcctgaacaagatcaatgaggccttcatcgagatggccaccacagaagatgcccaggccgctgtggactactacaccaccaccccagccctggtgtttgggaagcctgtgcgggtgcacctgagccagaagtacaagaggatcaagaagccagagggcaagccagaccagaagtttgaccagaagcaggagctgggccgggtcatccacctgagcaacctgccccacagcggctacagcgacagcgctgtgctgaagctggccgagccctacggcaagatcaagaactacatcctgatgaggatgaagagccaggccttcatcgagatggagaccagagaagatgccatggccatggtggaccactgcctgaagaaggccctgtggttccagggccgctgtgtgaaggtggacctgtctgagaagtacaagaagctggtgctgcgcatccccaacagaggcatcgacctgctgaagaaggacaagagcaggaagaggagctacagcccagatggcaaggagagccccagcgacaagaagagcaagacagatggcagccagaagacagagagcagcacagagggcaaggagcaggaggagaagtctggagaagatggagagaaggacaccaaggatgaccagacagagcaggagcccaacatgctgctggagagtgaagatgagctgctggtggatgaggaggaggccgccgccctgctggagagcggcagctctgtgggagatgaaacagacctggccaacctgggagatgtggccagtgatggcaagaaggagcccagcgacaaggctgtgaagaaggatggcagcgccagcgctgctgccaagaagaagctgaagaaggtggacaagattgaggagctggaccaggagaatgaagctgccctggagaatggcatcaagaatgaagaaaatacagagcctggagctgagagcagtgaaaatgctgatgaccccaacaaggacaccagtgaaaatgctgatggccagagtgatgagaacaaggatgactacaccatcccagatgagtacagaattggcccctaccagcccaacgtgcctgtgggcatcgactatgtgatccccaagacaggcttctactgcaagctgtgcagcctcttctacaccaatgaggaggtggccaagaacacccactgcagcagcctgccccactaccagaagctgaagaagttcctgaacaagctggccgaggagcggcggcagaagaaggagacctag

SEQ ID NO: 158914 - DNA, 264 bp, synthetic construct
  misc_feature 1..264: note = Description of Artificial Sequence: Synthetic coding sequence
  source 1..264: mol_type = other DNA
atgagcaagagcttccagcagagcagcctgagccgggacagccagggccacggccgggacctgtctgctgctggcatcggcctgctggccgccgccacccagagcctgtccatgcctgccagcctgggccgcatgaaccagggcacagcccggctggccagcctgatgaacctgggcatgagcagcagcctgaaccagcagggcgcccacagcgccctgagcagcgccagcaccagcagccacaacctgcagagcatcttctag

SEQ ID NO: 158915 - DNA, 1680 bp, synthetic construct
  misc_feature 1..1680: note = Description of Artificial Sequence: Synthetic coding sequence
  source 1..1680: mol_type = other DNA
atgctgggcgcccagtggaggaggaaccagcccagcagagctgctgaggagtggagccagcacatcaatggagccagccacagccgccgctgccagctgctgctggagatctacccagagtggaacccagacaatgacaccggccacaccatgggagaccccttcatgctgcagcagagcaccaacccagcccctggcatcctgggccccccaccacccagcttccacctgggcggccctgctgtgggcccccggggcaacctgggcgctggaaatggaaacctgcagggccccaggcacatgcagaagggccgggtggagaccagccgggtggtgcacatcatggacttccagaggggcaagaacctgcgctaccagctgctgcagctggtggagccctttggagtcatcagcaaccacctgatcctgaacaagatcaatgaggccttcatcgagatggccaccacagaagatgcccaggccgctgtggactactacaccaccaccccagccctggtgtttgggaagcctgtgcgggtgcacctgagccagaagtacaagaggatcaagaagccagagggcaagccagaccagaagtttgaccagaagcaggagctgggccgggtcatccacctgagcaacctgccccacagcggctacagcgacagcgctgtgctgaagctggccgagccctacggcaagatcaagaactacatcctgatgaggatgaagagccaggccttcatcgagatggagaccagagaagatgccatggccatggtggaccactgcctgaagaaggccctgtggttccagggccgctgtgtgaaggtggacctgtctgagaagtacaagaagctggtgctgcgcatccccaacagaggcatcgacctgctgaagaaggacaagagcaggaagaggagctacagcccagatggcaaggagagccccagcgacaagaagagcaagacagatggcagccagaagacagagagcagcacagagggcaaggagcaggaggagaagtctggagaagatggagagaaggacaccaaggatgaccagacagagcaggagcccaacatgctgctggagagtgaagatgagctgctggtggatgaggaggaggccgccgccctgctggagagcggcagctctgtgggagatgaaacagacctggccaacctgggagatgtggccagtgatggcaagaaggagcccagcgacaaggctgtgaagaaggatggcagcgccagcgctgctgccaagaagaagctgaagaaggtggacaagattgaggagctggaccaggagaatgaagctgccctggagaatggcatcaagaatgaagaaaatacagagcctggagctgagagcagtgaaaatgctgatgaccccaacaaggacaccagtgaaaatgctgatggccagagtgatgagaacaaggatgactacaccatcccagatgagtacagaattggcccctaccagcccaacgtgcctgtgggcatcgactatgtgatccccaagacaggcttctactgcaagctgtgcagcctcttctacaccaatgaggaggtggccaagaacacccactgcagcagcctgccccactaccagaagctgaagaagttcctgaacaagctggccgaggagcggcggcagaagaaggagacctag

SEQ ID NO: 158916 - DNA, 237 bp, synthetic construct
  misc_feature 1..237: note = Description of Artificial Sequence: Synthetic coding sequence
  source 1..237: mol_type = other DNA
atgagcaagagcttccagcagagcagcctgagccgggacagccagggccacggccgggacctgtctgctgctggcatcggcctgctggccgccgccacccagagcctgtccatgcctgccagcctgggccgcatgaaccagggcacagcccggctggccagcctgatgaacctgggcatgagcagcagcctgaaccagcagggcgcccacagcgccctgagcagcgccagcacctag

SEQ ID NO: 158917 - DNA, 1302 bp, synthetic construct
  misc_feature 1..1302: note = Description of Artificial Sequence: Synthetic coding sequence
  source 1..1302: mol_type = other DNA
atgagcaagagcttccagcagagcagcctgagccgggacagccagggccacggccgggacctgtctgctgctggcatcggcctgctggccgccgccacccagagcctgtccatgcctgccagcctgggccgcatgaaccagggcacagcccggctggccagcctgatgaacctgggcatgagcagcagcctgaaccagcagggcgcccacagcgccctgagcagcgccagcaccagcagccacaacctgcagagcatcttcaacatcggcagccggggccccctgcccctgagcagccagcacagaggagatgctgaccaggccagcaacatcctggccagctttggcctgagcgcccgggacctggatgagctgagccgctacccagaggacaagatcaccccagagaacctgccccagatcctgctgcagctgaagagaagaagaacagaggagggccccaccctgtcctatggaagagatggccgcagcgccacccgggagcccccctacagagtgcccagagatgactgggaggagaagaggcacttcagaagagacagctttgatgaccggggccccagcctgaaccctgtgctggactatgaccacggcagccgcagccaggagagcggctactatgacaggatggactatgaagatgaccggctgagagatggagagcgctgcagagatgacagcttcttcggggagaccagccacaactaccacaagtttgacagtgaatatgaaagaatgggccggggccctggccccctgcaggagaggagcctgtttgagaagaagagaggagccccacccagcagcaacatcgaggacttccacggcctgctgcccaagggctacccccacctgtgcagcatctgtgacctgcctgtgcacagcaacaaggagtggagccagcacatcaatggagccagccacagccgccgctgccagctgctgctggagatctacccagagtggaacccagacaatgacaccggccacaccatgggagaccccttcatgctgcagcagagcaccaacccagcccctggcatcctgggccccccaccacccagcttccacctgggcggccctgctgtgggcccccggggcaacctgggcgctggaaatggaaacctgcagggccccaggcacatgcagaagggccgggtggagaccagccgggtggtgcacatcatggacttccagaggggcaagaacctgcgctaccagctgctgcagctggtggagccctttggagtcatcagcaaccacctgatcctgaacaagtag

SEQ ID NO: 158918 - DNA, 1530 bp, synthetic construct; identical to SEQ ID NO: 158913
  misc_feature 1..1530: note = Description of Artificial Sequence: Synthetic coding sequence
  source 1..1530: mol_type = other DNA

SEQ ID NO: 158919 - DNA, 144 bp, synthetic construct
  misc_feature 1..144: note = Description of Artificial Sequence: Synthetic coding sequence
  source 1..144: mol_type = other DNA
atgagcaagagcttccagcagagcagcctgagccgggacagccagggccacggccgggacctgtctgctgctggcatcggcctgctggccgccgccacccagagcctgtccatgcctgccagcctgggccgcatgaaccagtag

SEQ ID NO: 158920 - DNA, 237 bp, synthetic construct; identical to SEQ ID NO: 158916
  misc_feature 1..237: note = Description of Artificial Sequence: Synthetic coding sequence
  source 1..237: mol_type = other DNA

SEQ ID NO: 158921 - DNA, 2544 bp, synthetic construct; identical to SEQ ID NO: 158910
  misc_feature 1..2544: note = Description of Artificial Sequence: Synthetic coding sequence
  source 1..2544: mol_type = other DNA

SEQ ID NO: 158922 - DNA, 30 bp, synthetic construct; identical to SEQ ID NO: 88126
  misc_feature 1..30: note = Description of Artificial Sequence: Synthetic coding sequence
  source 1..30: mol_type = other DNA

SEQ ID NO: 158923 - DNA, 303 bp, synthetic construct
  misc_feature 1..303: note = Description of Artificial Sequence: Synthetic coding sequence
  source 1..303: mol_type = other DNA
atgagcaagagcttccagcagagcagcctgagccgggacagccagggccacggccgggacctgtctgctgctggcatcggcctgctggccgccgccacccagagcctgtccatgcctgccagcctgggccgcatgaaccagggcacagcccggctggccagcctgatgaacctgggcatgagcagcagcctgaaccagcagggcgcccacagcgccctgagcagcgccagcaccagcagccacaacctgcagagcatcttcaacatcggcagccggggccccctgcccctgagcagccagtag

SEQ ID NO: 158924 - DNA, 324 bp, synthetic construct
  misc_feature 1..324: note = Description of Artificial Sequence: Synthetic coding sequence
  source 1..324: mol_type = other DNA
atgagcaagagcttccagcagagcagcctgagccgggacagccagggccacggccgggacctgtctgctgctggcatcggcctgctggccgccgccacccagagcctgtccatgcctgccagcctgggccgcatgaaccagggcacagcccggctggccagcctgatgaacctgggcatgagcagcagcctgaaccagcagggcgcccacagcgccctgagcagcgccagcaccagcagccacaacctgcagagcatcttcaacatcggcagccggggccccctgcccctgagcagccagcacagaggagatgctgaccagtag

SEQ ID NO: 158925 - DNA, 1578 bp, synthetic construct
  misc_feature 1..1578: note = Description of Artificial Sequence: Synthetic coding sequence
  source 1..1578: mol_type = other DNA
atgagggtcttctgtgtgggcctgctgctcttctctgtgacctgggccgcccccaccttccagccccagacagagaagaccaagcagagctgtgtggaggagcagaggcaggaggagaagaacaaggacaacatcggcttccaccacctgggcaagaggatcaaccaggagctgagcagcaaggagaacatcgtgcaggagaggaagaaggacctgagcctgtctgaggcctctgaaaataaaggcagcagcaagagccagaactacttcaccaaccggcagaggctgaacaaggagtacagcatcagcaacaaggagaacacccacaacggcctgaggatgagcatctaccccaagagcactggaaacaagggctttgaagatggagatgatgccatcagcaagctgcatgaccaggaggagtatggagctgccctgatccggaacaacatgcagcacatcatgggccctgtgacagccatcaagctgctgggggaggagaacaaggagaacaccccaagaaatgtgctgaacatcatcccagcctccatgaactatgccaaggcccacagcaaggacaagaagaagccccagagggacagccaggcccagaagagccctgtgaagagcaagagcacccaccgcatccagcacaacatcgactacctgaagcacctgagcaaggtgaagaagatccccagcgactttgagggcagcggctacacagacctgcaggagcggggggacaatgacatcagccccttctctggagatggccagcccttcaaggacatccctgggaagggggaggccaccggccctgacctggagggcaaggacatccagacaggctttgctggccccagcgaggccgagagcacccacctggacaccaagaagccaggctacaatgagatccctgagcgggaggagaatggaggcaacaccatcggcaccagagatgaaacagccaaggaggctgatgctgtggatgtgtccctggtggagggcagcaatgacatcatgggcagcaccaacttcaaggagctgcccggccgggagggcaacagagtggatgctggcagccagaatgcccaccagggcaaggtggagttccactaccccccagcccccagcaaggagaagaggaaggagggcagcagtgatgctgctgagagcaccaactacaatgagatccccaagaatggcaagggcagcaccaggaaaggagtggaccacagcaacagaaaccaggccaccctgaatgagaagcagcgcttccccagcaagggcaagagccagggcctgcccatccccagccggggcctggacaatgagatcaagaatgagatggacagcttcaacggccccagccatgagaacatcatcacccacggcaggaagtaccactacgtgccccaccggcagaacaacagcaccagaaataaaggcatgccccagggcaagggctcctggggccggcagccccacagcaacagacgcttcagcagcagaagaagagatgacagcagcgagagcagtgacagcggcagcagcagcgagagtgatggagactag

SEQ ID NO: 158926 - DNA, 1578 bp, synthetic construct; identical to SEQ ID NO: 158925
  misc_feature 1..1578: note = Description of Artificial Sequence: Synthetic coding sequence
  source 1..1578: mol_type = other DNA

SEQ ID NO: 158927 - DNA, 828 bp, synthetic construct
  misc_feature 1..828: note = Description of Artificial Sequence: Synthetic coding sequence
  source 1..828: mol_type = other DNA
atgagggtcttctgtgtgggcctgctgctcttctctgtgacctgggccgcccccaccttccagccccagacagagaagaccaagcagagctgtgtggaggagcagaggcaggaggagaagaacaaggacaacatcggcttccaccacctgggcaagaggatcaaccaggagctgagcagcaaggagaacatcgtgcaggagaggaagaaggacctgagcctgtctgaggcctctgaaaataaaggcagcagcaagagccagaactacttcaccaaccggcagaggctgaacaaggagtacagcatcagcaacaaggagaacacccacaacggcctgaggatgagcatctaccccaagagcactggaaacaagggctttgaagatggagatgatgccatcagcaagctgcatgaccaggaggagtatggagctgccctgatccggaacaacatgcagcacatcatgggccctgtgacagccatcaagctgctgggggaggagaacaaggagaacaccccaagaaatgtgctgaacatcatcccagcctccatgaactatgccaaggcccacagcaaggacaagaagaagccccagagggacagccaggcccagaagagccctgtgaagagcaagagcacccaccgcatccagcacaacatcgactacctgaagcacctgagcaaggtgaagaagatccccagcgactttgagggcagcggctacacagacctgcaggagcggggggacaatgacatcagccccttcagcggcacagccaacctgctgcggaccttcctggtgaaggagaagctgctggtgctgacctag

SEQ ID NO: 158928 - DNA, 1239 bp, synthetic construct
  misc_feature 1..1239: note = Description of Artificial Sequence: Synthetic coding sequence
  source 1..1239: mol_type = other DNA
atgagcatctaccccaagagcacaggcaacaagggctttgaagatggagatgatgccatcagcaagctgcatgaccaggaggagtatggagctgccctgatccggaacaacatgcagcacatcatgggccctgtgacagccatcaagctgctgggggaggagaacaaggagaacaccccaagaaatgtgctgaacatcatcccagcctccatgaactatgccaaggcccacagcaaggacaagaagaagccccagagggacagccaggcccagaagagccctgtgaagagcaagagcacccaccgcatccagcacaacatcgactacctgaagcacctgagcaaggtgaagaagatccccagcgactttgagggcagcggctacacagacctgcaggagcggggggacaatgacatcagccccttctctggagatggccagcccttcaaggacatccctggaaaaggagaggccactggaccagacctggagggcaaggacatccagacaggctttgctggccccagcgaggccgagagcacccacctggacaccaagaagccaggctacaatgagatccctgagcgggaggagaatggaggcaacaccatcggcaccagagatgaaacagccaaggaggctgatgctgtggatgtgtccctggtggagggcagcaatgacatcatgggcagcaccaacttcaaggagctgcccggccgggagggcaacagagtggatgctggcagccagaatgcccaccagggcaaggtggagttccactaccccccagcccccagcaaggagaagaggaaggagggcagcagtgatgctgctgagagcaccaactacaatgagatccccaagaatggcaagggcagcaccaggaagggcgtggaccacagcaacagaaaccaggccaccctgaatgagaagcagcgcttccccagcaagggcaagagccagggcctgcccatccccagccggggcctggacaatgagatcaagaatgagatggacagcttcaacggccccagccatgagaacatcatcacccacggcaggaagtaccactacgtgccccaccggcagaacaacagcaccaggaacaagggcatgccccagggcaagggctcctggggccggcagccccacagcaacagacgcttcagcagcagaagaagagatgacagcagcgagagcagtgacagcggcagcagcagcgagagtgatggagactag

SEQ ID NO: 158929 - DNA, 1239 bp, synthetic construct; identical to SEQ ID NO: 158928
  misc_feature 1..1239: note = Description of Artificial Sequence: Synthetic coding sequence
  source 1..1239: mol_type = other DNA

SEQ ID NO: 158930 - DNA, 312 bp, synthetic construct
  misc_feature 1..312: note = Description of Artificial Sequence: Synthetic coding sequence
  source 1..312: mol_type = other DNA
atgaagagcctcatcctgctggccatcctggccgccctggccgtggtgaccctgtgctatgagagccatgagagcatggagagctatgagctgaaccccttcatcaacagaagaaatgccaacaccttcatcagcccccagcagcgctggagggccaaggtgcaggagcgcatccgggagaggagcaagcctgtgcatgagctgaaccgggaggcctgtgatgactaccgcctgtgtgaaagatatgccatggtgtatggctacaatgctgcctacaaccgctacttcaggaagagaagaggcaccaagtag

SEQ ID NO: 158931 - DNA, 945 bp, synthetic construct
  misc_feature 1..945: note = Description of Artificial Sequence: Synthetic coding sequence
  source 1..945: mol_type = other DNA
atgggccccctcatcaaccgctgcaagaagatcctgctgcccaccaccgtgcccccagccaccatgaggatctggctgctgggcggcctgctgcccttcctgctgctgctgagcggcctgcagaggcccacagagggcagcgaggtggccatcaagattgactttgattttgcccctggcagctttgatgaccagtaccagggctgcagcaagcaggtgatggagaagctgacccagggcgactacttcaccaaggacatcgaggcccagaagaactacttcaggatgtggcagaaggcccacctggcctggctgaaccagggcaaggtgctgccccagaacatgaccaccacccatgctgtggccatcctcttctacaccctgaacagcaatgtgcacagcgacttcacccgggccatggcctctgtggcccggaccccccagcagtatgaaagaagcttccacttcaagtacctgcactactacctgaccagcgccatccagctgctgaggaaggacagcatcatggagaatggcaccctgtgctatgaggtgcactaccgcaccaaggatgtgcacttcaatgcctacaccggggccaccatccgcttcggccagttcctgagcaccagcctgctgaaggaggaggcccaggagtttggaaaccagaccctcttcaccatcttcacctgcctgggcgcccctgtgcagtacttcagcctgaagaaggaggtgctgatccccccctatgagctgttcaaggtgatcaacatgagctaccaccccaggggggactggctgcagctgcggagcacaggcaacctgagcacctacaactgccagctgctgaaggccagcagcaagaagtgcatcccagaccccatcgccatcgccagcctgtccttcctgaccagcgtcatcatcttcagcaagagccgggtgtag

SEQ ID NO: 158932 - DNA, 1749 bp, synthetic construct
  misc_feature 1..1749: note = Description of Artificial Sequence: Synthetic coding sequence
  source 1..1749: mol_type = other DNA
atgagcattgagaccctgctggaggccgcccgcttcctggagtggcaggcccagcagcagcagagggcccgggaggagcaggagcggctgcggctggagcaggagcgggagcaggagcagaagaaggccaacagcctggcccggctggcccacaccctgcctgtggaggagcccaggatggaggccccacccctgcccctgagccccccagcccctcctccagcccctcctccacccctggccaccccagcccccctgaccgtcatccccatccctgtggtgaccaacagcccccagcccctgcccccacctccacccctgcctgctgctgcccagcccctgcccctggccccccggcagcctgccctggtgggcgcccctggcctgagcatcaaggagcccgcccccctgcccagccggccccaggtgcccaccccagcccccctgctgcctgacagcaaggccaccatcccccccaacggcagccccaagcccctgcagcccctgcccacccctgtgctgaccatcgccccccaccctggggtgcagccccagctggccccccagcagcccccaccacccaccctgggcaccctgaagctggccccagctgaggaggtgaagagcagcgagcagaagaagaggcctgggggcatcggcacccgggaggtgcacaacaagctggagaagaacagaagagcccacctgaaggagtgctttgagaccctgaagaggaacatccccaacgtggatgacaagaagaccagcaacctgtctgtgctgaggacagccctgcgctacatccagagcctgaagaggaaggagaaggagtatgagcacgagatggagcggctggcccgggagaagatcgccacccagcagaggctggccgagctgaagcatgagctgagccagtggatggatgtgctggagattgacagagtgctgcggcagacaggccagccagaagatgaccaggccagcaccagcacagccagcgagggggaggacaacattgatgaggacatggaggaggaccgggccggcctgggcccccccaagctgagccaccggccccagcctgagctgctgaagagcaccctgcccccacccagcaccaccccagcccccctgcccccccacccccacccccacccccacagcgtggccctgcccccagcccacctgcctgtgcagcagcagcagccccagcagaagacccccctgcctgcccctcctcctcctcctgctgccccagcccagaccctggtgcctgccccagcccacctggtggccacagctgggggcggcagcacagtgattgcccacacagccaccacccacgccagcgtcatccagacagtgaaccacgtgctgcagggccctgggggcaagcacatcgcccacatcgcccccagcgcccccagccctgctgtgcagctggccccagccaccccacccatcggccacatcaccgtgcacccagccaccctgaaccacgtggcccacctgggcagccagctgcccctgtacccccagcctgtggccgtgagccacatcgcccacaccctgagccaccagcaggtgaatggaacagctggcctgggccccccagccaccgtgatggccaagccagctgtgggcgcccaggtggtgcaccacccccagctggtgggccagacagtgctgaaccctgtgaccatggtgaccatgcccagcttccctgtgtccaccctgaagctggcctag

SEQ ID NO: 158933 - DNA, 1749 bp, synthetic construct; identical to SEQ ID NO: 158932
  misc_feature 1..1749: note = Description of Artificial Sequence: Synthetic coding sequence
  source 1..1749: mol_type = other DNA

SEQ ID NO: 158934 - DNA, 594 bp, synthetic construct
  misc_feature 1..594: note = Description of Artificial Sequence: Synthetic coding sequence
  source 1..594: mol_type = other DNA
atggagcccctggccagcaacatccaggtgctgctgcaggccgctgagttcctggagcggcgggagcgggaggccgagcacggctacgccagcctgtgcccccacaggagccctggccccatccacaggaggaagaagaggcctccccaggcccctggggcccaggacagcggccgctggagggcccagctgaagcgctgcctggagcggctgaagcagcagatgcccctgggcgctgactgtgcccgctacaccaccctgagcctgctgcggcgggccaggatgcacatccagaagctggaggaccaggagcagagggcccggcagctgaaggagcggctgcggagcaagcagcagagcctgcagaggcagctggagcagctgcggggcctggccggggctgctgagcgggagcggctgcgggctgacagcctggacagcagcggcctgagcagcgagaggagtgacagcgaccaggaggagctggaggtggatgtggagagcctggtgtttggaggagaggccgagctgctgcggggctttgtggccggccaggagcacagctacagccatggaggaggagcctggctgtag

SEQ ID NO: 158935 - DNA, 1167 bp, synthetic construct
  misc_feature 1..1167: note = Description of Artificial Sequence: Synthetic coding sequence
  source 1..1167: mol_type = other DNA
atggagcccctggccagcaacatccaggtgctgctgcaggccgctgagttcctggagcggcgggagcgggaggccgagcacggctacgccagcctgtgcccccacaggagccctggccccatccacaggaggaagaagaggcctccccaggcccctggggcccaggacagcggccgctctgtgcacaatgagctggagaagagaagaagagcccagctgaagcgctgcctggagcggctgaagcagcagatgcccctgggcgctgactgtgcccgctacaccaccctgagcctgctgcggcgggccaggatgcacatccagaagctggaggaccaggagcagagggcccggcagctgaaggagcggctgcggagcaagcagcagagcctgcagaggcagctggagcagctgcggggcctggccggggctgctgagcgggagcggctgcgggctgacagcctggacagcagcggcctgagcagcgagaggagtgacagcgaccagggcgagtgcccagaggccgagggcctgtgtggccccagaggagagcccggcctgctgaccggccccctgcctgcccagaggtcctggcgctggatgtggagggcctggtgcctgggcgtgcggcccagctgctgcggggccagcagccctgcccggagcacagccaccaggacagctgctgcccctggctatgatgtgccccaccctggccgggccagcgccctgtacagctgccaggcccacctgcccggccgcagccccccccaggccttccgggccgcccggagccacctgctggagtggaccaagaggaccctggtgtgggagcaggtgctgcccaagcaccctgctgctggctgccaggccggccccctggagggcaagggccaggacagcagcggccccccctggaccccagctggccaggccgcctgggcccgggcccaggcctttggatctgctgcccccaagggcaccggcagcctgctgggcctcttccccagctggacccggcccccagcctttgccagccacaagctgtacagcatcttcatcaagagcctcttccacaacttccccagcatcgtgctgcccaatgaaaatggaggcacccccaaccaccggcccaccggccggggcaacaacatcagcagccaccactag

SEQ ID NO: 158936 - DNA, 582 bp, synthetic construct
  misc_feature 1..582: note = Description of Artificial Sequence: Synthetic coding sequence
  source 1..582: mol_type = other DNA
atggagcccctggccagcaacatccaggtgctgctgcaggccgctgagttcctggagcggcgggagcgggaggccgagcacggctacgccagcctgtgcccccacaggagccctggccccatccacaggaggaagaagaggcctccccaggcccctggggcccaggacagcggccgctctgtgcacaatgagctggagaagagaagaagagcccagctgaagcgctgcctggagcggctgaagcagcagatgcccctgggcgctgactgtgcccgctacaccaccctgagcctgctgcggcgggccaggatgcacatccagaagctggaggaccaggagcagagggcccggcagctgaaggagcggctgcggagcaagcagcagagcctgcagaggcagctggagcagctgcggggcctggccggggctgctgagcgggagcggctgcgggctgacagcctggacagcagcggcctgagcagcgagaggagtgacagcgaccaggtgctgcccaatgaaaatggaggcacccccaaccaccggcccaccggccggggcaacaacatcagcagccaccactag

SEQ ID NO: 158937 - DNA, 621 bp, synthetic construct
  misc_feature 1..621: note = Description of Artificial Sequence: Synthetic coding sequence
  source 1..621: mol_type = other DNA
atggagcccctggccagcaacatccaggtgctgctgcaggccgctgagttcctggagcggcgggagcgggaggccgagcacggctacgccagcctgtgcccccacaggagccctggccccatccacaggaggaagaagaggcctccccaggcccctggggcccaggacagcggccgctctgtgcacaatgagctggagaagagaagaagagcccagctgaagcgctgcctggagcggctgaagcagcagatgcccctgggcgctgactgtgcccgctacaccaccctgagcctgctgcggcgggccaggatgcacatccagaagctggaggaccaggagcagagggcccggcagctgaaggagcggctgcggagcaagcagcagagcctgcagaggcagctggagcagctgcggggcctggccggggctgctgagcgggagcggctgcgggctgacagcctggacagcagcggcctgagcagcgagaggagtgacagcgaccaggaggagctggaggtggatgtggagagcctggtgtttggaggagaggccgagctgctgcggggctttgtggccggccaggagcacagctacagccacggcggcggggcctggctgtag

SEQ ID NO: 158938 - DNA, 621 bp, synthetic construct; identical to SEQ ID NO: 158937
  misc_feature 1..621: note = Description of Artificial Sequence: Synthetic coding sequence
  source 1..621: mol_type = other DNA

SEQ ID NO: 158939 - DNA, 768 bp, synthetic construct
  misc_feature 1..768: note = Description of Artificial Sequence: Synthetic coding sequence
  source 1..768: mol_type = other DNA
atgatccaggccatccaggtgctgcgcttccacctgctggagctggagaaggtgcatgagctgtgtgacaacttctgccaccgctacatcagctgcctgaagggcaagatgcccatcgacctggtgattgatgaaagagatggcagcagcaagagtgaccacgaggagctgagcggcagcagcaccaacctggccgaccacaaccccagctcctggagggaccatgatgatgccaccagcacccacagcgctggcaccccaggccccagcagcggcggccacgccagccagagcggggacaacagcagcgagcagggagatggcctggacaacagcgtggccagccctggcactggagatgatgatgatcctgacaaggacaagaagaggcagaagaagaggggcatcttccccaaggtggccaccaacatcatgagggcctggctgttccagcacctgacccacccctaccccagcgaggagcagaagaagcagctggcccaggacaccggcctgaccatcctgcaggtgaacaactggttcatcaatgcccggcggcgcatcgtgcagcccatgattgaccagagcaacagagctggcttcctgctggaccccagcgtgtcccagggcgccgcctacagccctgagggccagcccatgggcagctttgtgctggatggccagcagcacatgggcatccggcctgctggccccatgagcggcatgggcatgaacatgggcatggatggccagtggcactacatgtag

SEQ ID NO: 158940 - DNA, 9081 bp, synthetic construct
  misc_feature 1..9081: note = Description of Artificial Sequence: Synthetic coding sequence
  source 1..9081: mol_type = other DNA
atggaggagaagcagcagatcatcctggccaaccaggacggcggcaccgtggccggggccgcccccaccttctttgtgatcctgaagcagcctggaaatggcaagacagaccagggcatcctggtgaccaaccaggatgcctgtgccctggccagctctgtgagcagccctgtgaagagcaagggcaagatctgcctgcctgctgactgcaccgtgggcggcatcaccgtgaccctggacaacaacagcatgtggaatgagttctaccacaggagcacagagatgatcctgaccaagcagggccgcaggatgttcccctactgccgctactggatcaccggcctggacagcaacctgaagtacatcctggtgatggacatcagccctgtggacaaccaccgctacaagtggaatggccgctggtgggagcccagcggcaaggccgagccccacgtgctgggccgggtcttcatccaccctgagagccccagcacaggccactactggatgcaccagcctgtgtccttctacaagctgaagctgaccaacaacaccctggaccaggagggccacatcatcctgcacagcatgcaccgctacctgccccggctgcacctggtgcctgctgagaaggctgtggaggtgatccagctgaatggacctggggtgcacaccttcaccttcccccagacagagttctttgctgtgacagcctaccagaacatccagatcacccagctgaagattgactacaacccctttgccaagggcttcagagatgatggcctgaacaacaagccccagagagatggcaagcagaagaacagcagtgaccaggagggcaacaacatcagcagcagcagcggccaccgggtgcggctgacagagggccagggcagcgagatccagcccggggacctggaccccctgagccggggccacgagaccagcggcaagggcctggagaagaccagcctgaacatcaagagggacttcctgggcttcatggacacagacagcgccctgtctgaggtgccccagctgaagcaggagatcagcgagtgcctgattgccagcagctttgaagatgacagccgggtggccagccccctggaccagaatggcagcttcaacgtggtgatcaaggaggagcccctggatgattatgactatgagctgggagaatgtcctgagggcgtgacagtgaagcaggaggagacagatgaggagacagatgtgtacagcaacagtgatgatgaccccatcctggagaagcagctgaagaggcacaacaaggtggacaaccctgaggccgaccacctgagcagcaagtggctgcccagcagccccagcggcgtggccaaggccaagatgttcaagctggacaccgggaagatgcctgtggtgtacctggagccctgtgctgtgaccaggagcacagtgaagatcagcgagctgcctgacaacatgctgagcaccagcaggaaggacaagagctccatgctggccgagctggagtacctgcccacctacatcgagaacagcaatgaaacagccttctgcctgggcaaggagagtgaaaatggcctgaggaagcacagcccagacctgcgggtggtgcagaagtaccccctgctgaaggagccccagtggaagtacccagacatcagtgacagcatcagcacagagcgcatcctggatgacagcaaggacagcgtgggggacagcctgagcggcaaggaggacctgggcaggaagaggaccaccatgctgaagatcgccacagctgccaaggtggtgaatgccaaccagaatgccagccccaacgtgcctgggaagaggggccggcccaggaagctgaagctgtgcaaggccggccggccccccaagaacacaggcaagagcctcatcagcaccaagaacacccctgtgtccccaggcagcaccttcccagatgtgaagccagacctggaggatgtggatggagtgctgtttgtgtcctttgagagcaaggaggccctggacatccatgctgtggatggcaccacagaggagagcagcagcctgcaggccagcaccaccaatgattctggctaccgggcccgcatcagccagctggagaaggagctgattgaggacctgaagaccctgcggcacaagcaggtgatccaccctggcctgcaggaggtgggcctgaagctgaacagcgtggaccccaccatgagcattgacctgaagtacctgggcgtgcagctgcccctggccccagccaccagcttccccttctggaacctgaccggcaccaacccagccagcccagatgctggcttcccctttgtgtccaggacaggcaagaccaatgacttcaccaagatcaagggctggaggggcaagttccacagcgccagcgccagcagaaatgaaggaggcaacagcgagagcagcctgaagaacagaagtgccttctgcagcgacaagctggatgagtacctggagaatgaaggcaagctgatggagacctccatgggcttcagcagcaatgcccccaccagccctgtggtgtaccagctgcccaccaagagcaccagctatgtgaggaccctggacagcgtgctgaagaagcagagcaccatcagccccagcaccagctacagcctgaagccccacagcgtgccccctgtgtccaggaaggccaagagccagaaccggcaggccaccttcagcggccgcaccaagagcagctacaagagcatcctgccctaccctgtgagccccaagcagaagtacagccacgtgatcctgggggacaaggtgaccaagaacagcagcggcatcatcagcgagaaccaggccaacaactttgtggtgcccaccctggatgagaacatcttccccaagcagatcagcctgcggcaggcccagcagcagcagcagcagcagcagggcagcaggcctcctggcctgagcaagagccaggtgaagctgatggacctggaggactgtgccctgtgggagggcaagcccaggacctacatcacagaggagcgggcagatgtgtccctgaccaccctgctgacagcccaggccagcctgaagaccaagcccatccacaccatcatcaggaagagggccccaccctgcaacaatgacttctgccgcctgggctgtgtgtgcagcagcctggccctggagaagaggcagcctgcccactgccggcggccagactgcatgtttggctgcacctgcctgaagaggaaggtggtgctggtgaagggcggcagcaagaccaagcacttccagaggaaggccgcccaccgggaccccgtcttctatgacaccctgggggaggaggcccgggaggaggaggagggcatccgggaggaggaggagcagctgaaggagaagaagaagaggaagaagctggagtacaccatctgtgaaacagagcctgagcagcctgtgcgccactaccccctgtgggtgaaggtggagggggaggtggaccctgagcctgtgtacatccccacccccagcgtcatcgagcccatgaagcccctgctgctgccccagcctgaggtgctgagccccaccgtgaagggcaagctgctgaccggcatcaagagccccaggagctacacccccaagcccaaccctgtgatccgggaggaggacaaggaccctgtgtacctgtactttgagagcatgatgacctgtgcccgggtgcgggtgtatgaaaggaagaaggaggaccagaggcagcccagcagcagcagcagccccagccccagcttccagcagcagaccagctgccacagcagccctgagaaccacaacaatgccaaggagccagattctgagcagcagcccctgaagcagctgacctgtgacctggaggatgacagcgacaagctgcaggagaagtcctggaagagcagctgcaatgaaggagagagcagcagcaccagctacatgcaccagaggagccctgggggccccaccaagctgattgagatcatcagtgactgcaactgggaggaggacaggaacaagatcctgagcatcctgagccagcacatcaacagcaacatgccccagagcctgaaggtgggcagcttcatcatcgagctggccagccagaggaagagcagaggagagaagaacccccctgtgtacagcagccgggtgaagatctccatgcccagctgccaggaccaggatgacatggccgagaagagcggcagcgagaccccagatggccccctgagccctgggaagatggaggacatcagccctgtgcagacagatgccctggacagcgtgcgggagcggctgcatggaggcaagggcctgcccttctacgccggcctgagccctgctgggaagctggtggcctacaagaggaagcccagcagcagcaccagcggcctcatccaggtggccagcaatgccaaggtggccgccagcaggaagcccaggaccctgctgcccagcaccagcaacagcaagatggccagcagcagcggcacagccaccaacagacctgggaagaacctgaaggcctttgtgcctgccaagaggcccatcgccgcccggcccagccctgggggcgtcttcacccagtttgtgatgagcaaggtgggcgccctgcagcagaagatccctggggtgtccaccccccagaccctggccggcacccagaagttcagcatccggcccagccctgtgatggtggtgacccctgtggtgagcagcgagcctgtgcaggtgtgcagccctgtgacagctgctgtgaccaccaccaccccccaggtgttcctggagaacaccacagctgtgacccccatgacagccatcagtgatgtggagaccaaggagaccacctacagcagcggggccaccaccactggagtggtggaggtgtctgagaccaacaccagcacctctgtgaccagcacccagagcacagccaccgtgaacctgaccaagaccaccggcatcaccacccctgtggcctctgtggccttccccaagagcctggtggccagccccagcaccatcaccctgcctgtggccagcacagccagcaccagcctggtggtggtgacagctgctgccagcagctccatggtgaccacccccaccagcagcctgggctctgtgcccatcatcctgagcggcatcaatggcagcccccctgtgtcccagaggccagaaaatgctgcccagatccctgtggccaccccccaggtgagccccaacacagtgaagagagctggcccccggctgctgcaccccaacggccagatcgtgcagctgctgcccctgcaccagctgcggggcagcaacacccagcccaacctgcagcctgtgatgttcagaaatcctggctctgtgatgggcatccggctgcctgcccccagcaagcccagcgagaccccacccagcagcaccagcagcagcgccttctctgtgatgaaccctgtgatccaggccgtgggcagcagcagcgctgtgaatgtcatcacccaggcccccagcctgctgagcagcggggccagctttgtgtcccaggccggcaccctgaccctgcgcatcagccccccagagccccagagctttgccagcaagacaggcagcgagaccaagatcacctacagcagcggcggccagcctgtgggcacagccagcctcatccccctgcagagcggcagctttgccctgctgcagctgcccggccagaagcctgtgcccagcagcatcctgcagcacgtggccagcctgcagatgaagcgggagagccagaacccagaccagaaggatgagaccaacagcatcaagcgggagcaggagaccaagaaggtgctgcagagcgagggggaggccgtggaccctgaggccaacgtcatcaagcagaacagcggggccgccaccagcgaggagaccctgaatgacagcctggaggacagaggagaccacctggatgaggagtgcctgcctgaggagggctgtgccaccgtgaagcccagcgagcacagctgcatcaccggcagccacacagaccaggactacaaggatgtgaatgaggagtatggagccaggaacaggaagagcagcaaggagaaggtggccgtgctggaggtgaggaccatcagcgagaaggccagcaacaagacagtgcagaacctgagcaaggtgcagcaccagaagctgggagatgtgaaggtggagcagcagaagggctttgacaaccctgaggagaacagcagcgagttccctgtgaccttcaaggaggagagcaagtttgagctgagcggcagcaaggtgatggagcagcagagcaacctgcagcctgaggccaaggagaaggaatgtggggacagcctggagaaggaccgggagcgctggaggaagcacctgaagggccccctgaccaggaaatgtgtgggcgccagccaggagtgcaagaaggaggctgatgagcagctgatcaaggagaccaagacctgccaggagaacagtgatgtgttccagcaggagcagggcatcagtgacctgctgggcaagagcggcatcacagaagatgcccgggtgctgaagacagaatgtgacagctggagccgcatcagcaaccccagcgccttcagcatcgtgcccaggagagctgccaagagcagcagaggaaatggccacttccagggccacctgctgctgcccggggagcagatccagcccaagcaggagaagaagggcggccgcagcagcgctgacttcaccgtgctggacctggaggaggatgatgaagatgacaatgagaagacagatgacagcattgatgagatcgtggatgtggtgtctgactaccagagcgaggaggtggatgatgtggagaagaacaactgtgtggagtacattgaagatgatgaggagcacgtggacattgaaacagtggaggagctgtctgaggagatcaacgtggcccacctgaagaccacagctgcccacacccagagcttcaagcagcccagctgcacccacatctctgcagatgagaaggctgctgagaggagcaggaaggccccacccatccccctgaagctgaagccagactactggagcgacaagctgcagaaggaggccgaggcctttgcctactacagaaggacccacacagccaatgaaagaagaagaagaggagagatgagggacctgtttgagaagctgaagatcaccctgggcctgctgcacagcagcaaggtgtccaagagcctcatcctgacccgggccttcagcgagatccagggcctgacagaccaggccgacaagctgattggccagaagaacctgctgaccaggaagaggaacatcctgatcaggaaggtgagcagcctgagcggcaagacagaggaggtggtgctgaagaagctggagtacatctatgccaagcagcaggccctggaggcccagaagaggaagaagaagatgggcagtgatgaatttgacatcagcccccgcatcagcaagcagcaggagggcagcagcgccagctctgtggacctgggccagatgttcatcaacaacagaagaggcaagcccctcatcctgagcaggaagaaggaccaggccacagagaacaccagccccctgaacaccccccacaccagcgccaacctggtgatgaccccccagggccagctgctgaccctgaagggccccctcttcagcggccctgtggtggccgtgtccccagacctgctggagagtgacctgaagccccaggtggccggcagcgctgtggccctgcctgaaaatgatgacctcttcatgatgccccgcatcgtgaatgtgaccagcctggccacagagggcggcctggtggacatgggcggcagcaagtacccccatgaggtgcctgacagcaagcccagcgaccacctgaaggacacagtgagaaatgaagacaacagcctggaggacaagggccgcatcagcagccggggcaacagagatggccgggtgaccctgggccccacccaggtgttcctggccaacaaggacagcggctacccccagatcgtggatgtgagcaacatgcagaaggcccaggagttcctgcccaagaagatcagcggggacatgaggggcatccagtacaagtggaaggagagcgagagcagaggagagcgggtgaagagcaaggacagcagcttccacaagctgaagatgaaggacctgaaggacagcagcattgagatggagctgaggaaggtgaccagcgccatcgaggaggccgccctggacagcagcgagctgctgaccaacatggaggatgaagatgacacagatgagaccctgaccagcctgctgaatgaaattgccttcctgaaccagcagctgaatgatgacagcgtgggcctggccgagctgcccagctccatggacacagagttccctggagatgcccggcgggccttcatcagcaaggtgcccccaggcagccgggccaccttccaggtggagcacctgggcaccggcctgaaggagctgcctgatgtgcagggcgagagtgacagcatcagccccctgctgctgcacctggaggatgatgacttctctgaaaatgagaagcagctggccgagcccgccagcgagccagatgtgctgaagatcgtgattgattctgagatcaaggacagcctgctgagcaacaagaaggccattgatggcggcaagaacaccagcggcctgcctgctgagcctgagagcgtgagcagcccccccaccctgcacatgaagacaggcctggagaacagcaacagcacagacaccctgtggaggcccatgcccaagctggcccccctgggcctgaaggtggccaaccccagcagtgatgctgatggccagagcctgaaggtgatgccctgcctggcccccatcgccgccaaggtgggctctgtgggccacaagatgaacctgactggaaatgaccaggagggccgggagagcaaggtgatgcccaccctggcccctgtggtggccaagctgggcaacagcggggccagccccagcagcgctgggaagtag

SEQ ID NO: 158941 - DNA, 8571 bp, synthetic construct
  misc_feature 1..8571: note = Description of Artificial Sequence: Synthetic coding sequence
  source 1..8571: mol_type = other DNA
atggaggagaagcagcagatcatcctggccaaccaggacggcggcaccgtggccggggccgcccccaccttctttgtgatcctgaagcagcctggaaatggcaagacagaccagggcatcctggtgaccaaccaggatgcctgtgccctggccagctctgtgagcagccctgtgaagagcaagggcaagatctgcctgcctgctgactgcaccgtgggcggcatcaccgtgaccctggacaacaacagcatgtggaatgagttctaccacaggagcacagagatgatcctgaccaagcagggccgcaggatgttcccctactgccgctactggatcaccggcctggacagcaacctgaagtacatcctggtgatggacatcagccctgtggacaaccaccgctacaagtggaatggccgctggtgggagcccagcggcaaggccgagccccacgtgctgggccgggtcttcatccaccctgagagccccagcacaggccactactggatgcaccagcctgtgtccttctacaagctgaagctgaccaacaacaccctggaccaggagggccacatcatcctgcacagcatgcaccgctacctgccccggctgcacctggtgcctgctgagaaggctgtggaggtgatccagctgaatggacctggggtgcacaccttcaccttcccccagacagagttctttgctgtgacagcctaccagaacatccagatcacccagctgaagattgactacaacccctttgccaagggcttcagagatgatggcctgaacaacaagccccagagagatggcaagcagaagaacagcagtgaccaggagggcaacaacatcagcagcagcagcggccaccgggtgcggctgacagagggccagggcagcgagatccagcccggggacctggaccccctgagccggggccacgagaccagcggcaagggcctggagaagaccagcctgaacatcaagagggacttcctgggcttcatggacacagacagcgccctgtctgaggtgccccagctgaagcaggagatcagcgagtgcctgattgccagcagctttgaagatgacagccgggtggccagccccctggaccagaatggcagcttcaacgtggtgatcaaggaggagcccctggatgattatgactatgagctgggagaatgtcctgagggcgtgacagtgaagcaggaggagacagatgaggagacagatgtgtacagcaacagtgatgatgaccccatcctggagaagcagctgaagaggcacaacaaggtggacaaccctgaggccgaccacctgagcagcaagtggctgcccagcagccccagcggcgtggccaaggccaagatgttcaagctggacaccgggaagatgcctgtggtgtacctggagccctgtgctgtgaccaggagcacagtgaagatcagcgagctgcctgacaacatgctgagcaccagcaggaaggacaagagctccatgctggccgagctggagtacctgcccacctacatcgagaacagcaatgaaacagccttctgcctgggcaaggagagtgaaaatggcctgaggaagcacagcccagacctgcgggtggtgcagaagtaccccctgctgaaggagccccagtggaagtacccagacatcagtgacagcatcagcacagagcgcatcctggatgacagcaaggacagcgtgggggacagcctgagcggcaaggaggacctgggcaggaagaggaccaccatgctgaagatcgccacagctgccaaggtggtgaatgccaaccagaatgccagccccaacgtgcctgggaagaggggccggcccaggaagctgaagctgtgcaaggccggccggccccccaagaacacaggcaagagcctcatcagcaccaagaacacccctgtgtccccaggcagcaccttcccagatgtgaagccagacctggaggatgtggatggagtgctgtttgtgtcctttgagagcaaggaggccctggacatccatgctgtggatggcaccacagaggagagcagcagcctgcaggccagcaccaccaatgattctggctaccgggcccgcatcagccagctggagaaggagctgattgaggacctgaagaccctgcggcacaagcaggtgatccaccctggcctgcaggaggtgggcctgaagctgaacagcgtggaccccaccatgagcattgacctgaagtacctgggcgtgcagctgcccctggccccagccaccagcttccccttctggaacctgaccggcaccaacccagccagcccagatgctggcttcccctttgtgtccaggacaggcaagaccaatgacttcaccaagatcaagggctggaggggcaagttccacagcgccagcgccagcagaaatgaaggaggcaacagcgagagcagcctgaagaacagaagtgccttctgcagcgacaagctggatgagtacctggagaatgaaggcaagctgatggagacctccatgggcttcagcagcaatgcccccaccagccctgtggtgtaccagctgcccaccaagagcaccagctatgtgaggaccctggacagcgtgctgaagaagcagagcaccatcagccccagcaccagctacagcctgaagccccacagcgtgccccctgtgtccaggaaggccaagagccagaaccggcaggccaccttcagcggccgcaccaagagcagctacaagagcatcctgccctaccctgtgagccccaagcagaagtacagccacgtgatcctgggggacaaggtgaccaagaacagcagcggcatcatcagcgagaaccaggccaacaactttgtggtgcccaccctggatgagaacatcttccccaagcagatcagcctgcggcaggcccagcagcagcagcagcagcagcagggcagcaggcctcctggcctgagcaagagccaggtgaagctgatggacctggaggactgtgccctgtgggagggcaagcccaggacctacatcacagaggagcgggcagatgtgtccctgaccaccctgctgacagcccaggccagcctgaagaccaagcccatccacaccatcatcaggaagagggccccaccctgcaacaatgacttctgccgcctgggctgtgtgtgcagcagcctggccctggagaagaggcagcctgcccactgccggcggccagactgcatgtttggctgcacctgcctgaagaggaaggtggtgctggtgaagggcggcagcaagaccaagcacttccagaggaaggccgcccaccgggaccccgtcttctatgacaccctgggggaggaggcccgggaggaggaggagggcatccgggaggaggaggagcagctgaaggagaagaagaagaggaagaagctggagtacaccatctgtgaaacagagcctgagcagcctgtgcgccactaccccctgtgggtgaaggtggagggggaggtggaccctgagcctgtgtacatccccacccccagcgtcatcgagcccatgaagcccctgctgctgccccagcctgaggtgctgagccccaccgtgaagggcaagctgctgaccggcatcaagagccccaggagctacacccccaagcccaaccctgtgatccgggaggaggacaaggaccctgtgtacctgtactttgagagcatgatgacctgtgcccgggtgcgggtgtatgaaaggaagaaggaggaccagaggcagcccagcagcagcagcagccccagccccagcttccagcagcagaccagctgccacagcagccctgagaaccacaacaatgccaaggagccagattctgagcagcagcccctgaagcagctgacctgtgacctggaggatgacagcgacaagctgcaggagaagtcctggaagagcagctgcaatgaaggagagagcagcagcaccagctacatgcaccagaggagccctgggggccccaccaagctgattgagatcatcagtgactgcaactgggaggaggacaggaacaagatcctgagcatcctgagccagcacatcaacagcaacatgccccagagcctgaaggtgggcagcttcatcatcgagctggccagccagaggaagagcagaggagagaagaacccccctgtgtacagcagccgggtgaagatctccatgcccagctgccaggaccaggatgacatggccgagaagagcggcagcgagaccccagatggccccctgagccctgggaagatggaggacatcagccctgtgcagacagatgccctggacagcgtgcgggagcggctgcatggaggcaagggcctgcccttctacgccggcctgagccctgctgggaagctggtggcctacaagaggaagcccagcagcagcaccagcggcctcatccaggtggccagcaatgccaaggtggccgccagcaggaagcccaggaccctgctgcccagcaccagcaacagcaagatggccagcagcagcggcacagccaccaacagacctgggaagaacctgaaggcctttgtgcctgccaagaggcccattgaaaatgctgcccagatccctgtggccaccccccaggtgagccccaacacagtgaagagagctggcccccggctgctgctgatccctgtgcagcagggcagccccaccctgcggcctgtgagcaacacccagctgcagggccacaggatggtgctgcagcctgtgcgcagccccagcggcatgaacctcttccgccaccccaacggccagatcgtgcagctgctgcccctgcaccagctgcggggcagcaacacccagcccaacctgcagcctgtgatgttcagaaatcctggctctgtgatgggcatccggctgcctgcccccagcaagcccagcgagaccccacccagcagcaccagcagcagcgccttctctgtgatgaaccctgtgatccaggccgtgggcagcagcagcgctgtgaatgtcatcacccaggcccccagcctgctgagcagcggggccagctttgtgtcccaggccggcaccctgaccctgcgcatcagccccccagagccccagagctttgccagcaagacaggcagcgagaccaagatcacctacagcagcggcggccagcctgtgggcacagccagcctcatccccctgcagagcggcagctttgccctgctgcagctgcccggccagaagcctgtgcccagcagcatcctgcagcacgtggccagcctgcagatgaagcgggagagccagaacccagaccagaaggatgagaccaacagcatcaagcgggagcaggagaccaagaaggtgctgcagagcgagggggaggccgtggaccctgaggccaacgtcatcaagcagaacagcggggccgccaccagcgaggagaccctgaatgacagcctggaggacagaggagaccacctggatgaggagtgcctgcctgaggagggctgtgccaccgtgaagcccagcgagcacagctgcatcaccggcagccacacagaccaggactacaaggatgtgaatgaggagtatggagccaggaacaggaagagcagcaaggagaaggtggccgtgctggaggtgaggaccatcagcgagaaggccagcaacaagacagtgcagaacctgagcaaggtgcagcaccagaagctgggagatgtgaaggtggagcagcagaagggctttgacaaccctgaggagaacagcagcgagttccctgtgaccttcaaggaggagagcaagtttgagctgagcggcagcaaggtgatggagcagcagagcaacctgcagcctgaggccaaggagaaggaatgtggggacagcctggagaaggaccgggagcgctggaggaagcacctgaagggccccctgaccaggaaatgtgtgggcgccagccaggagtgcaagaaggaggctgatgagcagctgatcaaggagaccaagacctgccaggagaacagtgatgtgttccagcaggagcagggcatcagtgacctgctgggcaagagcggcatcacagaagatgcccgggtgctgaagacagaatgtgacagctggagccgcatcagcaaccccagcgccttcagcatcgtgcccaggagagctgccaagagcagcagaggaaatggccacttccagggccacctgctgctgcccggggagcagatccagcccaagcaggagaagaagggcggccgcagcagcgctgacttcaccgtgctggacctggaggaggatgatgaagatgacaatgagaagacagatgacagcattgatgagatcgtggatgtggtgtctgactaccagagcgaggaggtggatgatgtggagaagaacaactgtgtggagtacattgaagatgatgaggagcacgtggacattgaaacagtggaggagctgtctgaggagatcaacgtggcccacctgaagaccacagctgcccacacccagagcttcaagcagcccagctgcacccacatctctgcagatgagaaggctgctgagaggagcaggaaggccccacccatccccctgaagctgaagccagactactggagcgacaagctgcagaaggaggccgaggcctttgcctactacagaaggacccacacagccaatgaaagaagaagaagaggagagatgagggacctgtttgagaagctgaagatcaccctgggcctgctgcacagcagcaaggtgtccaagagcctcatcctgacccgggccttcagcgagatccagggcctgacagaccaggccgacaagctgattggccagaagaacctgctgaccaggaagaggaacatcctgatcaggaaggtgagcagcctgagcggcaagacagaggaggtggtgctgaagaagctggagtacatctatgccaagcagcaggccctggaggcccagaagaggaagaagaagatgggcagtgatgaatttgacatcagcccccgcatcagcaagcagcaggagggcagcagcgccagctctgtggacctgggccagatgttcatcaacaacagaagaggcaagcccctcatcctgagcaggaagaaggaccaggccacagagaacaccagccccctgaacaccccccacaccagcgccaacctggtgatgaccccccagggccagctgctgaccctgaagggccccctcttcagcggccctgtggtggccgtgtccccagacctgctggagagtgacctgaagccccaggtggccggcagcgctgtggccctgcctgaaaatgatgacctcttcatgatgccccgcatcgtgaatgtgaccagcctggccacagagggcggcctggtggacatgggcggcagcaagtacccccatgaggtgcctgacagcaagcccagcgaccacctgaaggacacagtgagaaatgaagacaacagcctggaggacaagggccgcatcagcagccggggcaacagagatggccgggtgaccctgggccccacccaggtgttcctggccaacaaggacagcggctacccccagatcgtggatgtgagcaacatgcagaaggcccaggagttcctgcccaagaagatcagcggggacatgaggggcatccagtacaagtggaaggagagcgagagcagaggagagcgggtgaagagcaaggacagcagcttccacaagctgaagatgaaggacctgaaggacagcagcattgagatggagctgaggaaggtgaccagcgccatcgaggaggccgccctggacagcagcgagctgctgaccaacatggaggatgaagatgacacagatgagaccctgaccagcctgctgaatgaaattgccttcctgaaccagcagctgaatgatgacagcgtgggcctggccgagctgcccagctccatggacacagagttccctggagatgcccggcgggccttcatcagcaaggtgcccccaggcagccgggccaccttccaggtggagcacctgggcaccggcctgaaggagctgcctgatgtgcagggcgagagtgacagcatcagccccctgctgctgcacctggaggatgatgacttctctgaaaatgagaagcagctggccgagcccgccagcgagccagatgtgctgaagatcgtgattgattctgagatcaaggacagcctgctgagcaacaagaaggccattgatggcggcaagaacaccagcggcctgcctgctgagcctgagagcgtgagcagcccccccaccctgcacatgaagacaggcctggagaacagcaacagcacagacaccctgtggaggcccatgcccaagctggcccccctgggcctgaaggtggccaaccccagcagtgatgctgatggccagagcctgaaggtgatgccctgcctggcccccatcgccgccaaggtgggctctgtgggccacaagatgaacctgactggaaatgaccaggagggccgggagagcaaggtgatgcccaccctggcccctgtggtggccaagctgggcaacagcggggccagccccagcagcgctgggaagtag

SEQ ID NO: 158942 - DNA, 687 bp, synthetic construct
  misc_feature 1..687: note = Description of Artificial Sequence: Synthetic coding sequence
  source 1..687: mol_type = other DNA
atggagcgggtgaagatgatcaacgtgcagaggctgctggaggccgctgagttcctggagcggcgggagagagaatgtgagcacggctacgccagcagcttccccagcatgcccagcccccggctgcagcacagcaagccaccccggcggctgagccgggcccagaagcacagcagcggcagcagcaacaccagcacagccaacagaagcacccacaatgagctggagaagaacagaagagcccacctgcggctgtgcctggagcggctgaaggtgctgatccccctgggccctgactgcaccaggcacaccaccctgggcctgctgaacaaggccaaggcccacatcaagaagctggaggaggccgagaggaagagccagcaccagctggagaacctggagcgggagcagcgcttcctgaagtggaggctggagcagctgcagggcccccaggagatggagcgcatccgcatggacagcatcggcagcaccatcagcagtgacagaagtgacagcgagcgggaggagattgaggtggatgtggagagcacagagttcagccacggggaggtggacaacatcagcaccaccagcatcagtgacattgatgaccacagcagcctgcccagcattggaagtgatgagggctacagcagcgcctctgtgaagctgtccttcaccagctag

SEQ ID NO: 158943 - DNA, 888 bp, synthetic construct
  misc_feature 1..888: note = Description of Artificial Sequence: Synthetic coding sequence
  source 1..888: mol_type = other DNA
atgggcaagaggggccggcccaggaaggaggcccgctgtgagggcgccggcctggccccagctgcccctcctgctgtgcccccagctgtggccgccccccagcccccagccctgcctgaggaccctgctggggccaagccccgctgccccttcagtgacatcttcaacaccagtgaaaattccatggagaagcacatcaacaccttcctgcagaatgtgcagatcctgctggaggccgccagctacctggagcagatcgagaaggagaacaagaagtgtgaacatggctacgccagcagcttccccagcatgcccagcccccggctgcagcacagcaagccaccccggcggctgagccgggcccagaagcacagcagcggcagcagcaacaccagcacagccaacagaagcacccacaatgagctggagaagaacagaagagcccacctgcggctgtgcctggagcggctgaaggtgctgatccccctgggccctgactgcaccaggcacaccaccctgggcctgctgaacaaggccaaggcccacatcaagaagctggaggaggccgagaggaagagccagcaccagctggagaacctggagcgggagcagcgcttcctgaagtggaggctggagcagctgcagggcccccaggagatggagcgcatccgcatggacagcatcggcagcaccatcagcagtgacagaagtgacagcgagcgggaggagattgaggtggatgtggagagcacagagttcagccatggagaggtggacaacatcagcaccaccagcatcagtgacattgatgaccacagcagcctgcccagcatcggcagtgatgagggctacagcagcgcctctgtgaagctgtccttcaccagctag

SEQ ID NO: 158944 - DNA, 549 bp, synthetic construct
  misc_feature 1..549: note = Description of Artificial Sequence: Synthetic coding sequence
  source 1..549: mol_type = other DNA
atgcccagcccccggctgcagcacagcaagccaccccggcggctgagccgggcccagaagcacagcagcggcagcagcaacaccagcacagccaacagaagagcccacctgcggctgtgcctggagcggctgaaggtgctgatccccctgggccctgactgcaccaggcacaccaccctgggcctgctgaacaaggccaaggcccacatcaagaagctggaggaggccgagaggaagagccagcaccagctggagaacctggagcgggagcagcgcttcctgaagtggaggctggagcagctgcagggcccccaggagatggagcgcatccgcatggacagcatcggcagcaccatcagcagtgacagaagtgacagcgagcgggaggagattgaggtggatgtggagagcacagagttcagccacggggaggtggacaacatcagcaccaccagcatcagtgacattgatgaccacagcagcctgcccagcattggaagtgatgagggctacagcagcgcctctgtgaagctgtccttcaccagctag

SEQ ID NO: 158945 - DNA, 579 bp, synthetic construct
  misc_feature 1..579: note = Description of Artificial Sequence: Synthetic coding sequence
  source 1..579: mol_type = other DNA
atgcccagcccccggctgcagcacagcaagccaccccggcggctgagccgggcccagaagcacagcagcggcagcagcaacaccagcacagccaacagaagcacccacaatgagctggagaagaacagaagagcccacctgcggctgtgcctggagcggctgaaggtgctgatccccctgggccctgactgcaccaggcacaccaccctgggcctgctgaacaaggccaaggcccacatcaagaagctggaggaggccgagaggaagagccagcaccagctggagaacctggagcgggagcagcgcttcctgaagtggaggctggagcagctgcagggcccccaggagatggagcgcatccgcatggacagcatcggcagcaccatcagcagtgacagaagtgacagcgagcgggaggagattgaggtggatgtggagagcacagagttcagccacggggaggtggacaacatcagcaccaccagcatcagtgacattgatgaccacagcagcctgcccagcattggaagtgatgagggctacagcagcgcctctgtgaagctgtccttcaccagctag

SEQ ID NO: 158946 - DNA, 579 bp, synthetic construct; identical to SEQ ID NO: 158945
  misc_feature 1..579: note = Description of Artificial Sequence: Synthetic coding sequence
  source 1..579: mol_type = other DNA

SEQ ID NO: 158947 - DNA, 579 bp, synthetic construct; identical to SEQ ID NO: 158945
  misc_feature 1..579: note = Description of Artificial Sequence: Synthetic coding sequence
  source 1..579: mol_type = other DNA

SEQ ID NO: 158948 - DNA, 657 bp, synthetic construct
  misc_feature 1..657: note = Description of Artificial Sequence: Synthetic coding sequence
  source 1..657: mol_type = other DNA
atggagcgggtgaagatgatcaacgtgcagaggctgctggaggccgctgagttcctggagcggcgggagagagaatgtgagcacggctacgccagcagcttccccagcatgcccagcccccggctgcagcacagcaagccaccccggcggctgagccgggcccagaagcacagcagcggcagcagcaacaccagcacagccaacagaagagcccacctgcggctgtgcctggagcggctgaaggtgctgatccccctgggccctgactgcaccaggcacaccaccctgggcctgctgaacaaggccaaggcccacatcaagaagctggaggaggccgagaggaagagccagcaccagctggagaacctggagcgggagcagcgcttcctgaagtggaggctggagcagctgcagggcccccaggagatggagcgcatccgcatggacagcatcggcagcaccatcagcagtgacagaagtgacagcgagcgggaggagattgaggtggatgtggagagcacagagttcagccacggggaggtggacaacatcagcaccaccagcatcagtgacattgatgaccacagcagcctgcccagcattggaagtgatgagggctacagcagcgcctctgtgaagctgtccttcaccagctag

SEQ ID NO: 158949 - DNA, 657 bp, synthetic construct; identical to SEQ ID NO: 158948
  misc_feature 1..657: note = Description of Artificial Sequence: Synthetic coding sequence
  source 1..657: mol_type = other DNA

SEQ ID NO: 158950 - DNA, 357 bp, synthetic construct
  misc_feature 1..357: note = Description of Artificial Sequence: Synthetic coding sequence
  source 1..357: mol_type = other DNA
atgcccagcccccggctgcagcacagcaagccaccccggcggctgagccgggcccagaagcacagcagcggcagcagcaacaccagcacagccaacagaagcacccacaatgagctggagaagaacagaagagcccacctgcggctgtgcctggagcggctgaaggtgctgatccccctgggccctgactgcaccaggcacaccaccctgggcctgctgaacaaggccaaggcccacatcaagaagctggaggaggccgagaggaagagccagcaccagctggagaacctggagcgggagcagcgcttcctgaagtggaggctggagcagctgcagggcccccaggagatggagtag

SEQ ID NO: 158951 - DNA, 681 bp, synthetic construct
  misc_feature 1..681: note = Description of Artificial Sequence: Synthetic coding sequence
  source 1..681: mol_type = other DNA
atgggcaagaggggccggcccaggaaggaggcccgctgtgagggcgccggcctggccccagctgcccctcctgctgtgcccccagctgtggccgccccccagcccccagccctgcctgaggaccctgctggggccaagccccgctgccccttcagtgacatcttcaacaccagtgaaaattccatggagaagcacatcaacaccttcctgcagaatgtgcagatcctgctggaggccgccagctacctggagcagatcgagaaggagaacaagaagtgtgaacatggctacgccagcagcttccccagcatgcccagcccccggctgcagcacagcaagccaccccggcggctgagccgggcccagaagcacagcagcggcagcagcaacaccagcacagccaacagaagagcccacctgcggctgtgcctggagcggctgaaggtgctgatccccctgggccctgactgcaccaggcacaccaccctgggcctgctgaacaaggccaaggcccacatcaagaagctggaggaggccgagaggaagagccagcaccagctggagaacctggagcgggagcagcgcttcctgaagtggaggctggagcagctgcagggcccccaggagatggagcgcatccgcatggacagcatcggcagcaccatcagcagtgacagatag

SEQ ID NO: 158952 - DNA, 897 bp, synthetic construct
  misc_feature 1..897: note = Description of Artificial Sequence: Synthetic coding sequence
  source 1..897: mol_type = other DNA
atgacagagcccggggccagccctgaggacccctgggtgaaggccagccctgtgggcgcccacgccggggagggccgggccggccgggcccgggccaggagaggagctggccggcggggggccagcctgctgagccccaagagccccaccctgtctgtgccccggggctgccgggaggacagcagccacccagcctgtgccaaggtggagtatgcctacagcgacaacagcctggaccccggcctgtttgtggagagcaccaggaaaggatctgtggtgtcccgggccaacagcatcggcagcaccagcgccagctctgtgcccaacacagatgatgaagattctgactaccaccaggaggcctacaaggagagctacaaggacagaagaagaagagcccacacccaggccgagcagaagagaagagatgccatcaagaggggctatgatgacctgcagaccatcgtgcccacctgccagcagcaggacttcagcatcggcagccagaagctgagcaaggccatcgtgctgcagaagaccatcgactacatccagttcctgcacaaggagaagaagaagcaggaggaggaggtgtccaccctgaggaaggatgtgacagccctgaagatcatgaaggtgaactatgagcagatcgtgaaggcccaccaggacaacccccatgaaggagaggaccaggtgtctgaccaggtgaagttcaacgtgttccagggcatcatggacagcctcttccagagcttcaatgccagcatctctgtggccagcttccaggagctgagcgcctgtgtgttctcctggattgaggagcactgcaagccccagaccctgcgggagatcgtgattggagtgctgcaccagctgaagaaccagctgtactag

SEQ ID NO: 158953 - DNA, 645 bp, synthetic construct
  misc_feature 1..645: note = Description of Artificial Sequence: Synthetic coding sequence
  source 1..645: mol_type = other DNA
atgacagagcccggggccagccctgaggacccctgggtgaaggtggagtatgcctacagcgacaacagcctggaccctgatgatgaagattctgactaccaccaggaggcctacaaggagagctacaaggacagaagaagaagagcccacacccaggccgagcagaagagaagagatgccatcaagaggggctatgatgacctgcagaccatcgtgcccacctgccagcagcaggacttcagcatcggcagccagaagctgagcaaggccatcgtgctgcagaagaccatcgactacatccagttcctgcacaaggagaagaagaagcaggaggaggaggtgtccaccctgaggaaggatgtgacagccctgaagatcatgaaggtgaactatgagcagatcgtgaaggcccaccaggacaacccccatgaaggagaggaccaggtgtctgaccaggtgaagttcaacgtgttccagggcatcatggacagcctcttccagagcttcaatgccagcatctctgtggccagcttccaggagctgagcgcctgtgtgttctcctggattgaggagcactgcaagccccagaccctgcgggagatcgtgattggagtgctgcaccagctgaagaaccagctgtactag

SEQ ID NO: 158954 - DNA, 735 bp, synthetic construct
  misc_feature 1..735: note = Description of Artificial Sequence: Synthetic coding sequence
  source 1..735: mol_type = other DNA
atgacagagcccggggccagccctgaggacccctgggtgaaggtggagtatgcctacagcgacaacagcctggaccccggcctgtttgtggagagcaccaggaaaggatctgtggtgtcccgggccaacagcatcggcagcaccagcgccagctctgtgcccaacacagatgatgaagattctgactaccaccaggaggcctacaaggagagctacaaggacagaagaagaagagcccacacccaggccgagcagaagagaagagatgccatcaagaggggctatgatgacctgcagaccatcgtgcccacctgccagcagcaggacttcagcatcggcagccagaagctgagcaaggccatcgtgctgcagaagaccatcgactacatccagttcctgcacaaggagaagaagaagcaggaggaggaggtgtccaccctgaggaaggatgtgacagccctgaagatcatgaaggtgaactatgagcagatcgtgaaggcccaccaggacaacccccatgaaggagaggaccaggtgtctgaccaggtgaagttcaacgtgttccagggcatcatggacagcctcttccagagcttcaatgccagcatctctgtggccagcttccaggagctgagcgcctgtgtgttctcctggattgaggagcactgcaagccccagaccctgcgggagatcgtgattggagtgctgcaccagctgaagaaccagctgtactag

SEQ ID NO: 158955 - DNA, 2826 bp, synthetic construct
  misc_feature 1..2826: note = Description of Artificial Sequence: Synthetic coding sequence
  source 1..2826: mol_type = other DNA
atggccgaggccaacccccggcggggcaagatgaggttcagaagaaatgctgccagcttccctggcaacctgcacctggtgctggtgctgcggcccaccagcttcctgcagaggaccttcacagacatcggcttctggttcagccaggaggacttcatgctgaagctgcctgtggtgatgctgagctctgtgtctgacctgctgacctacattgatgacaagcagctgaccccagagctgggcggcaccctgcagtactgccacagcgagtggatcatcttcagaaatgccattgaaaattttgccctgactgtgaaggagatggcccagatgctgcagagctttggaacagagctggccgagacagagctgcctgatgacatccccagcattgaggagatcctggccatccgggcagagcgctaccacctgctgaagaatgacatcacagctgtgaccaaggagggcaagatcctgctgaccaacctggaggtgcctgacacagagggcgctgtgagcagccggctggagtgccaccggcagatcagcggggactggcagaccatcaacaagctgctgacccaggtgcatgacatggagacagcctttgatggcttctgggagaagcaccagctgaagatggagcagtacctgcagctgtggaagtttgagcaggacttccagcagctggtgacagaggtggagttcctgctgaaccagcaggccgagctggctgatgtgacaggcaccatcgcccaggtgaagcagaagatcaagaagctggagaacctggatgagaacagccaggagctgctgagcaaggcccagtttgtgatcctgcacggccacaagctggccgccaaccaccactacgccctggacctgatctgccagcgctgcaatgagctgcgctacctgagtgacatcctggtgaatgagatcaaggccaagaggatccagctgagcaggaccttcaagatgcacaagctgctgcagcaggcccggcagtgctgtgatgaaggagagtgcctgctggccaaccaggagattgacaagttccagagcaaagaagatgcccagaaggccctgcaggacatcgagaacttcctggagatggccctgcccttcatcaactatgagcctgagaccctgcagtatgaatttgatgtgatcctgagccctgagctgaaggtgcagatgaagaccatccagctgaagctggagaacatccgcagcatctttgagaaccagcaggccggcttcaggaacctggccgacaagcacgtgcggcccatccagtttgtggtgcccaccccagagaacctggtgaccagcggcacccccttcttcagcagcaagcaggtgggcgtgggctacagcttcttccaggcctgcaagctgttcagcaagggcaagaagacctggaggcagaaccagagcaacctgaagattgaggtggtgcctgactgccaggagaagaggagcagcggccccagcagcagcctggacaatggaaacagcctggatgtgctgaagaaccacgtgctgaatgaactcatccagacagagcgggtgtatgtgcgggagctgtacacagtgctgctgggctacagagctgagatggacaaccctgagatgtttgacctgatgccacccctgctgaggaacaagaaggacatcctgtttggaaacatggccgagatctatgagttccacaatgacatcttcctgagcagcctggagaactgtgcccacgcccctgagcgggtgggcccctgcttcctggagaggaaggatgacttccagatgtatgccaagtactgccagaacaagcccaggtctgagaccatctggaggaagtacagtgaatgtgccttcttccaggagtgccagaggaagctgaagcaccggctgcggctggacagctacctgctgaagcctgtgcagaggatcaccaagtaccagctgctgctgaaggagctgctgaagtacagcaaggactgtgagggcagcgccctgctgaagaaggccctggatgccatgctggacctgctgaagtctgtgaatgacagcatgcaccagatcgccatcaatggctacatcggcaacctgaatgagctgggcaagatgatcatgcagggcggcttctctgtgtggattggccacaagaagggggccaccaagatgaaggacctggcccgcttcaagcccatgcagaggcacctgttcctgtatgagaaggccatcgtgttctgcaagagaagagtggagagcggggagggcagtgaccgctaccccagctacagcttcaagcactgctggaagatggatgaggtgggcatcacagaatatgtgaagggggacaacaggaagtttgagatctggtacggggagaaggaggaggtgtacatcgtgcaggccagcaatgtggatgtgaagatgacctggctgaaggagatccggaacatcctgctgaagcagcaggagctgctgactgtgaagaagaggaagcagcaggaccagctgacagagcgggacaagttccagatcagcctgcagcagaatgatgagaagcagcagggcgccttcatcagcacagaggagacagagctggagcacaccagcacagtggtggaggtgtgtgaggccatcgcctctgtgcaggccgaggccaacacagtgtggacagaggccagccagagcgctgagatcagcgaggagcctgctgagtggagcagcaactacttctaccccacctatgatgaaaatgaggaggagaaccggcccctgatgaggcctgtgtctgagatggccctgctgtactag

SEQ ID NO: 158956 - DNA, 2583 bp, synthetic construct
  misc_feature 1..2583: note = Description of Artificial Sequence: Synthetic coding sequence
  source 1..2583: mol_type = other DNA
atggccgaggccaacccccggcggggcaagatgaggttcagaagaaatgctgccagcttccctggcaacctgcacctggtgctggtgctgcggcccaccagcttcctgcagaggaccttcacagacatcggcttctggttcagccaggaggacttcatgctgaagctgcctgtggtgatgctgagctctgtgtctgacctgctgacctacattgatgacaagcagctgaccccagagctgggcggcaccctgcagtactgccacagcgagtggatcatcttcagaaatgccattgaaaattttgccctgactgtgaaggagatggcccagatgctgcagagctttggaacagagctggccgagacagagctgcctgatgacatccccagcattgaggagatcctggccatccgggcagagcgctaccacctgctgaagaatgacatcacagctgtgaccaaggagggcaagatcctgctgaccaacctggaggtgcctgacacagagggcgctgtgagcagccggctggagtgccaccggcagatcagcggggactggcagaccatcaacaagctgctgacccaggtgcatgacatggagacagcctttgatggcttctgggagaagcaccagctgaagatggagcagtacctgcagctgtggaagtttgagcaggacttccagcagctggtgacagaggtggagttcctgctgaaccagcaggccgagctggctgatgtgacaggcaccatcgcccaggtgaagcagaagatcaagaagctggagaacctggatgagaacagccaggagctgctgagcaaggcccagtttgtgatcctgcacggccacaagctggccgccaaccaccactacgccctggacctgatctgccagcgctgcaatgagctgcgctacctgagtgacatcctggtgaatgagatcaaggccaagaggatccagctgagcaggaccttcaagatgcacaagctgctgcagcaggcccggcagtgctgtgatgaaggagagtgcctgctggccaaccaggagattgacaagttccagagcaaagaagatgcccagaaggccctgcaggacatcgagaacttcctggagatggccctgcccttcatcaactatgagcctgagaccctgcagtatgaatttgatgtgatcctgagccctgagctgaaggtgcagatgaagaccatccagctgaagctggagaacatccgcagcatctttgagaaccagcaggccggcttcaggaacctggccgacaagcacgtgcggcccatccagtttgtggtgcccaccccagagaacctggtgaccagcggcacccccttcttcagcagcaagcagggcaagaagacctggaggcagaaccagagcaacctgaagattgaggtggtgcctgactgccaggagaagaggagcagcggccccagcagcagcctggacaatggaaacagcctggatgtgctgaagaaccacgtgctgaatgaactcatccagacagagcgggtgtatgtgcgggagctgtacacagtgctgctgggctacagagctgagatggacaaccctgagatgtttgacctgatgccacccctgctgaggaacaagaaggacatcctgtttggaaacatggccgagatctatgagttccacaatgacatcttcctgagcagcctggagaactgtgcccacgcccctgagcgggtgggcccctgcttcctggagaggaaggatgacttccagatgtatgccaagtactgccagaacaagcccaggtctgagaccatctggaggaagtacagtgaatgtgccttcttccaggagtgccagaggaagctgaagcaccggctgcggctggacagctacctgctgaagcctgtgcagaggatcaccaagtaccagctgctgctgaaggagctgctgaagtacagcaaggactgtgagggcagcgccctgctgaagaaggccctggatgccatgctggacctgctgaagtctgtgaatgacagcatgcaccagatcgccatcaatggctacatcggcaacctgaatgagctgggcaagatgatcatgcagggcggcttctctgtgtggattggccacaagaagggggccaccaagatgaaggacctggcccgcttcaagcccatgcagaggcacctgttcctgtatgagaaggccatcgtgttctgcaagagaagagtggagagcggggagggcagtgaccgctaccccagctacagcttcaagcactgctggaagatggatgaggtgggcatcacagaatatgtgaagggggacaacaggaagtttgagatctggtacggggagaaggaggaggtgtacatcgtgcaggccagcaatgtggatgtgaagatgacctggctgaaggagatccggaacatcctgctgaagcagcaggagctgctgactgtgaagaagaggaagcagcaggaccagctgacagagcgggacaagttccagatcagcctgcagcagaatgatgaggacctgtgccgccgctggctgagctacattgatgaggccaccatgagcaatggcaagtag

SEQ ID NO: 158957 - DNA, 2778 bp, synthetic construct
  misc_feature 1..2778: note = Description of Artificial Sequence: Synthetic coding sequence
  source 1..2778: mol_type = other DNA
atggccgaggccaacccccggcggggcaagatgaggttcagaagaaatgctgccagcttccctggcaacctgcacctggtgctggtgctgcggcccaccagcttcctgcagaggaccttcacagacatcggcttctggttcagccaggaggacttcatgctgaagctgcctgtggtgatgctgagctctgtgtctgacctgctgacctacattgatgacaagcagctgaccccagagctgggcggcaccctgcagtactgccacagcgagtggatcatcttcagaaatgccattgaaaattttgccctgactgtgaaggagatggcccagatgctgcagagctttggaacagagctggccgagacagagctgcctgatgacatccccagcattgaggagatcctggccatccgggcagagcgctaccacctgctgaagaatgacatcacagctgtgaccaaggagggcaagatcctgctgaccaacctggaggtgcctgacacagagggcgctgtgagcagccggctggagtgccaccggcagatcagcggggactggcagaccatcaacaagctgctgacccaggtgcatgacatggagacagcctttgatggcttctgggagaagcaccagctgaagatggagcagtacctgcagctgtggaagtttgagcaggacttccagcagctggtgacagaggtggagttcctgctgaaccagcaggccgagctggctgatgtgacaggcaccatcgcccaggtgaagcagaagatcaagaagctggagaacctggatgagaacagccaggagctgctgagcaaggcccagtttgtgatcctgcacggccacaagctggccgccaaccaccactacgccctggacctgatctgccagcgctgcaatgagctgcgctacctgagtgacatcctggtgaatgagatcaaggccaagaggatccagctgagcaggaccttcaagatgcacaagctgctgcagcaggcccggcagtgctgtgatgaaggagagtgcctgctggccaaccaggagattgacaagttccagagcaaagaagatgcccagaaggccctgcaggacatcgagaacttcctggagatggccctgcccttcatcaactatgagcctgagaccctgcagtatgaatttgatgtgatcctgagccctgagctgaaggtgcagatgaagaccatccagctgaagctggagaacatccgcagcatctttgagaaccagcaggccggcttcaggaacctggccgacaagcacgtgcggcccatccagtttgtggtgcccaccccagagaacctggtgaccagcggcacccccttcttcagcagcaagcagggcaagaagacctggaggcagaaccagagcaacctgaagattgaggtggtgcctgactgccaggagaagaggagcagcggccccagcagcagcctggacaatggaaacagcctggatgtgctgaagaaccacgtgctgaatgaactcatccagacagagcgggtgtatgtgcgggagctgtacacagtgctgctgggctacagagctgagatggacaaccctgagatgtttgacctgatgccacccctgctgaggaacaagaaggacatcctgtttggaaacatggccgagatctatgagttccacaatgacatcttcctgagcagcctggagaactgtgcccacgcccctgagcgggtgggcccctgcttcctggagaggaaggatgacttccagatgtatgccaagtactgccagaacaagcccaggtctgagaccatctggaggaagtacagtgaatgtgccttcttccaggagtgccagaggaagctgaagcaccggctgcggctggacagctacctgctgaagcctgtgcagaggatcaccaagtaccagctgctgctgaaggagctgctgaagtacagcaaggactgtgagggcagcgccctgctgaagaaggccctggatgccatgctggacctgctgaagtctgtgaatgacagcatgcaccagatcgccatcaatggctacatcggcaacctgaatgagctgggcaagatgatcatgcagggcggcttctctgtgtggattggccacaagaagggggccaccaagatgaaggacctggcccgcttcaagcccatgcagaggcacctgttcctgtatgagaaggccatcgtgttctgcaagagaagagtggagagcggggagggcagtgaccgctaccccagctacagcttcaagcactgctggaagatggatgaggtgggcatcacagaatatgtgaagggggacaacaggaagtttgagatctggtacggggagaaggaggaggtgtacatcgtgcaggccagcaatgtggatgtgaagatgacctggctgaaggagatccggaacatcctgctgaagcagcaggagctgctgactgtgaagaagaggaagcagcaggaccagctgacagagcgggacaagttccagatcagcctgcagcagaatgatgagaagcagcagggcgccttcatcagcacagaggagacagagctggagcacaccagcacagtggtggaggtgtgtgaggccatcgcctctgtgcaggccgaggccaacacagtgtggacagaggccagccagagcgctgagatcagcgaggagcctgctgagtggagcagcaactacttctaccccacctatgatgaaaatgaggaggagaaccggcccctgatgaggcctgtgtctgagatggccctgctgtactag

SEQ ID NO: 158958 - DNA, 3213 bp, synthetic construct
  misc_feature 1..3213: note = Description of Artificial Sequence: Synthetic coding sequence
  source 1..3213: mol_type = other DNA
atgccccaggccgccgccagcgccccctggacctctgtgtcctgtggccgcatccctggcctgccccagaacccagatggctgcaccttcatgcccatcgcccaggccatccccctgcaggtggacatggccatggccctgcagagggtgagaattgctgagaagtatggcaagaactacctgtgcctgctgcaggccgtgtttgtggccgagacagacctgctgctgcgcatcaaggacatcagccacttcctgatgcaggacatcgccttcctgagcggcggccggggcaaggacaatgcctggatcatcaccttccctgagaactgcaacttccgctgcatccctgaggaggtgattgccaaggtgctgacctacctgaccagcatcgcccggcagaatggaagtgacagccgcttcaccatcatcctggaccggcggctggacacctggagcagcctgaagatcagcctgcagaagatcagcgccagcttccctggcaacctgcacctggtgctggtgctgcggcccaccagcttcctgcagaggaccttcacagacatcggcttctggttcagccaggaggacttcatgctgaagctgcctgtggtgatgctgagctctgtgtctgacctgctgacctacattgatgacaagcagctgaccccagagctgggcggcaccctgcagtactgccacagcgagtggatcatcttcagaaatgccatcgagaactttgccctgactgtgaaggagatggcccagatgctgcagagctttggaacagagctggccgagacagagctgcctgatgacatccccagcattgaggagatcctggccatccgggcagagcgctaccacctgctgaagaatgacatcacagctgtgaccaaggagggcaagatcctgctgaccaacctggaggtgcctgacacagaaggagctgtgagcagccggctggagtgccaccggcagatcagcggggactggcagaccatcaacaagctgctgacccaggtgcatgacatggagacagcctttgatggcttctgggagaagcaccagctgaagatggagcagtacctgcagctgtggaagtttgagcaggacttccagcagctggtgacagaggtggagttcctgctgaaccagcaggccgagctggctgatgtgacaggcaccatcgcccaggtgaagcagaagatcaagaagctggagaacctggatgagaacagccaggagctgctgagcaaggcccagtttgtgatcctgcacggccacaagctggccgccaaccaccactacgccctggacctgatctgccagcgctgcaatgagctgcgctacctgagtgacatcctggtgaatgagatcaaggccaagaggatccagctgagcaggaccttcaagatgcacaagctgctgcagcaggcccggcagtgctgtgatgaaggagaatgtctgctggccaaccaggagattgacaagttccagagcaaggaggatgcccagaaggccctgcaggacatcgagaacttcctggagatggccctgcccttcatcaactatgagcctgagaccctgcagtatgaatttgatgtgatcctgagccctgagctgaaggtgcagatgaagaccatccagctgaagctggagaacatccgcagcatctttgagaaccagcaggccggcttcaggaacctggccgacaagcacgtgcggcccatccagtttgtggtgcccaccccagagaacctggtgaccagcggcacccccttcttcagcagcaagcagggcaagaagacctggaggcagaaccagagcaacctgaagattgaggtggtgcctgactgccaggagaagaggagcagcggccccagcagcagcctggacaatggaaacagcctggatgtgctgaagaaccacgtgctgaatgagctgatccagacagagcgggtgtatgtgcgggagctgtacacagtgctgctgggctacagagctgagatggacaaccctgagatgtttgacctgatgccacccctgctgaggaacaagaaggacatcctgtttggaaacatggccgagatctatgagttccacaatgacatcttcctgagcagcctggagaactgtgcccacgcccctgagcgggtgggcccctgcttcctggagaggaaggatgacttccagatgtatgccaagtactgccagaacaagcccaggtctgagaccatctggaggaagtacagtgaatgtgccttcttccaggagtgccagaggaagctgaagcaccggctgcggctggacagctacctgctgaagcctgtgcagaggatcaccaagtaccagctgctgctgaaggagctgctgaagtacagcaaggactgtgagggcagcgccctgctgaagaaggccctggatgccatgctggacctgctgaagtctgtgaatgacagcatgcaccagatcgccatcaatggctacatcggcaacctgaatgagctgggcaagatgatcatgcagggcggcttctctgtgtggattggccacaagaagggggccaccaagatgaaggacctggcccgcttcaagcccatgcagaggcacctgttcctgtatgagaaggccatcgtgttctgcaagagaagagtggagagcggggagggcagtgaccgctaccccagctacagcttcaagcactgctggaagatggatgaggtgggcatcacagaatatgtgaagggggacaacaggaagtttgagatctggtatggagagaaggaggaggtgtacatcgtgcaggccagcaatgtggatgtgaagatgacctggctgaaggagatccggaacatcctgctgaagcagcaggagctgctgactgtgaagaagaggaagcagcaggaccagctgacagagcgggacaagttccagatcagcctgcagcagaatgatgagaagcagcagggcgccttcatcagcacagaggagacagagctggagcacaccagcacagtggtggaggtgtgtgaggccatcgcctctgtgcaggccgaggccaacacagtgtggacagaggccagccagagcgctgagatcagcgaggagcctgctgagtggagcagcaactacttctaccccacctatgatgaaaatgaggaggagaaccggcccctgatgaggcctgtgtctgagatggccctgctgtactag

SEQ ID NO: 158959 - DNA, 2958 bp, synthetic construct
  misc_feature 1..2958: note = Description of Artificial Sequence: Synthetic coding sequence
  source 1..2958: mol_type = other DNA
atgcaggacatcgccttcctgagcggcggccggggcaaggacaatgcctggatcatcaccttccctgagaactgcaacttccgctgcatccctgaggaggtgattgccaaggtgctgacctacctgaccagcatcgcccggcagaatggaagtgacagccgcttcaccatcatcctggaccggcggctggacacctggagcagcctgaagatcagcctgcagaagatcagcgccagcttccctggcaacctgcacctggtgctggtgctgcggcccaccagcttcctgcagaggaccttcacagacatcggcttctggttcagccaggaggacttcatgctgaagctgcctgtggtgatgctgagctctgtgtctgacctgctgacctacattgatgacaagcagctgaccccagagctgggcggcaccctgcagtactgccacagcgagtggatcatcttcagaaatgccattgaaaattttgccctgactgtgaaggagatggcccagatgctgcagagctttggaacagagctggccgagacagagctgcctgatgacatccccagcattgaggagatcctggccatccgggcagagcgctaccacctgctgaagaatgacatcacagctgtgaccaaggagggcaagatcctgctgaccaacctggaggtgcctgacacagagggcgctgtgagcagccggctggagtgccaccggcagatcagcggggactggcagaccatcaacaagctgctgacccaggtgcatgacatggagacagcctttgatggcttctgggagaagcaccagctgaagatggagcagtacctgcagctgtggaagtttgagcaggacttccagcagctggtgacagaggtggagttcctgctgaaccagcaggccgagctggctgatgtgacaggcaccatcgcccaggtgaagcagaagatcaagaagctggagaacctggatgagaacagccaggagctgctgagcaaggcccagtttgtgatcctgcacggccacaagctggccgccaaccaccactacgccctggacctgatctgccagcgctgcaatgagctgcgctacctgagtgacatcctggtgaatgagatcaaggccaagaggatccagctgagcaggaccttcaagatgcacaagctgctgcagcaggcccggcagtgctgtgatgaaggagagtgcctgctggccaaccaggagattgacaagttccagagcaaagaagatgcccagaaggccctgcaggacatcgagaacttcctggagatggccctgcccttcatcaactatgagcctgagaccctgcagtatgaatttgatgtgatcctgagccctgagctgaaggtgcagatgaagaccatccagctgaagctggagaacatccgcagcatctttgagaaccagcaggccggcttcaggaacctggccgacaagcacgtgcggcccatccagtttgtggtgcccaccccagagaacctggtgaccagcggcacccccttcttcagcagcaagcagggcaagaagacctggaggcagaaccagagcaacctgaagattgaggtggtgcctgactgccaggagaagaggagcagcggccccagcagcagcctggacaatggaaacagcctggatgtgctgaagaaccacgtgctgaatgaactcatccagacagagcgggtgtatgtgcgggagctgtacacagtgctgctgggctacagagctgagatggacaaccctgagatgtttgacctgatgccacccctgctgaggaacaagaaggacatcctgtttggaaacatggccgagatctatgagttccacaatgacatcttcctgagcagcctggagaactgtgcccacgcccctgagcgggtgggcccctgcttcctggagaggaaggatgacttccagatgtatgccaagtactgccagaacaagcccaggtctgagaccatctggaggaagtacagtgaatgtgccttcttccaggagtgccagaggaagctgaagcaccggctgcggctggacagctacctgctgaagcctgtgcagaggatcaccaagtaccagctgctgctgaaggagctgctgaagtacagcaaggactgtgagggcagcgccctgctgaagaaggccctggatgccatgctggacctgctgaagtctgtgaatgacagcatgcaccagatcgccatcaatggctacatcggcaacctgaatgagctgggcaagatgatcatgcagggcggcttctctgtgtggattggccacaagaagggggccaccaagatgaaggacctggcccgcttcaagcccatgcagaggcacctgttcctgtatgagaaggccatcgtgttctgcaagagaagagtggagagcggggagggcagtgaccgctaccccagctacagcttcaagcactgctggaagatggatgaggtgggcatcacagaatatgtgaagggggacaacaggaagtttgagatctggtacggggagaaggaggaggtgtacatcgtgcaggccagcaatgtggatgtgaagatgacctggctgaaggagatccggaacatcctgctgaagcagcaggagctgctgactgtgaagaagaggaagcagcaggaccagctgacagagcgggacaagttccagatcagcctgcagcagaatgatgagaagcagcagggcgccttcatcagcacagaggagacagagctggagcacaccagcacagtggtggaggtgtgtgaggccatcgcctctgtgcaggccgaggccaacacagtgtggacagaggccagccagagcgctgagatcagcgaggagcctgctgagtggagcagcaactacttctaccccacctatgatgaaaatgaggaggagaaccggcccctgatgaggcctgtgtctgagatggccctgctgtactag

SEQ ID NO: 158960 - DNA, 1290 bp, synthetic construct
  misc_feature 1..1290: note = Description of Artificial Sequence: Synthetic coding sequence
  source 1..1290: mol_type = other DNA
tgacatgtgctgaatgaactcatccagacagagcgggtgtatgtgcgggagctgtacacagtgctgctgggctacagagctgagatggacaaccctgagatgtttgacctgatgccacccctgctgaggaacaagaaggacatcctgtttggaaacatggccgagatctatgagttccacaatgacatcttcctgagcagcctggagaactgtgcccacgcccctgagcgggtgggcccctgcttcctggagaggaaggatgacttccagatgtatgccaagtactgccagaacaagcccaggtctgagaccatctggaggaagtacagtgaatgtgccttcttccaggagtgccagaggaagctgaagcaccggctgcggctggacagctacctgctgaagcctgtgcagaggatcaccaagtaccagctgctgctgaaggagctgctgaagtacagcaaggactgtgagggcagcgccctgctgaagaaggccctggatgccatgctggacctgctgaagtctgtgaatgacagcatgcaccagatcgccatcaatggctacatcggcaacctgaatgagctgggcaagatgatcatgcagggcggcttctctgtgtggattggccacaagaagggggccaccaagatgaaggacctggcccgcttcaagcccatgcagaggcacctgttcctgtatgagaaggccatcgtgttctgcaagagaagagtggagagcggggagggcagtgaccgctaccccagctacagcttcaagcactgctggaagatggatgaggtgggcatcacagaatatgtgaagggggacaacaggaagtttgagatctggtacggggagaaggaggaggtgtacatcgtgcaggccagcaatgtggatgtgaagatgacctggctgaaggagatccggaacatcctgctgaagcagcaggagctgctgactgtgaagaagaggaagcagcaggaccagctgacagagcgggacaagttccagatcagcctgcagcagaatgatgagaagcagcagggcgccttcatcagcacagaggagacagagctggagcacaccagcacagtggtggaggtgtgtgaggccatcgcctctgtgcaggccgaggccaacacagtgtggacagaggccagccagagcgctgagatcagcgaggagcctgctgagtggagcagcaactacttctaccccacctatgatgaaaatgaggaggagaaccggcccctgatgaggcctgtgtctgagatggccctgctgtactag

SEQ ID NO: 158961 - DNA, 1587 bp, synthetic construct
  misc_feature 1..1587: note = Description of Artificial Sequence: Synthetic coding sequence
  source 1..1587: mol_type = other DNA
gtgcagatgaagaccatccagctgaagctggagaacatccgcagcatctttgagaaccagcaggccggcttcaggaacctggccgacaagcacgtgcggcccatccagtttgtggtgcccaccccagagaacctggtgaccagcggcacccccttcttcagcagcaagcagggcaagaagacctggaggcagaaccagagcaacctgaagattgaggtggtgcctgactgccaggagaagaggagcagcggccccagcagcagcctggacaatggaaacagcctggatgtgctgaagaaccacgtgctgaatgagctgatccagacagagcgggtgtatgtgcgggagctgtacacagtgctgctgggctacagagctgagatggacaaccctgagatgtttgacctgatgccacccctgctgaggaacaagaaggacatcctgtttggaaacatggccgagatctatgagttccacaatgacatcttcctgagcagcctggagaactgtgcccacgcccctgagcgggtgggcccctgcttcctggagaggaaggatgacttccagatgtatgccaagtactgccagaacaagcccaggtctgagaccatctggaggaagtacagtgaatgtgccttcttccaggagtgccagaggaagctgaagcaccggctgcggctggacagctacctgctgaagcctgtgcagaggatcaccaagtaccagctgctgctgaaggagctgctgaagtacagcaaggactgtgagggcagcgccctgctgaagaaggccctggatgccatgctggacctgctgaagtctgtgaatgacagcatgcaccagatcgccatcaatggctacatcggcaacctgaatgagctgggcaagatgatcatgcagggcggcttctctgtgtggattggccacaagaagggggccaccaagatgaaggacctggcccgcttcaagcccatgcagaggcacctgttcctgtatgagaaggccatcgtgttctgcaagagaagagtggagagcggggagggcagtgaccgctaccccagctacagcttcaagcactgctggaagatggatgaggtgggcatcacagaatatgtgaagggggacaacaggaagtttgagatctggtatggagagaaggaggaggtgtacatcgtgcaggccagcaatgtggatgtgaagatgacctggctgaaggagatccggaacatcctgctgaagcagcaggagctgctgactgtgaagaagaggaagcagcaggaccagctgacagagcgggacaagttccagatcagcctgcagcagaatgatgagaagcagcagggcgccttcatcagcacagaggagacagagctggagcacaccagcacagtggtggaggtgtgtgaggccatcgcctctgtgcaggccgaggccaacacagtgtggacagaggccagccagagcgctgagatcagcgaggagcctgctgagtggagcagcaactacttctaccccacctatgatgaaaatgaggaggagaaccggcccctgatgaggcctgtgtctgagatggccctgctgtactag

SEQ ID NO: 158962 - DNA, 3006 bp, synthetic construct
  misc_feature 1..3006: note = Description of Artificial Sequence: Synthetic coding sequence
  source 1..3006: mol_type = other DNA
atgcaggacatcgccttcctgagcggcggccggggcaaggacaatgcctggatcatcaccttccctgagaactgcaacttccgctgcatccctgaggaggtgattgccaaggtgctgacctacctgaccagcatcgcccggcagaatggaagtgacagccgcttcaccatcatcctggaccggcggctggacacctggagcagcctgaagatcagcctgcagaagatcagcgccagcttccctggcaacctgcacctggtgctggtgctgcggcccaccagcttcctgcagaggaccttcacagacatcggcttctggttcagccaggaggacttcatgctgaagctgcctgtggtgatgctgagctctgtgtctgacctgctgacctacattgatgacaagcagctgaccccagagctgggcggcaccctgcagtactgccacagcgagtggatcatcttcagaaatgccattgaaaattttgccctgactgtgaaggagatggcccagatgctgcagagctttggaacagagctggccgagacagagctgcctgatgacatccccagcattgaggagatcctggccatccgggcagagcgctaccacctgctgaagaatgacatcacagctgtgaccaaggagggcaagatcctgctgaccaacctggaggtgcctgacacagagggcgctgtgagcagccggctggagtgccaccggcagatcagcggggactggcagaccatcaacaagctgctgacccaggtgcatgacatggagacagcctttgatggcttctgggagaagcaccagctgaagatggagcagtacctgcagctgtggaagtttgagcaggacttccagcagctggtgacagaggtggagttcctgctgaaccagcaggccgagctggctgatgtgacaggcaccatcgcccaggtgaagcagaagatcaagaagctggagaacctggatgagaacagccaggagctgctgagcaaggcccagtttgtgatcctgcacggccacaagctggccgccaaccaccactacgccctggacctgatctgccagcgctgcaatgagctgcgctacctgagtgacatcctggtgaatgagatcaaggccaagaggatccagctgagcaggaccttcaagatgcacaagctgctgcagcaggcccggcagtgctgtgatgaaggagagtgcctgctggccaaccaggagattgacaagttccagagcaaagaagatgcccagaaggccctgcaggacatcgagaacttcctggagatggccctgcccttcatcaactatgagcctgagaccctgcagtatgaatttgatgtgatcctgagccctgagctgaaggtgcagatgaagaccatccagctgaagctggagaacatccgcagcatctttgagaaccagcaggccggcttcaggaacctggccgacaagcacgtgcggcccatccagtttgtggtgcccaccccagagaacctggtgaccagcggcacccccttcttcagcagcaagcaggtgggcgtgggctacagcttcttccaggcctgcaagctgttcagcaagggcaagaagacctggaggcagaaccagagcaacctgaagattgaggtggtgcctgactgccaggagaagaggagcagcggccccagcagcagcctggacaatggaaacagcctggatgtgctgaagaaccacgtgctgaatgaactcatccagacagagcgggtgtatgtgcgggagctgtacacagtgctgctgggctacagagctgagatggacaaccctgagatgtttgacctgatgccacccctgctgaggaacaagaaggacatcctgtttggaaacatggccgagatctatgagttccacaatgacatcttcctgagcagcctggagaactgtgcccacgcccctgagcgggtgggcccctgcttcctggagaggaaggatgacttccagatgtatgccaagtactgccagaacaagcccaggtctgagaccatctggaggaagtacagtgaatgtgccttcttccaggagtgccagaggaagctgaagcaccggctgcggctggacagctacctgctgaagcctgtgcagaggatcaccaagtaccagctgctgctgaaggagctgctgaagtacagcaaggactgtgagggcagcgccctgctgaagaaggccctggatgccatgctggacctgctgaagtctgtgaatgacagcatgcaccagatcgccatcaatggctacatcggcaacctgaatgagctgggcaagatgatcatgcagggcggcttctctgtgtggattggccacaagaagggggccaccaagatgaaggacctggcccgcttcaagcccatgcagaggcacctgttcctgtatgagaaggccatcgtgttctgcaagagaagagtggagagcggggagggcagtgaccgctaccccagctacagcttcaagcactgctggaagatggatgaggtgggcatcacagaatatgtgaagggggacaacaggaagtttgagatctggtacggggagaaggaggaggtgtacatcgtgcaggccagcaatgtggatgtgaagatgacctggctgaaggagatccggaacatcctgctgaagcagcaggagctgctgactgtgaagaagaggaagcagcaggaccagctgacagagcgggacaagttccagatcagcctgcagcagaatgatgagaagcagcagggcgccttcatcagcacagaggagacagagctggagcacaccagcacagtggtggaggtgtgtgaggccatcgcctctgtgcaggccgaggccaacacagtgtggacagaggccagccagagcgctgagatcagcgaggagcctgctgagtggagcagcaactacttctaccccacctatgatgaaaatgaggaggagaaccggcccctgatgaggcctgtgtctgagatggccctgctgtactag

SEQ ID NO: 158963 - DNA, 2958 bp, synthetic construct; identical to SEQ ID NO: 158959
  misc_feature 1..2958: note = Description of Artificial Sequence: Synthetic coding sequence
  source 1..2958: mol_type = other DNA

SEQ ID NO: 158964 - DNA, 2466 bp, synthetic construct
  misc_feature 1..2466: note = Description of Artificial Sequence: Synthetic coding sequence
  source 1..2466: mol_type = other DNA
atggccgaggccaacccccggcggggcaagatgaggttcagaagaaatgctgccagcttccctggcaacctgcacctggtgctggtgctgcggcccaccagcttcctgcagaggaccttcacagacatcggcttctggttcagccaggaggacttcatgctgaagctgcctgccatcgagaactttgccctgactgtgaaggagatggcccagatgctgcagagctttggaacagagctggccgagacagagctgcctgatgacatccccagcattgaggagatcctggccatccgggcagagcgctaccacctgctgaagaatgacatcacagctgtgaccaaggagggcaagatcctgctgaccaacctggaggtgcctgacacagaaggagctgtgagcagccggctggagtgccaccggcagatcagcggggactggcagaccatcaacaagctgctgacccaggtgcatgacatggagacagcctttgatggcttctgggagaagcaccagctgaagatggagcagtacctgcagctgtggaagtttgagcaggacttccagcagctggtgacagaggtggagttcctgctgaaccagcaggccgagctggctgatgtgacaggcaccatcgcccaggtgaagcagaagatcaagaagctggagaacctggatgagaacagccaggagctgctgagcaaggcccagtttgtgatcctgcacggccacaagctggccgccaaccaccactacgccctggacctgatctgccagcgctgcaatgagctgcgctacctgagtgacatcctggtgaatgagatcaaggccaagaggatccagctgagcaggaccttcaagatgcacaagctgctgcagcaggcccggcagtgctgtgatgaaggagaatgtctgctggccaaccaggagattgacaagttccagagcaaggaggatgcccagaaggccctgcaggacatcgagaacttcctggagatggccctgcccttcatcaactatgagcctgagaccctgcagtatgaatttgatgtgatcctgagccctgagctgaaggtgcagatgaagaccatccagctgaagctggagaacatccgcagcatctttgagaaccagcaggccggcttcaggaacctggccgacaagcacgtgcggcccatccagtttgtggtgcccaccccagagaacctggtgaccagcggcacccccttcttcagcagcaagcagggcaagaagacctggaggcagaaccagagcaacctgaagattgaggtggtgcctgactgccaggagaagaggagcagcggccccagcagcagcctggacaatggaaacagcctggatgtgctgaagaaccacgtgctgaatgagctgatccagacagagcgggtgtatgtgcgggagctgtacacagtgctgctgggctacagagctgagatggacaaccctgagatgtttgacctgatgccacccctgctgaggaacaagaaggacatcctgtttggaaacatggccgagatctatgagttccacaatgacatcttcctgagcagcctggagaactgtgcccacgcccctgagcgggtgggcccctgcttcctggagaggaaggatgacttccagatgtatgccaagtactgccagaacaagcccaggtctgagaccatctggaggaagtacagtgaatgtgccttcttccaggagtgccagaggaagctgaagcaccggctgcggctggacagctacctgctgaagcctgtgcagaggatcaccaagtaccagctgctgctgaaggagctgctgaagtacagcaaggactgtgagggcagcgccctgctgaagaaggccctggatgccatgctggacctgctgaagtctgtgaatgacagcatgcaccagatcgccatcaatggctacatcggcaacctgaatgagctgggcaagatgatcatgcagggcggcttctctgtgtggattggccacaagaagggggccaccaagatgaaggacctggcccgcttcaagcccatgcagaggcacctgttcctgtatgagaaggccatcgtgttctgcaagagaagagtggagagcggggagggcagtgaccgctaccccagctacagcttcaagcactgctggaagatggatgaggtgggcatcacagaatatgtgaagggggacaacaggaagtttgagatctggtatggagagaaggaggaggtgtacatcgtgcaggccagcaatgtggatgtgaagatgacctggctgaaggagatccggaacatcctgctgaagcagcaggagctgctgactgtgaagaagaggaagcagcaggaccagctgacagagcgggacaagttccagatcagcctgcagcagaatgatgaggacctgtgccgccgctggctgagctacattgatgaggccaccatgagcaatggcaagtag

SEQ ID NO: 158965 - DNA, 2955 bp, synthetic construct
  misc_feature 1..2955: note = Description of Artificial Sequence: Synthetic coding sequence
  source 1..2955: mol_type = other DNA
atgacagtgcggcggctgagcctgctgtgccgggacctgtgggccctgtggctgctgctgaaggccggggctgatgagatcatgcaccaggacatcgtgcccctgtgtgccgctgacatccaggaccagctgaagaagagatttgcctacctgagcggcggccggggccaggacggcagccctgtgatcaccttcccagactacccagccttcagcgagatcccagacaaggagttccagaatgtgatgacctacctgaccagcatccccagcctgcaggatgctggcatcggcttcatcctggtgattgacagaagaagagacaagtggacctctgtgaaggcctctgtgctgagaattgctgccagcttccctgccaacctgcagctggtgctggtgctgcggcccaccggcttcttccagaggaccctgagtgacatcgccttcaagttcaacagagatgacttcaagatgaaggtgcctgtgatcatgctgagctctgtgcctgacctgcacggctacatcgacaagagccagctgacagaggacctgggcggcaccctggactactgccacagccgctggctgtgccagaggacagccatcgagagctttgccctgatggtgaagcagacagcccagatgctgcagagctttggaacagagctggccgagacagagctgcccaatgatgtgcagagcaccagctctgtgctgtgtgcccacacagagaagaaggacaaggccaaggaggacctgcggctggccctgaaggagggccacagcgtgctggagagcctgcgggagctgcaggccgagggcagcgagcccagcgtgaaccaggaccagctggacaaccaggccaccgtgcagaggctgctggcccagctgaatgaaacagaggccgcctttgatgagttctgggccaagcaccagcagaagctggagcagtgcctgcagctgcggcactttgagcagggcttccgggaggtgaaggccatcctggatgctgccagccagaagatcgccaccttcacagacatcggcaacagcctggcccacgtggagcacctgctgcgggacctggccagctttgaggagaagtctggagtggccgtggagcgggcccgggccctgagcctggatggagagcagctgattggcaacaagcactatgctgtggacagcatccggcccaagtgccaggagctgcggcacctgtgtgaccagttctctgctgagatcgcccggcggcggggcctgctgagcaagagcctggagctgcaccggcggctggagacctccatgaagtggtgtgatgagggcatctacctgctggccagccagcctgtggacaagtgccagagccaggatggagctgaggccgccctgcaggagattgagaagttcctggagactggagctgagaacaagatccaggagctgaatgccatctacaaggagtatgagagcatcctgaaccaggacctgatggagcacgtgaggaaggtgttccagaagcaggcctccatggaggaggtgttccaccggcggcaggccagcctgaagaagctggccgcccggcagaccaggcctgtgcagcctgtggcccccaggcctgaggccctggccaagagcccctgccccagccctggcatccggcggggcagcgagaacagcagcagcgagggcggggccctgcggcggggcccctacagaagagccaagtctgagatgtctgagagccggcagggccggggcagcgctggggaggaggaggagagcctggccatcctgcggcggcacgtgatgtctgagctgctggacacagagcgggcctacgtggaggagctgctgtgtgtgctggagggctacgccgctgagatggacaaccccctgatggcccacctgctgagcacaggcctgcacaacaagaaggatgtgctgtttggaaacatggaggagatctaccacttccacaaccgcatcttcctgcgggagctggagaactacacagactgcccagagctggtgggccgctgcttcctggagaggatggaggacttccagatctatgagaagtactgccagaacaagcccaggtctgagagcctgtggaggcagtgcagcgactgccccttcttccaggagtgccagaggaagctggaccacaagctgagcctggacagctacctgctgaagcctgtgcagaggatcaccaagtaccagctgctgctgaaggagatgctgaagtacagcaggaactgtgagggcgctgaggacctgcaggaggccctgagcagcatcctgggcatcctgaaggctgtgaatgacagcatgcacctgattgccatcaccggctatgatggcaacctgggggacctgggcaagctgctgatgcagggcagcttctctgtgtggacagaccacaagaggggccacaccaaggtgaaggagctggcccgcttcaagcccatgcagaggcacctgttcctgcacgagaaggctgtgctcttctgcaagaagcgggaggagaatggagagggctatgagaaggcccccagctacagctacaagcagagcctgaacatggctgctgtgggcatcacagaaaatgtgaagggagatgccaagaagtttgagatctggtacaatgcccgggaggaggtgtacatcgtgcaggcccccaccccagagatcaaggccgcctgggtgaatgagatcaggaaggtgctgaccagccagctgcaggcctgccgggaggccagccagcaccgggccctggagcagagccagagcctgcccctgcctgcccccaccagcaccagccccagccggggcaacagcaggaacatcaagaagctggaggagaggaagacagaccccctgagcctggagggctacgtgtcctctgcccccctgaccaagcccccagagaagggcaaggagccctag

SEQ ID NO: 158966 - DNA, 3390 bp, synthetic construct
  misc_feature 1..3390: note = Description of Artificial Sequence: Synthetic coding sequence
  source 1..3390: mol_type = other DNA
atggccgagaagggggccagccggggcaccctgcggcggctgtggagcctgcccaggagaagaagaggaacagctggccgcagcaggccagatgagatcatgcaccaggacatcgtgcccctgtgtgccgctgacatccaggaccagctgaagaagagatttgcctacctgagcggcggccggggccaggacggcagccctgtgatcaccttcccagactacccagccttcagcgagatcccagacaaggagttccagaatgtgatgacctacctgaccagcatccccagcctgcaggatgctggcatcggcttcatcctggtgattgacagaagaagagacaagtggacctctgtgaaggcctctgtgctgagaattgctgccagcttccctgccaacctgcagctggtgctggtgctgcggcccaccggcttcttccagaggaccctgagtgacatcgccttcaagttcaacagagatgacttcaagatgaaggtgcctgtgatcatgctgagctctgtgcctgacctgcacggctacatcgacaagagccagctgacagaggacctgggcggcaccctggactactgccacagccgctggctgtgccagaggacagccatcgagagctttgccctgatggtgaagcagacagcccagatgctgcagagctttggaacagagctggccgagacagagctgcccaatgatgtgcagagcaccagctctgtgctgtgtgcccacacagagaagaaggacaaggccaaggaggacctgcggctggccctgaaggagggccacagcgtgctggagagcctgcgggagctgcaggccgagggcagcgagcccagcgtgaaccaggaccagctggacaaccaggccaccgtgcagaggctgctggcccagctgaatgaaacagaggccgcctttgatgagttctgggccaagcaccagcagaagctggagcagtgcctgcagctgcggcactttgagcagggcttccgggaggtgaaggccatcctggatgctgccagccagaagatcgccaccttcacagacatcggcaacagcctggcccacgtggagcacctgctgcgggacctggccagctttgaggagaagtctggagtggccgtggagcgggcccgggccctgagcctggatggagagcagctgattggcaacaagcactatgctgtggacagcatccggcccaagtgccaggagctgcggcacctgtgtgaccagttctctgctgagatcgcccggcggcggggcctgctgagcaagagcctggagctgcaccggcggctggagacctccatgaagtggtgtgatgagggcatctacctgctggccagccagcctgtggacaagtgccagagccaggatggagctgaggccgccctgcaggagattgagaagttcctggagactggagctgagaacaagatccaggagctgaatgccatctacaaggagtatgagagcatcctgaaccaggacctgatggagcacgtgaggaaggtgttccagaagcaggcctccatggaggaggtgttccaccggcggcaggccagcctgaagaagctggccgcccggcagaccaggcctgtgcagcctgtggcccccaggcctgaggccctggccaagagcccctgccccagccctggcatccggcggggcagcgagaacagcagcagcgagggcggggccctgcggcggggcccctacagaagagccaagtctgagatgtctgagagccggcagggccggggcagcgctggggaggaggaggagagcctggccatcctgcggcggcacgtgatgtctgagctgctggacacagagcgggcctacgtggaggagctgctgtgtgtgctggagggctacgccgctgagatggacaaccccctgatggcccacctgctgagcacaggcctgcacaacaagaaggatgtgctgtttggaaacatggaggagatctaccacttccacaaccgcatcttcctgcgggagctggagaactacacagactgcccagagctggtgggccgctgcttcctggagaggatggaggacttccagatctatgagaagtactgccagaacaagcccaggtctgagagcctgtggaggcagtgcagcgactgccccttcttccaggagtgccagaggaagctggaccacaagctgagcctggacagctacctgctgaagcctgtgcagaggatcaccaagtaccagctgctgctgaaggagatgctgaagtacagcaggaactgtgagggcgctgaggacctgcaggaggccctgagcagcatcctgggcatcctgaaggctgtgaatgacagcatgcacctgattgccatcaccggctatgatggcaacctgggggacctgggcaagctgctgatgcagggcagcttctctgtgtggacagaccacaagaggggccacaccaaggtgaaggagctggcccgcttcaagcccatgcagaggcacctgttcctgcacgagaaggctgtgctcttctgcaagaagcgggaggagaatggagagggctatgagaaggcccccagctacagctacaagcagagcctgaacatggctgctgtgggcatcacagaaaatgtgaagggagatgccaagaagtttgagatctggtacaatgcccgggaggaggtgtacatcgtgcaggcccccaccccagagatcaaggccgcctgggtgaatgagatcaggaaggtgctgaccagccagctgcaggcctgccgggaggccagccagcaccgggccctggagcagagccagagcctgcccctgcctgcccccaccagcaccagccccagccggggcaacagcaggaacatcaagaagctggaggagaggaagacagaccccctgagcctggagggctacgtgtcctctgcccccctgaccaagcccccagagaagggcaagggctggagcaagaccagccacagcctggaggccccagaagatgatggcggctggagcagcgctgaggagcagatcaacagcagtgatgctgaggaggatggcggcctgggccccaagaagctggtgcctgggaagtacacagtggtggccgaccacgagaagggcggcccagatgccctgcgggtgcgctctggagatgtggtggagctggtgcaggagggagatgagggcctgtggtacgtgcgggaccccaccaccgggaaggagggctgggtgcctgccagcagcctgtctgtgcggctgggccccagcggcagcgcccagtgcctgagcagcagcgagagcagccctggcagcgctgtgctgagcaacagcagcagctgcagcgagggcggccaggcccccttcagtgacctgcagggctag

SEQ ID NO: 158967 - DNA, 3549 bp, synthetic construct
  misc_feature 1..3549: note = Description of Artificial Sequence: Synthetic coding sequence
  source 1..3549: mol_type = other DNA
atggcccgggtggagagccctgtgcctgctgcccgggccagcctgaccggcagctgtgtgctgggccaggccatgcccctgcggggcggggccggccccagccctgccagccacggccccacccacggccccagcgaccccaggacctgcctgcccggccgcggggccggcggcatgaggccccacggccgcggggccctgggctgctgcggcctgtgcagcttctacacctgccacggggctgctggagatgagatcatgcaccaggacatcgtgcccctgtgtgccgctgacatccaggaccagctgaagaagagatttgcctacctgagcggcggccggggccaggacggcagccctgtgatcaccttcccagactacccagccttcagcgagatcccagacaaggagttccagaatgtgatgacctacctgaccagcatccccagcctgcaggatgctggcatcggcttcatcctggtgattgacagaagaagagacaagtggacctctgtgaaggcctctgtgctgagaattgctgccagcttccctgccaacctgcagctggtgctggtgctgcggcccaccggcttcttccagaggaccctgagtgacatcgccttcaagttcaacagagatgacttcaagatgaaggtgcctgtgatcatgctgagctctgtgcctgacctgcacggctacatcgacaagagccagctgacagaggacctgggcggcaccctggactactgccacagccgctggctgtgccagaggacagccatcgagagctttgccctgatggtgaagcagacagcccagatgctgcagagctttggaacagagctggccgagacagagctgcccaatgatgtgcagagcaccagctctgtgctgtgtgcccacacagagaagaaggacaaggccaaggaggacctgcggctggccctgaaggagggccacagcgtgctggagagcctgcgggagctgcaggccgagggcagcgagcccagcgtgaaccaggaccagctggacaaccaggccaccgtgcagaggctgctggcccagctgaatgaaacagaagctgcctttgatgagttctgggccaagcaccagcagaagctggagcagtgcctgcagctgcggcactttgagcagggcttccgggaggtgaaggccatcctggatgctgccagccagaagatcgccaccttcacagacatcggcaacagcctggcccacgtggagcacctgctgcgggacctggccagctttgaggagaagagcggcgtggccgtggagcgggcccgggccctgagcctggatggagagcagctgattggcaacaagcactatgctgtggacagcatccggcccaagtgccaggagctgcggcacctgtgtgaccagttctctgctgagatcgccaggagaagaggcctgctgagcaagagcctggagctgcaccggcggctggagacctccatgaagtggtgtgatgagggcatctacctgctggccagccagcctgtggacaagtgccagagccaggatggagctgaggccgccctgcaggagattgagaagttcctggagaccggggctgagaacaagatccaggagctgaatgccatctacaaggagtatgagagcatcctgaaccaggacctgatggagcacgtgaggaaggtgttccagaagcaggcctccatggaggaggtgttccaccggcggcaggccagcctgaagaagctggccgcccggcagaccaggcctgtgcagcctgtggcccccaggcctgaggccctggccaagagcccctgccccagccctggcatcagaagaggcagcgagaacagcagcagcgagggcggggccctgcggcggggcccctaccgccgggccaagtctgagatgtctgagagccggcagggccggggcagcgctggggaggaggaggagagcctggccatcctgcggagacatgtgatgtctgagctgctggacacagagcgggcctacgtggaggagctgctgtgtgtgctggagggctatgctgctgagatggacaaccccctgatggcccacctgctgagcacaggcctgcacaacaagaaggatgtgctgtttggaaacatggaggagatctaccacttccacaaccgcatcttcctgcgggagctggagaactacacagactgcccagagctggtgggccgctgcttcctggagaggatggaggacttccagatctatgagaagtactgccagaacaagcccaggtctgagagcctgtggaggcagtgcagcgactgccccttcttccaggagtgccagaggaagctggaccacaagctgagcctggacagctacctgctgaagcctgtgcagaggatcaccaagtaccagctgctgctgaaggagatgctgaagtacagcaggaactgtgagggcgctgaggacctgcaggaggccctgagcagcatcctgggcatcctgaaggctgtgaatgacagcatgcacctgattgccatcaccggctatgatggcaacctgggggacctgggcaagctgctgatgcagggcagcttctctgtgtggacagaccacaagaggggccacaccaaggtgaaggagctggcccgcttcaagcccatgcagaggcacctgttcctgcacgagaaggctgtgctcttctgcaagaagcgggaggagaatggagagggctatgagaaggcccccagctacagctacaagcagagcctgaacatggctgctgtgggcatcacagaaaatgtgaagggagatgccaagaagtttgagatctggtacaatgcccgggaggaggtgtacatcgtgcaggcccccaccccagagatcaaggccgcctgggtgaatgagatcaggaaggtgctgaccagccagctgcaggcctgccgggaggccagccagcaccgggccctggagcagagccagagcctgcccctgcctgcccccaccagcaccagccccagccggggcaacagcaggaacatcaagaagctggaggagaggaagacagaccccctgagcctggagggctacgtgagcagcgcccccctgaccaagcccccagagaagggcaagggctggagcaagaccagccacagcctggaggccccagaagatgatggcggctggagcagcgctgaggagcagatcaacagcagtgatgctgaagaagatggcggcctgggccccaagaagctggtgcctgggaagtacacagtggtggccgaccacgagaagggcggcccagatgccctgcgggtgcgctctggagatgtggtggagctggtgcaggagggagatgagggcctgtggtacgtgcgggaccccaccaccgggaaggagggctgggtgcctgccagcagcctgtctgtgcggctgggccccagcggcagcgcccagtgcctgagcagcagcgagagcagccctggcagcgctgtgctgagcaacagcagcagctgcagcgagggcggccaggcccccttcagtgacctgcagggctag

SEQ ID NO: 158968 - DNA, 3414 bp, synthetic construct
  misc_feature 1..3414: note = Description of Artificial Sequence: Synthetic coding sequence
  source 1..3414: mol_type = other DNA
atgtttgactgctggaggttcatcctgtgcaagaggcctggcagcaacagctacagcagcccccagaggcccaatgaggccaagaaggaggagacagaccaccagattgatgtgtctgatgtgatccggctggtgcaggacaccccagaggccacagccatggccacagatgagatcatgcaccaggacatcgtgcccctgtgtgccgctgacatccaggaccagctgaagaagagatttgcctacctgagcggcggccggggccaggacggcagccctgtgatcaccttcccagactacccagccttcagcgagatcccagacaaggagttccagaatgtgatgacctacctgaccagcatccccagcctgcaggatgctggcatcggcttcatcctggtgattgacagaagaagagacaagtggacctctgtgaaggcctctgtgctgagaattgctgccagcttccctgccaacctgcagctggtgctggtgctgcggcccaccggcttcttccagaggaccctgagtgacatcgccttcaagttcaacagagatgacttcaagatgaaggtgcctgtgatcatgctgagctctgtgcctgacctgcacggctacatcgacaagagccagctgacagaggacctgggcggcaccctggactactgccacagccgctggctgtgccagaggacagccatcgagagctttgccctgatggtgaagcagacagcccagatgctgcagagctttggaacagagctggccgagacagagctgcccaatgatgtgcagagcaccagctctgtgctgtgtgcccacacagagaagaaggacaaggccaaggaggacctgcggctggccctgaaggagggccacagcgtgctggagagcctgcgggagctgcaggccgagggcagcgagcccagcgtgaaccaggaccagctggacaaccaggccaccgtgcagaggctgctggcccagctgaatgaaacagaggccgcctttgatgagttctgggccaagcaccagcagaagctggagcagtgcctgcagctgcggcactttgagcagggcttccgggaggtgaaggccatcctggatgctgccagccagaagatcgccaccttcacagacatcggcaacagcctggcccacgtggagcacctgctgcgggacctggccagctttgaggagaagtctggagtggccgtggagcgggcccgggccctgagcctggatggagagcagctgattggcaacaagcactatgctgtggacagcatccggcccaagtgccaggagctgcggcacctgtgtgaccagttctctgctgagatcgcccggcggcggggcctgctgagcaagagcctggagctgcaccggcggctggagacctccatgaagtggtgtgatgagggcatctacctgctggccagccagcctgtggacaagtgccagagccaggatggagctgaggccgccctgcaggagattgagaagttcctggagactggagctgagaacaagatccaggagctgaatgccatctacaaggagtatgagagcatcctgaaccaggacctgatggagcacgtgaggaaggtgttccagaagcaggcctccatggaggaggtgttccaccggcggcaggccagcctgaagaagctggccgcccggcagaccaggcctgtgcagcctgtggcccccaggcctgaggccctggccaagagcccctgccccagccctggcatccggcggggcagcgagaacagcagcagcgagggcggggccctgcggcggggcccctacagaagagccaagtctgagatgtctgagagccggcagggccggggcagcgctggggaggaggaggagagcctggccatcctgcggcggcacgtgatgtctgagctgctggacacagagcgggcctacgtggaggagctgctgtgtgtgctggagggctacgccgctgagatggacaaccccctgatggcccacctgctgagcacaggcctgcacaacaagaaggatgtgctgtttggaaacatggaggagatctaccacttccacaaccgcatcttcctgcgggagctggagaactacacagactgcccagagctggtgggccgctgcttcctggagaggatggaggacttccagatctatgagaagtactgccagaacaagcccaggtctgagagcctgtggaggcagtgcagcgactgccccttcttccaggagtgccagaggaagctggaccacaagctgagcctggacagctacctgctgaagcctgtgcagaggatcaccaagtaccagctgctgctgaaggagatgctgaagtacagcaggaactgtgagggcgctgaggacctgcaggaggccctgagcagcatcctgggcatcctgaaggctgtgaatgacagcatgcacctgattgccatcaccggctatgatggcaacctgggggacctgggcaagctgctgatgcagggcagcttctctgtgtggacagaccacaagaggggccacaccaaggtgaaggagctggcccgcttcaagcccatgcagaggcacctgttcctgcacgagaaggctgtgctcttctgcaagaagcgggaggagaatggagagggctatgagaaggcccccagctacagctacaagcagagcctgaacatggctgctgtgggcatcacagaaaatgtgaagggagatgccaagaagtttgagatctggtacaatgcccgggaggaggtgtacatcgtgcaggcccccaccccagagatcaaggccgcctgggtgaatgagatcaggaaggtgctgaccagccagctgcaggcctgccgggaggccagccagcaccgggccctggagcagagccagagcctgcccctgcctgcccccaccagcaccagccccagccggggcaacagcaggaacatcaagaagctggaggagaggaagacagaccccctgagcctggagggctacgtgtcctctgcccccctgaccaagcccccagagaagggcaagggctggagcaagaccagccacagcctggaggccccagaagatgatggcggctggagcagcgctgaggagcagatcaacagcagtgatgctgaggaggatggcggcctgggccccaagaagctggtgcctgggaagtacacagtggtggccgaccacgagaagggcggcccagatgccctgcgggtgcgctctggagatgtggtggagctggtgcaggagggagatgagggcctgtggtacgtgcgggaccccaccaccgggaaggagggctgggtgcctgccagcagcctgtctgtgcggctgggccccagcggcagcgcccagtgcctgagcagcagcggcaaggcccacgtgccccgggcccacccctag

SEQ ID NO: 158969 - DNA, 2382 bp, synthetic construct
  misc_feature 1..2382: note = Description of Artificial Sequence: Synthetic coding sequence
  source 1..2382: mol_type = other DNA
tgaagccagaagatcgccaccttcacagacatcggcaacagcctggcccacgtggagcacctgctgcgggacctggccagctttgaggagaagagcggcgtggccgtggagcgggcccgggccctgagcctggatggagagcagctgattggcaacaagcactatgctgtggacagcatccggcccaagtgccaggagctgcggcacctgtgtgaccagttctctgctgagatcgccaggagaagaggcctgctgagcaagagcctggagctgcaccggcggctggagacctccatgaagtggtgtgatgagggcatctacctgctggccagccagcctgtggacaagtgccagagccaggatggagctgaggccgccctgcaggagattgagaagttcctggagaccggggctgagaacaagatccaggagctgaatgccatctacaaggagtatgagagcatcctgaaccaggacctgatggagcacgtgaggaaggtgttccagaagcaggcctccatggaggaggtgttccaccggcggcaggccagcctgaagaagctggccgcccggcagaccaggcctgtgcagcctgtggcccccaggcctgaggccctggccaagagcccctgccccagccctggcatcagaagaggcagcgagaacagcagcagcgagggcggggccctgcggcggggcccctaccgccgggccaagtctgagatgtctgagagccggcagggccggggcagcgctggggaggaggaggagagcctggccatcctgcggagacatgtgatgtctgagctgctggacacagagcgggcctacgtggaggagctgctgtgtgtgctggagggctatgctgctgagatggacaaccccctgatggcccacctgctgagcacaggcctgcacaacaagaaggatgtgctgtttggaaacatggaggagatctaccacttccacaaccgcatcttcctgcgggagctggagaactacacagactgcccagagctggtgggccgctgcttcctggagaggatggaggacttccagatctatgagaagtactgccagaacaagcccaggtctgagagcctgtggaggcagtgcagcgactgccccttcttccaggagtgccagaggaagctggaccacaagctgagcctggacagctacctgctgaagcctgtgcagaggatcaccaagtaccagctgctgctgaaggagatgctgaagtacagcaggaactgtgagggcgctgaggacctgcaggaggccctgagcagcatcctgggcatcctgaaggctgtgaatgacagcatgcacctgattgccatcaccggctatgatggcaacctgggggacctgggcaagctgctgatgcagggcagcttctctgtgtggacagaccacaagaggggccacaccaaggtgaaggagctggcccgcttcaagcccatgcagaggcacctgttcctgcacgagaaggctgtgctcttctgcaagaagcgggaggagaatggagagggctatgagaaggcccccagctacagctacaagcagagcctgaacatggctgctgtgggcatcacagaaaatgtgaagggagatgccaagaagtttgagatctggtacaatgcccgggaggaggtgtacatcgtgcaggcccccaccccagagatcaaggccgcctgggtgaatgagatcaggaaggtgctgaccagccagctgcaggcctgccgggaggccagccagcaccgggccctggagcagagccagagcctgcccctgcctgcccccaccagcaccagccccagccggggcaacagcaggaacatcaagaagctggaggagaggaagacagaccccctgagcctggagggctacgtgagcagcgcccccctgaccaagcccccagagaagggcaaggccagccccaccagcccagacaagaaggccaagagacatgaggtgaagagtgaccccaccccatttggagtgcggggctggagcaagaccagccacagcctggaggccccagaagatgatggcggctggagcagcgctgaggagcagatcaacagcagtgatgctgaggaggatggcggcctgggccccaagaagctggtgcctgggaagtacacagtggtggccgaccacgagaagggcggcccagatgccctgcgggtgcgctctggagatgtggtggagctggtgcaggagggagatgagggcctgtggtacgtgcgggaccccaccaccgggaaggagggctgggtgcctgccagcagcctgtctgtgcggctgggccccagcggcagcgcccagtgcctgagcagcagcggcaaggcccacgtgccccgggcccacccctag

SEQ ID NO: 158970 - DNA, 3291 bp, synthetic construct
  misc_feature 1..3291: note = Description of Artificial Sequence: Synthetic coding sequence
  source 1..3291: mol_type = other DNA
atgcccctgcggggcggggccggccccagccctgccagccacggccccacccacggccccagcgaccccaggacctgcctgcccggccgcggggccggcggcatgaggccccacggccgcggggccctgggctgctgcggcctgtgcagcttctacacctgccacggggctgctggagatgagatcatgcaccaggacatcgtgcccctgtgtgccgctgacatccaggaccagctgaagaagagatttgcctacctgagcggcggccggggccaggacggcagccctgtgatcaccttcccagactacccagccttcagcgagatcccagacaaggagttccagaatgtgatgacctacctgaccagcatccccagcctgcaggatgctggcatcggcttcatcctggtgattgacagaagaagagacaagtggacctctgtgaaggcctctgtgctgagaattgctgccagcttccctgccaacctgcagctggtgctggtgctgcggcccaccggcttcttccagaggaccctgagtgacatcgccttcaagttcaacagagatgacttcaagatgaaggtgcctgtgatcatgctgagctctgtgcctgacctgcacggctacatcgacaagagccagctgacagaggacctgggcggcaccctggactactgccacagccgctggctgtgccagaggacagccatcgagagctttgccctgatggtgaagcagacagcccagatgctgcagagctttggaacagagctggccgagacagagctgcccaatgatgtgcagagcaccagctctgtgctgtgtgcccacacagagaagaaggacaaggccaaggaggacctgcggctggccctgaaggagggccacagcgtgctggagagcctgcgggagctgcaggccgagggcagcgagcccagcgtgaaccaggaccagctggacaaccaggccaccgtgcagaggctgctggcccagctgaatgaaacagaagctgcctttgatgagttctgggccaagcaccagcagaagctggagcagtgcctgcagctgcggcactttgagcagggcttccgggaggtgaaggccatcctggatgctgccagccagaagatcgccaccttcacagacatcggcaacagcctggcccacgtggagcacctgctgcgggacctggccagctttgaggagaagagcggcgtggccgtggagcgggcccgggccctgagcctggatggagagcagctgattggcaacaagcactatgctgtggacagcatccggcccaagtgccaggagctgcggcacctgtgtgaccagttctctgctgagatcgccaggagaagaggcctgctgagcaagagcctggagctgcaccggcggctggagacctccatgaagtggtgtgatgagggcatctacctgctggccagccagcctgtggacaagtgccagagccaggatggagctgaggccgccctgcaggagattgagaagttcctggagaccggggctgagaacaagatccaggagctgaatgccatctacaaggagtatgagagcatcctgaaccaggacctgatggagcacgtgaggaaggtgttccagaagcaggcctccatggaggaggtgttccaccggcggcaggccagcctgaagaagctggccgcccggcagaccaggcctgtgcagcctgtggcccccaggcctgaggccctggccaagagcccctgccccagccctggcatcagaagaggcagcgagaacagcagcagcgagggcggggccctgcggcggggcccctaccgccgggccaagtctgagatgtctgagagccggcagggccggggcagcgctggggaggaggaggagagcctggccatcctgcggagacatgtgatgtctgagctgctggacacagagcgggcctacgtggaggagctgctgtgtgtgctggagggctatgctgctgagatggacaaccccctgatggcccacctgctgagcacaggcctgcacaacaagaaggatgtgctgtttggaaacatggaggagatctaccacttccacaaccgcatcttcctgcgggagctggagaactacacagactgcccagagctggtgggccgctgcttcctggagaggatggaggacttccagatctatgagaagtactgccagaacaagcccaggtctgagagcctgtggaggcagtgcagcgactgccccttcttccaggagtgccagaggaagctggaccacaagctgagcctggacagctacctgctgaagcctgtgcagaggatcaccaagtaccagctgctgctgaaggagatgctgaagtacagcaggaactgtgagggcgctgaggacctgcaggaggccctgagcagcatcctgggcatcctgaaggctgtgaatgacagcatgcacctgattgccatcaccggctatgatggcaacctgggggacctgggcaagctgctgatgcagggcagcttctctgtgtggacagaccacaagaggggccacaccaaggtgaaggagctggcccgcttcaagcccatgcagaggcacctgttcctgcacgagaaggctgtgctcttctgcaagaagcgggaggagaatggagagggctatgagaaggcccccagctacagctacaagcagagcctgaacatggctgctgtgggcatcacagaaaatgtgaagggagatgccaagaagtttgagatctggtacaatgcccgggaggaggtgtacatcgtgcaggcccccaccccagagatcaaggccgcctgggtgaatgagatcaggaaggtgctgaccagccagctgcaggcctgccgggaggccagccagcaccgggccctggagcagagccagagcctgcccctgcctgcccccaccagcaccagccccagccggggcaacagcaggaacatcaagaagctggaggagaggaagacagaccccctgagcctggagggctacgtgagcagcgcccccctgaccaagcccccagagaagggcaagggctggagcaagaccagccacagcctggaggccccagaagatgatggcggctggagcagcgctgaggagcagatcaacagcagtgatgctgaagaagatggcggcctgggccccaagaagctggtgcctgggaagtacacagtggtggccgaccacgagaagggcggcccagatgccctgcgggtgcgctctggagatgtggtggagctggtgcaggagggagatgagggcctgtggtag

SEQ ID NO: 158971 - DNA, 411 bp, synthetic construct
  misc_feature 1..411: note = Description of Artificial Sequence: Synthetic coding sequence
  source 1..411: mol_type = other DNA
atgcaccaggacatcgtgcccctgtgtgccgctgacatccaggaccagctgaagaagagatttgcctacctgagcggcggccggggccaggacggcagccctgtgatcaccttcccagactacccagccttcagcgagatcccagacaaggagttccagaatgtgatgacctacctgaccagcatccccagcctgcaggatgctggcatcggcttcatcctggtgattgacagaagaagagacaagtggacctctgtgaaggcctctgtgctgagaattgctgccagcttccctgccaacctgcagctggtgctggtgctgcggcccaccggcttcttccagaggaccctgagtgacatcgccttcaagttcaacagagatgacttcaagatgaaggtgcctgtgatctag

SEQ ID NO: 158972 - DNA, 3372 bp, synthetic construct
  misc_feature 1..3372: note = Description of Artificial Sequence: Synthetic coding sequence
  source 1..3372: mol_type = other DNA
atgacagtgcggcggctgagcctgctgtgccgggacctgtgggccctgtggctgctgctgaaggccggggctgatgagatcatgcaccaggacatcgtgcccctgtgtgccgctgacatccaggaccagctgaagaagagatttgcctacctgagcggcggccggggccaggacggcagccctgtgatcaccttcccagactacccagccttcagcgagatcccagacaaggagttccagaatgtgatgacctacctgaccagcatccccagcctgcaggatgctggcatcggcttcatcctggtgattgacagaagaagagacaagtggacctctgtgaaggcctctgtgctgagaattgctgccagcttccctgccaacctgcagctggtgctggtgctgcggcccaccggcttcttccagaggaccctgagtgacatcgccttcaagttcaacagagatgacttcaagatgaaggtgcctgtgatcatgctgagctctgtgcctgacctgcacggctacatcgacaagagccagctgacagaggacctgggcggcaccctggactactgccacagccgctggctgtgccagaggacagccatcgagagctttgccctgatggtgaagcagacagcccagatgctgcagagctttggaacagagctggccgagacagagctgcccaatgatgtgcagagcaccagctctgtgctgtgtgcccacacagagaagaaggacaaggccaaggaggacctgcggctggccctgaaggagggccacagcgtgctggagagcctgcgggagctgcaggccgagggcagcgagcccagcgtgaaccaggaccagctggacaaccaggccaccgtgcagaggctgctggcccagctgaatgaaacagaggccgcctttgatgagttctgggccaagcaccagcagaagctggagcagtgcctgcagctgcggcactttgagcagggcttccgggaggtgaaggccatcctggatgctgccagccagaagatcgccaccttcacagacatcggcaacagcctggcccacgtggagcacctgctgcgggacctggccagctttgaggagaagtctggagtggccgtggagcgggcccgggccctgagcctggatggagagcagctgattggcaacaagcactatgctgtggacagcatccggcccaagtgccaggagctgcggcacctgtgtgaccagttctctgctgagatcgcccggcggcggggcctgctgagcaagagcctggagctgcaccggcggctggagacctccatgaagtggtgtgatgagggcatctacctgctggccagccagcctgtggacaagtgccagagccaggatggagctgaggccgccctgcaggagattgagaagttcctggagactggagctgagaacaagatccaggagctgaatgccatctacaaggagtatgagagcatcctgaaccaggacctgatggagcacgtgaggaaggtgttccagaagcaggcctccatggaggaggtgttccaccggcggcaggccagcctgaagaagctggccgcccggcagaccaggcctgtgcagcctgtggcccccaggcctgaggccctggccaagagcccctgccccagccctggcatccggcggggcagcgagaacagcagcagcgagggcggggccctgcggcggggcccctacagaagagccaagtctgagatgtctgagagccggcagggccggggcagcgctggggaggaggaggagagcctggccatcctgcggcggcacgtgatgtctgagctgctggacacagagcgggcctacgtggaggagctgctgtgtgtgctggagggctacgccgctgagatggacaaccccctgatggcccacctgctgagcacaggcctgcacaacaagaaggatgtgctgtttggaaacatggaggagatctaccacttccacaaccgcatcttcctgcgggagctggagaactacacagactgcccagagctggtgggccgctgcttcctggagaggatggaggacttccagatctatgagaagtactgccagaacaagcccaggtctgagagcctgtggaggcagtgcagcgactgccccttcttccaggagtgccagaggaagctggaccacaagctgagcctggacagctacctgctgaagcctgtgcagaggatcaccaagtaccagctgctgctgaaggagatgctgaagtacagcaggaactgtgagggcgctgaggacctgcaggaggccctgagcagcatcctgggcatcctgaaggctgtgaatgacagcatgcacctgattgccatcaccggctatgatggcaacctgggggacctgggcaagctgctgatgcagggcagcttctctgtgtggacagaccacaagaggggccacaccaaggtgaaggagctggcccgcttcaagcccatgcagaggcacctgttcctgcacgagaaggctgtgctcttctgcaagaagcgggaggagaatggagagggctatgagaaggcccccagctacagctacaagcagagcctgaacatggctgctgtgggcatcacagaaaatgtgaagggagatgccaagaagtttgagatctggtacaatgcccgggaggaggtgtacatcgtgcaggcccccaccccagagatcaaggccgcctgggtgaatgagatcaggaaggtgctgaccagccagctgcaggcctgccgggaggccagccagcaccgggccctggagcagagccagagcctgcccctgcctgcccccaccagcaccagccccagccggggcaacagcaggaacatcaagaagctggaggagaggaagacagaccccctgagcctggagggctacgtgtcctctgcccccctgaccaagcccccagagaagggcaagggctggagcaagaccagccacagcctggaggccccagaagatgatggcggctggagcagcgctgaggagcagatcaacagcagtgatgctgaggaggatggcggcctgggccccaagaagctggtgcctgggaagtacacagtggtggccgaccacgagaagggcggcccagatgccctgcgggtgcgctctggagatgtggtggagctggtgcaggagggagatgagggcctgtggtacgtgcgggaccccaccaccgggaaggagggctgggtgcctgccagcagcctgtctgtgcggctgggccccagcggcagcgcccagtgcctgagcagcagcgagagcagccctggcagcgctgtgctgagcaacagcagcagctgcagcgagggcggccaggcccccttcagtgacctgcagggctag

SEQ ID NO: 158973 - DNA, 741 bp, synthetic construct
  misc_feature 1..741: note = Description of Artificial Sequence: Synthetic coding sequence
  source 1..741: mol_type = other DNA
atgaggttctggctgaggacagaggagatggccctggaggagatggtgcagaggctgaatgctgtgtccaagcacacagatgagatcatgcaccaggacatcgtgcccctgtgtgccgctgacatccaggaccagctgaagaagagatttgcctacctgagcggcggccggggccaggacggcagccctgtgatcaccttcccagactacccagccttcagcgagatcccagacaaggagttccagaatgtgatgacctacctgaccagcatccccagcctgcaggatgctggcatcggcttcatcctggtgattgacagaagaagagacaagtggacctctgtgaaggcctctgtgctgagaattgctgccagcttccctgccaacctgcagctggtgctggtgctgcggcccaccggcttcttccagaggaccctgagtgacatcgccttcaagttcaacagagatgacttcaagatgaaggtgcctgtgatcatgctgagctctgtgcctgacctgcacggctacatcgacaagagccagctgacagaggacctgggcggcaccctggactactgccacagccgctggctgtgccagaggacagccatcgagagctttgccctgatggtgaagcagacagcccagatgctgcagagctttggaacagagctggccgagacagagctgcccaatgatgtgcagagcaccagctctgtgctgtgtgcccacacagaatag

SEQ ID NO: 158974 - DNA, 3342 bp, synthetic construct
  misc_feature 1..3342: note = Description of Artificial Sequence: Synthetic coding sequence
  source 1..3342: mol_type = other DNA
atgggagatggcaaggctgtgcgcatctctgtggccgagatgaagagctactacctgtacagcgagtggtgctcctggctgctgtctgtggccgaggatgagatcatgcaccaggacatcgtgcccctgtgtgccgctgacatccaggaccagctgaagaagagatttgcctacctgagcggcggccggggccaggacggcagccctgtgatcaccttcccagactacccagccttcagcgagatcccagacaaggagttccagaatgtgatgacctacctgaccagcatccccagcctgcaggatgctggcatcggcttcatcctggtgattgacagaagaagagacaagtggacctctgtgaaggcctctgtgctgagaattgctgccagcttccctgccaacctgcagctggtgctggtgctgcggcccaccggcttcttccagaggaccctgagtgacatcgccttcaagttcaacagagatgacttcaagatgaaggtgcctgtgatcatgctgagctctgtgcctgacctgcacggctacatcgacaagagccagctgacagaggacctgggcggcaccctggactactgccacagccgctggctgtgccagaggacagccatcgagagctttgccctgatggtgaagcagacagcccagatgctgcagagctttggaacagagctggccgagacagagctgcccaatgatgtgcagagcaccagctctgtgctgtgtgcccacacagagaagaaggacaaggccaaggaggacctgcggctggccctgaaggagggccacagcgtgctggagagcctgcgggagctgcaggccgagggcagcgagcccagcgtgaaccaggaccagctggacaaccaggccaccgtgcagaggctgctggcccagctgaatgaaacagaggccgcctttgatgagttctgggccaagcaccagcagaagctggagcagtgcctgcagctgcggcactttgagcagggcttccgggaggtgaaggccatcctggatgctgccagccagaagatcgccaccttcacagacatcggcaacagcctggcccacgtggagcacctgctgcgggacctggccagctttgaggagaagtctggagtggccgtggagcgggcccgggccctgagcctggatggagagcagctgattggcaacaagcactatgctgtggacagcatccggcccaagtgccaggagctgcggcacctgtgtgaccagttctctgctgagatcgcccggcggcggggcctgctgagcaagagcctggagctgcaccggcggctggagacctccatgaagtggtgtgatgagggcatctacctgctggccagccagcctgtggacaagtgccagagccaggatggagctgaggccgccctgcaggagattgagaagttcctggagactggagctgagaacaagatccaggagctgaatgccatctacaaggagtatgagagcatcctgaaccaggacctgatggagcacgtgaggaaggtgttccagaagcaggcctccatggaggaggtgttccaccggcggcaggccagcctgaagaagctggccgcccggcagaccaggcctgtgcagcctgtggcccccaggcctgaggccctggccaagagcccctgccccagccctggcatccggcggggcagcgagaacagcagcagcgagggcggggccctgcggcggggcccctacagaagagccaagtctgagatgtctgagagccggcagggccggggcagcgctggggaggaggaggagagcctggccatcctgcggcggcacgtgatgtctgagctgctggacacagagcgggcctacgtggaggagctgctgtgtgtgctggagggctacgccgctgagatggacaaccccctgatggcccacctgctgagcacaggcctgcacaacaagaaggatgtgctgtttggaaacatggaggagatctaccacttccacaaccgcatcttcctgcgggagctggagaactacacagactgcccagagctggtgggccgctgcttcctggagaggatggaggacttccagatctatgagaagtactgccagaacaagcccaggtctgagagcctgtggaggcagtgcagcgactgccccttcttccaggagtgccagaggaagctggaccacaagctgagcctggacagctacctgctgaagcctgtgcagaggatcaccaagtaccagctgctgctgaaggagatgctgaagtacagcaggaactgtgagggcgctgaggacctgcaggaggccctgagcagcatcctgggcatcctgaaggctgtgaatgacagcatgcacctgattgccatcaccggctatgatggcaacctgggggacctgggcaagctgctgatgcagggcagcttctctgtgtggacagaccacaagaggggccacaccaaggtgaaggagctggcccgcttcaagcccatgcagaggcacctgttcctgcacgagaaggctgtgctcttctgcaagaagcgggaggagaatggagagggctatgagaaggcccccagctacagctacaagcagagcctgaacatggctgctgtgggcatcacagaaaatgtgaagggagatgccaagaagtttgagatctggtacaatgcccgggaggaggtgtacatcgtgcaggcccccaccccagagatcaaggccgcctgggtgaatgagatcaggaaggtgctgaccagccagctgcaggcctgccgggaggccagccagcaccgggccctggagcagagccagagcctgcccctgcctgcccccaccagcaccagccccagccggggcaacagcaggaacatcaagaagctggaggagaggaagacagaccccctgagcctggagggctacgtgtcctctgcccccctgaccaagcccccagagaagggcaagggctggagcaagaccagccacagcctggaggccccagaagatgatggcggctggagcagcgctgaggagcagatcaacagcagtgatgctgaggaggatggcggcctgggccccaagaagctggtgcctgggaagtacacagtggtggccgaccacgagaagggcggcccagatgccctgcgggtgcgctctggagatgtggtggagctggtgcaggagggagatgagggcctgtggtacgtgcgggaccccaccaccgggaaggagggctgggtgcctgccagcagcctgtctgtgcggctgggccccagcggcagcgcccagtgcctgagcagcagcggcaaggcccacgtgccccgggcccacccctag

SEQ ID NO: 158975 - DNA, 2712 bp, synthetic construct
  misc_feature 1..2712: note = Description of Artificial Sequence: Synthetic coding sequence
  source 1..2712: mol_type = other DNA
ctgaagatgcctgtgatcatgctgagctctgtgcctgacctgcacggctacatcgacaagagccagctgacagaggacctgggcggcaccctggactactgccacagccgctggctgtgccagaggacagccatcgagagctttgccctgatggtgaagcagacagcccagatgctgcagagctttggaacagagctggccgagacagagctgcccaatgatgtgcagagcaccagctctgtgctgtgtgcccacacagagaagaaggacaaggccaaggaggacctgcggctggccctgaaggagggccacagcgtgctggagagcctgcgggagctgcaggccgagggcagcgagcccagcgtgaaccaggaccagctggacaaccaggccaccgtgcagaggctgctggcccagctgaatgaaacagaagctgcctttgatgagttctgggccaagcaccagcagaagctggagcagtgcctgcagctgcggcactttgagcagggcttccgggaggtgaaggccatcctggatgctgccagccagaagatcgccaccttcacagacatcggcaacagcctggcccacgtggagcacctgctgcgggacctggccagctttgaggagaagagcggcgtggccgtggagcgggcccgggccctgagcctggatggagagcagctgattggcaacaagcactatgctgtggacagcatccggcccaagtgccaggagctgcggcacctgtgtgaccagttctctgctgagatcgccaggagaagaggcctgctgagcaagagcctggagctgcaccggcggctggagacctccatgaagtggtgtgatgagggcatctacctgctggccagccagcctgtggacaagtgccagagccaggatggagctgaggccgccctgcaggagattgagaagttcctggagaccggggctgagaacaagatccaggagctgaatgccatctacaaggagtatgagagcatcctgaaccaggacctgatggagcacgtgaggaaggtgttccagaagcaggcctccatggaggaggtgttccaccggcggcaggccagcctgaagaagctggccgcccggcagaccaggcctgtgcagcctgtggcccccaggcctgaggccctggccaagagcccctgccccagccctggcatcagaagaggcagcgagaacagcagcagcgagggcggggccctgcggcggggcccctaccgccgggccaagtctgagatgtctgagagccggcagggccggggcagcgctggggaggaggaggagagcctggccatcctgcggagacatgtgatgtctgagctgctggacacagagcgggcctacgtggaggagctgctgtgtgtgctggagggctatgctgctgagatggacaaccccctgatggcccacctgctgagcacaggcctgcacaacaagaaggatgtgctgtttggaaacatggaggagatctaccacttccacaaccgcatcttcctgcgggagctggagaactacacagactgcccagagctggtgggccgctgcttcctggagaggatggaggacttccagatctatgagaagtactgccagaacaagcccaggtctgagagcctgtggaggcagtgcagcgactgccccttcttccaggagtgccagaggaagctggaccacaagctgagcctggacagctacctgctgaagcctgtgcagaggatcaccaagtaccagctgctgctgaaggagatgctgaagtacagcaggaactgtgagggcgctgaggacctgcaggaggccctgagcagcatcctgggcatcctgaaggctgtgaatgacagcatgcacctgattgccatcaccggctatgatggcaacctgggggacctgggcaagctgctgatgcagggcagcttctctgtgtggacagaccacaagaggggccacaccaaggtgaaggagctggcccgcttcaagcccatgcagaggcacctgttcctgcacgagaaggctgtgctcttctgcaagaagcgggaggagaatggagagggctatgagaaggcccccagctacagctacaagcagagcctgaacatggctgctgtgggcatcacagaaaatgtgaagggagatgccaagaagtttgagatctggtacaatgcccgggaggaggtgtacatcgtgcaggcccccaccccagagatcaaggccgcctgggtgaatgagatcaggaaggtgctgaccagccagctgcaggcctgccgggaggccagccagcaccgggccctggagcagagccagagcctgcccctgcctgcccccaccagcaccagccccagccggggcaacagcaggaacatcaagaagctggaggagaggaagacagaccccctgagcctggagggctacgtgagcagcgcccccctgaccaagcccccagagaagggcaagggctggagcaagaccagccacagcctggaggccccagaagatgatggcggctggagcagcgctgaggagcagatcaacagcagtgatgctgaagaagatggcggcctgggccccaagaagctggtgcctgggaagtacacagtggtggccgaccacgagaagggcggcccagatgccctgcgggtgcgctctggagatgtggtggagctggtgcaggagggagatgagggcctgtag

SEQ ID NO: 158976 - DNA, 3414 bp, synthetic construct; identical to SEQ ID NO: 158968
  misc_feature 1..3414: note = Description of Artificial Sequence: Synthetic coding sequence
  source 1..3414: mol_type = other DNA

SEQ ID NO: 158977 - DNA, 3378 bp, synthetic construct
  misc_feature 1..3378: note = Description of Artificial Sequence: Synthetic coding sequence
  source 1..3378: mol_type = other DNA
atgaggttctggctgaggacagaggagatggccctggaggagatggtgcagaggctgaatgctgtgtccaagcacacagatgagatcatgcaccaggacatcgtgcccctgtgtgccgctgacatccaggaccagctgaagaagagatttgcctacctgagcggcggccggggccaggacggcagccctgtgatcaccttcccagactacccagccttcagcgagatcccagacaaggagttccagaatgtgatgacctacctgaccagcatccccagcctgcaggatgctggcatcggcttcatcctggtgattgacagaagaagagacaagtggacctctgtgaaggcctctgtgctgagaattgctgccagcttccctgccaacctgcagctggtgctggtgctgcggcccaccggcttcttccagaggaccctgagtgacatcgccttcaagttcaacagagatgacttcaagatgaaggtgcctgtgatcatgctgagctctgtgcctgacctgcacggctacatcgacaagagccagctgacagaggacctgggcggcaccctggactactgccacagccgctggctgtgccagaggacagccatcgagagctttgccctgatggtgaagcagacagcccagatgctgcagagctttggaacagagctggccgagacagagctgcccaatgatgtgcagagcaccagctctgtgctgtgtgcccacacagagaagaaggacaaggccaaggaggacctgcggctggccctgaaggagggccacagcgtgctggagagcctgcgggagctgcaggccgagggcagcgagcccagcgtgaaccaggaccagctggacaaccaggccaccgtgcagaggctgctggcccagctgaatgaaacagaggccgcctttgatgagttctgggccaagcaccagcagaagctggagcagtgcctgcagctgcggcactttgagcagggcttccgggaggtgaaggccatcctggatgctgccagccagaagatcgccaccttcacagacatcggcaacagcctggcccacgtggagcacctgctgcgggacctggccagctttgaggagaagtctggagtggccgtggagcgggcccgggccctgagcctggatggagagcagctgattggcaacaagcactatgctgtggacagcatccggcccaagtgccaggagctgcggcacctgtgtgaccagttctctgctgagatcgcccggcggcggggcctgctgagcaagagcctggagctgcaccggcggctggagacctccatgaagtggtgtgatgagggcatctacctgctggccagccagcctgtggacaagtgccagagccaggatggagctgaggccgccctgcaggagattgagaagttcctggagactggagctgagaacaagatccaggagctgaatgccatctacaaggagtatgagagcatcctgaaccaggacctgatggagcacgtgaggaaggtgttccagaagcaggcctccatggaggaggtgttccaccggcggcaggccagcctgaagaagctggccgcccggcagaccaggcctgtgcagcctgtggcccccaggcctgaggccctggccaagagcccctgccccagccctggcatccggcggggcagcgagaacagcagcagcgagggcggggccctgcggcggggcccctacagaagagccaagtctgagatgtctgagagccggcagggccggggcagcgctggggaggaggaggagagcctggccatcctgcggcggcacgtgatgtctgagctgctggacacagagcgggcctacgtggaggagctgctgtgtgtgctggagggctacgccgctgagatggacaaccccctgatggcccacctgctgagcacaggcctgcacaacaagaaggatgtgctgtttggaaacatggaggagatctaccacttccacaaccgcatcttcctgcgggagctggagaactacacagactgcccagagctggtgggccgctgcttcctggagaggatggaggacttccagatctatgagaagtactgccagaacaagcccaggtctgagagcctgtggaggcagtgcagcgactgccccttcttccaggagtgccagaggaagctggaccacaagctgagcctggacagctacctgctgaagcctgtgcagaggatcaccaagtaccagctgctgctgaaggagatgctgaagtacagcaggaactgtgagggcgctgaggacctgcaggaggccctgagcagcatcctgggcatcctgaaggctgtgaatgacagcatgcacctgattgccatcaccggctatgatggcaacctgggggacctgggcaagctgctgatgcagggcagcttctctgtgtggacagaccacaagaggggccacaccaaggtgaaggagctggcccgcttcaagcccatgcagaggcacctgttcctgcacgagaaggctgtgctcttctgcaagaagcgggaggagaatggagagggctatgagaaggcccccagctacagctacaagcagagcctgaacatggctgctgtgggcatcacagaaaatgtgaagggagatgccaagaagtttgagatctggtacaatgcccgggaggaggtgtacatcgtgcaggcccccaccccagagatcaaggccgcctgggtgaatgagatcaggaaggtgctgaccagccagctgcaggcctgccgggaggccagccagcaccgggccctggagcagagccagagcctgcccctgcctgcccccaccagcaccagccccagccggggcaacagcaggaacatcaagaagctggaggagaggaagacagaccccctgagcctggagggctacgtgtcctctgcccccctgaccaagcccccagagaagggcaagggctggagcaagaccagccacagcctggaggccccagaagatgatggcggctggagcagcgctgaggagcagatcaacagcagtgatgctgaggaggatggcggcctgggccccaagaagctggtgcctgggaagtacacagtggtggccgaccacgagaagggcggcccagatgccctgcgggtgcgctctggagatgtggtggagctggtgcaggagggagatgagggcctgtggtacgtgcgggaccccaccaccgggaaggagggctgggtgcctgccagcagcctgtctgtgcggctgggccccagcggcagcgcccagtgcctgagcagcagcgagagcagccctggcagcgctgtgctgagcaacagcagcagctgcagcgagggcggccaggcccccttcagtgacctgcagggctag

SEQ ID NO: 158978 - DNA, 1713 bp, synthetic construct
  misc_feature 1..1713: note = Description of Artificial Sequence: Synthetic coding sequence
  source 1..1713: mol_type = other DNA
atgagccggctggaggccaagaagcccagcctgtgcaagtctgagcccctgaccacagagcgggtgaggaccaccctgtctgtgctgaagagaattgtgaccagctgctacggccccagcggccgcctgaagcagctgcacaacggctttggaggctacgtgtgcaccaccagccagagcagcgccctgctgagccacctgctggtgacccaccccatcctgaagatcctgacagccagcatccagaaccacgtgtcctccttcagtgactgtggcctcttcaccgccatcctgtgctgcaacctgattgaaaatgtgcagaggctgggcctgacccccaccaccgtcatccggctgaacaagcacctgctgagcctgtgcatctcctacctgaagtctgagacctgtggctgccgcatccctgtggacttcagcagcacccagatcctgctgtgcctggtgcgcagcatcctgaccagcaagccagcctgcatgctgaccaggaaggagacagaacatgtgtctgccctgatcctgcgggccttcctgctgaccatcccagaaaatgctgagggccacatcatcctgggcaagagcctgattgtgcccctgaagggccagagggtcatcgacagcacagtgctgcccggcatcctgattgagatgtctgaggtgcagctgatgaggctgctgcccatcaagaagagcacagccctgaaggtggccctcttctgcaccaccctgagcggggacaccagtgacacaggagagggcaccgtggtggtgtcctatggagtgtccctggagaatgctgtgctggaccagctgctgaacctgggccggcagctgatcagtgaccacgtggacctggtgctgtgccagaaggtgatccaccccagcctgaagcagttcctgaacatgcaccgcatcatcgccatcgaccgcatcggcgtgaccctgatggagcccctgaccaagatgacaggcacccagcccatcggcagcctgggcagcatctgccccaacagctatggctctgtgaaggatgtgtgcacagccaagtttggcagcaagcacttcttccacctgatccccaatgaggccaccatctgcagcctgctgctgtgcaacagaaatgacacagcctgggatgagctgaagctgacctgccagacagccctgcacgtgctgcagctgaccctgaaggagccctgggccctgctgggcggcggctgcacagagacccacctggccgcctacatccgccacaagacccacaatgaccctgagagcatcctgaaggatgatgaatgtacccagacagagctgcagctgattgctgaggccttctgcagcgccctggagagcgtggtgggcagcctggagcatgatggaggagagatcctgacagacatgaagtatggccacctgtggagcgtgcaggccgacagcccctgtgtggccaactggccagacctgctgagccagtgtggctgcggcctgtacaacagccaggaggagctgaactggagcttcctgcggagcacccggcggccctttgtgccccagagctgcctgccccatgaggccgtgggcagcgccagcaacctgaccctggactgcctgacagccaagctgagcggcctgcaggtggccgtggagacagccaacctgatcctggacctgtcctatgtgattgaggacaagaactag

SEQ ID NO: 158979 - DNA, 1713 bp, synthetic construct; identical to SEQ ID NO: 158978
  misc_feature 1..1713: note = Description of Artificial Sequence: Synthetic coding sequence
  source 1..1713: mol_type = other DNA

SEQ ID NO: 158980 - DNA, 2145 bp, synthetic construct
  misc_feature 1..2145: note = Description of Artificial Sequence: Synthetic coding sequence
  source 1..2145: mol_type = other DNA
atgcctgtgcgcttcaagggcctgtctgagtaccagaggaacttcctgtggaagaagagctacctgtctgagagctgcaacagctctgtgggcaggaagtacccctgggccggcctgcggagtgaccagctgggcatcaccaaggagcccagcttcatcagcaagagaagagtgccctaccatgacccccagatcagcaagagcctggagtggaatggagccatcagcgagagcaatgtggtggccagccctgagcctgaggcccctgagacccccaagagccaggaggccgagcagaaggatgtgacccaggagcgggtgcacagcctggaggccagccgggtgcccaagaggaccaggagccacagcgctgacagcagagctgagggcgccagtgatgtggagaacaatgaaggagtgaccaaccacacccctgtgaatgaaaatgtggagctggagcacagcaccaaggtgctgtctgaaaatgtggacaatggcctggaccggctgctgaggaagaaggccggcctgactgtggtgcccagctacaatgccctgagaaattctgagtaccagaggcagtttgtgtggaagaccagcaaggagacagccccagcctttgctgccaaccaggtgttccacaacaagagccagtttgtgccccccttcaagggcaacagcgtcatccacgagacagagtacaagaggaacttcaagggcctgagccctgtgaaggagcccaagctgagaaatgacctgagagaaaatagaaacctggagaccgtgtccccagagaggaagagcaacaagattgatgaccggctgaagctggaggccgagatggagctgaaggacctgcaccagcccaagaggaagctgaccccctggaagcaccagaggctgggcaaggtgaacagcgagtaccgggccaagttcctgagccctgcccagtacctgtacaaggccggggcctggacccacgtgaagggcaacatgcccaaccaggtgaaggagctgcgggagaaggccgagttctacaggaagagggtgcagggcacccacttcagccgggaccacctgaaccagatcctgagtgacagcaactgctgctgggatgtgagcagcaccaccagcagcgagggcaccgtgagcagcaacatccgggccctggacctggccggggaccccaccagccacaagaccctgcagaagtgccccagcacagagcctgaggagaagggcaacatcgtggaggagcagccccagaagaacaccacagagaagctgggcgtgtctgcccccaccatccctgtgagaagaaggctggcctgggacacagagaacaccagtgaagatgtgcagaagcagcctggagagaaggaggaggaggatgacaatgaggaggagggggacaggaagacaggcaagcaggccttcatgggagagcaggagaagctggatgtgcgggagaagagcaaggctgacaagatgaaggagggcagtgacagctctgtgtcctctgagaagggcggccgcctgcccacccccaagctgcgggagctgggcggcatccagaggacccaccacgacctgaccaccccagctgtgggcggcgctgtgctggtgagccccagcaagatgaagcccccagcccctgagcagaggaagaggatgaccagccaggactgcctggagaccagcaagaatgacttcaccaagaaggagagcagagctgtgtccctgctgaccagccctgctgctggcatcaagacagtggaccccctgcccctgagagaagattctgaggacaacatccacaagtttgctgaggccaccctgcctgtgtccaagatccccaagtaccccaccaaccccccaggccagctgcccagccccccccacgtgcccagctactggcaccccagccgccgcatccagggcagcctgcgggaccctgagttccagcacaacgtgggcaaggccaggatgaacaacctgcagctgccccagcacgaggccttcaatgatgaagatgaagatcggctgtctgagatcagcgcccggtctgctgccagcagcctgcgggccttccagaccctggcccgggccaagaagaggaaggagaacttctggggcaagacctag

SEQ ID NO: 158981 - DNA, 210 bp, synthetic construct
  misc_feature 1..210: note = Description of Artificial Sequence: Synthetic coding sequence
  source 1..210: mol_type = other DNA
atgcctgtgcgcttcaagggcctgtctgagtaccagaggaacttcctgtggaagaagagctacctgtctgagagctgcaacagctctgtgggcaggaagtacccctgggccggcctgcggagtgaccagctgggcaaccagggccgctgcaggaccaagatccagcacagcgacatcagcagcctgctgatcctggtgtgcagcacctag

SEQ ID NO: 158982 - DNA, 669 bp, synthetic construct
  misc_feature 1..669: note = Description of Artificial Sequence: Synthetic coding sequence
  source 1..669: mol_type = other DNA
atgcctgtgcgcttcaagggcctgtctgagtaccagaggaacttcctgtggaagaagagctacctgtctgagagctgcaacagctctgtgggcaggaagtacccctgggccggcctgcggagtgaccagctgggcatcaccaaggagcccagcttcatcagcaagagaagagtgccctaccatgacccccagatcagcaagagcctggagtggaatggagccatcagcgagagcaatgtggtggccagccctgagcctgaggcccctgagacccccaagagccaggaggccgagcagaaggatgtgacccaggagcgggtgcacagcctggaggccagccgggtgcccaagaggaccaggagccacagcgctgacagcagagctgagggcgccagtgatgtggagaacaatgaaggagtgaccaaccacacccctgtgaatgaaaatgtggagctggagcacagcaccaaggtgctgtctgaaaatgtggacaatggagtgggcatcttcaccgccttcctgttcaagagcattgagttcttcatcggcttcatcgtcatcagcgtcatcctgcactttgtgttccagaacttccccctgctcttcagctgcctgatgagcatccgcatcgtggacaaccggctgctgaccctggtgattgtgaactag

SEQ ID NO: 158983 - DNA, 2040 bp, synthetic construct
  misc_feature 1..2040: note = Description of Artificial Sequence: Synthetic coding sequence
  source 1..2040: mol_type = other DNA
atgcctgtgcgcttcaagggcctgtctgagtaccagaggaacttcctgtggaagaagagctacctgtctgagagctgcaacagctctgtgggcaggaagtacccctgggccggcctgcggagtgaccagctgggcatcaccaaggagcccagcttcatcagcaagagaagagtgccctaccatgacccccagatcagcaagagcctggagtggaatggagccatcagcgagagcaatgtggtggccagccctgagcctgaggcccctgagacccccaagagccaggaggccgagcagaaggatgtgacccaggagcgggtgcacagcctggaggccagccgggtgcccaagaggaccaggagccacagcgctgacagcagagctgagggcgccagtgatgtggagaacaatgaaggagtgaccaaccacacccctgtgaatgaaaatgtggagctggagcacagcaccaaggtgctgtctgaaaatgtggacaatggagtcttccacaacaagagccagtttgtgccccccttcaagggcaacagcgtcatccatgaaacagagtacaagaggaacttcaagggcctgagccctgtgaaggagcccaagctgagaaatgacctgcgggagaacagaaacctggagaccgtgtccccagagaggaagagcaacaagattgatgaccggctgaagctggaggccgagatggagctgaaggacctgcaccagcccaagaggaagctgaccccctggaagcaccagaggctgggcaaggtgaacagcgagtaccgggccaagttcctgagccctgcccagtacctgtacaaggccggggcctggacccacgtgaagggcaacatgcccaaccagggcagcctgaatgccatgtggtatgcagaggtgaaggagctgcgggagaaggccgagttctacaggaagagggtgcagggcacccacttcagccgggaccacctgaaccagatcctgagtgacagcaactgctgctgggatgtgagcagcaccaccagcagcgagggcaccgtgagcagcaacatccgggccctggacctggccggggaccccaccagccacaagaccctgcagaagtgccccagcacagagcctgaggagaagggcaacatcgtggaggagcagccccagaagaacaccacagagaagctgggcgtgtctgcccccaccatccctgtgagaagaaggctggcctgggacacagagaacaccagtgaagatgtgcagaagcagcccggggagaaggaggaggaggatgacaatgaggaggagggggacaggaagacaggcaagcaggccttcatgggagagcaggagaagctggatgtgcgggagaagagcaaggctgacaagatgaaggagggcagtgacagctctgtgagcagcgagaagggcggccgcctgcccacccccaagctgcgggagctgggcggcatccagaggacccaccacgacctgaccaccccagctgtgggcggcgctgtgctggtgagccccagcaagatgaagcccccagcccctgagcagaggaagaggatgaccagccaggactgcctggagaccagcaagaatgacttcaccaagaaggagagcagagctgtgtccctgctgaccagccctgctgctggcatcaagacagtggaccccctgcccctgcgggaggacagcgaggacaacatccacaagtttgctgaggccaccctgcctgtgtccaagatccccaagtaccccaccaaccccccaggccagctgcccagcccccctcatgtgcccagctactggcaccccagccgccgcatccagggcagcctgcgggaccctgagttccagcacaacgtgggcaaggccaggatgaacaacctgcagctgccccagcacgaggccttcaatgatgaagatgaggaccggctgtctgagatcagcgcccggtctgctgccagcagcctgcgggccttccagaccctggcccgggccaagaagaggaaagaaaacttctggggcaagacctag

SEQ ID NO: 158984 - DNA, 2715 bp, synthetic construct
  misc_feature 1..2715: note = Description of Artificial Sequence: Synthetic coding sequence
  source 1..2715: mol_type = other DNA
atggaccgctacctgctgctggtgatctggggcgagggcaagttccccagcgctgccagccgggaggccgagcacggccctgaggtgtcctctggagagggcacagagaaccagcctgacttcaccgctgccaacgtgtaccacctgctgaagaggagcatcagcgccagcatcaaccctgaggacagcaccttccctgcctgcagcgtgggcggcatccctggcagcaagaagtggttctttgctgtgcaggccatctacggcttctaccagttctgcagcagtgactggcaggagatccactttgacacagagaaggacaagattgaagatgtgctgcagaccaacattgaagaatgtctgggcgctgtggagtgctttgaggaggaggacagcaacagccgggagagcctgagcctggccgacctgtatgaggaggccgctgagaacctgcaccagctgagtgacaagctgcctgcccctggccgggccatggtggacatcatcctgctgctgagtgacaaggacccccccaagctgaaggactacctgcccaccgtgggcgccctgaagcacctgcgggagtggtacagcgccaagatcaccatcgccggcaaccactgtgagatcaactgccagaagattgctgagtacctgagcgccaacgtggtgtccctggaggacctgagaaatgtgattgacagcaaggagctgtggaggggcaagatccagatctgggagaggaagtttggatttgagatctccttccctgagttctgcctgaagggcgtgaccctgaagaacttcagcaccagcaacctgaacacagacttcctggccaagaagatcatccccagcaaggacaagaacatcctgcccaaggtgttccactactacggccctgccctggagtttgtgcagatgatcaagctgagtgacctgcccagctgctacatgtctgacatcgagtttgagctgggcctgaccaacagcaccaagcagaacagcgtgctgctgctggagcagatcagcagcctgtgcagcaaggtgggcgccctgtttgtgctgccctgcaccatcagcaacatcctgatccccccacccaaccagctgagcagcaggaagtggaaggagtacatcgccaagaagcccaagaccatctctgtgcctgatgtggaggtgaagggagaatgtagcagctactacctgctgctgcagggcaatggaaacagacgctgcaaggccaccctcatccacagcgccaaccagatcaatggcagctttgccctgaacctgatccacggcaagatgaagaccaagacagaggaggccaagctgtccttcccctttgacctgctgagcctgccccacttctctggagagcagatcgtgcagcgggagaagcagctggccaacgtgcaggtgctggccctggaggagtgcctgaagaggaggaagctggccaagcagcctgagaccgtgtctgtggccgagctgaagagcctgctggtgctgaccaggaagcacttcctggactactttgatgctgtgatccccaagatgatcctgaggaagatggacaagatcaagaccttcaacatcctgaatgacttcagccctgtggagcccaacagcagcagcctgatggagaccaaccccctggagtggccagagcggcacgtgctgcagaacctggagacctttgagaagaccaagcagaagatgaggacaggcagcctgccccacagcagcgagcagctgctgggccacaaggagggcccccgggacagcatcaccctgctggatgccaaggagctgctgaagtacttcaccagtgatggcctgcccatcggggacctgcagcccctgcccatccagaagggggagaagacctttgtgctgaccccagagctgagccctgggaagctgcaggtgctgccctttgagaaggcctctgtgtgccactaccatggaattgagtactgcctggatgacaggaaggccctggagagagatggcggcttcagcgagctgcagagccgcctcatccgctatgagacccagaccacctgcacccgggagagcttccctgtgcccaccgtgctgagccccctgcccagccctgtggtgtccagtgaccccggctctgtgcctgatggagaggtgctgcagaatgagctgaggacagaggtgtcccggctgaagaggaggagcaaggacctgaactgcctgtaccccaggaagaggctggtgaagtctgagagcagcgagagcctgctgagccagaccaccggcaacagcaaccactaccaccaccacgtgaccagcaggaagccccagacagagaggagcctgcctgtgacctgccccctggtgcccatccccagctgtgagacccccaagctggccaccaagaccagcagcggccagaagtccatgcatgagagcaagaccagccggcagatcaaggagagccgcagccagaagcacacccgcatcctgaaggaggtggtgacagagaccctgaagaagcacagcatcacagagacccatgagtgcttcaccgcctgcagccagaggctgtttgagatcagcaagttctacctgaaggacctgaagaccagccggggcctgtttgaggagatgaagaagacagccaacaacaatgctgtgcaggtgattgactgggtgctggagaagaccagcaagaagtag

SEQ ID NO: 158985 - DNA, 1374 bp, synthetic construct
  misc_feature 1..1374: note = Description of Artificial Sequence: Synthetic coding sequence
  source 1..1374: mol_type = other DNA
tgaatggccgagaccgtgtggagcacagacacaggagaggccgtgtaccgcagccgggaccctgtgaggaacctgcggctgcgggtgcacctgcagaggatcaccagcagcaacttcctgcactaccagcctgctgctgagctgggcaaggacctgattgacctggccaccttccggccccagcccacagccagcggccacaggccagaagaagatgaggaggaggagatcgtgattggctggcaggagaagctgttcagccagtttgaggtggacctgtaccagaatgaaacagcctgccagagccccctggactaccagtaccggcaggagatcctgaagctggagaacagcggcggcaagaagaacagacgcatcttcacctacacagacagcgaccgctacaccaacctggaggagcactgccagaggatgaccacagctgccagcgaggtgcccagcttcctggtggagaggatggccaacgtgagaagaagacggcaggaccggcggggcatggagggcggcatcctgaagagccgcatcgtgacctgggagcccagcgaggagtttgtgaggaacaaccacgtgatcaacacccccctgcagaccatgcacatcatggctgacctgggcccctacaagaagctgggctacaagaagtatgagcacgtgctgtgcaccctgaaggtggacagcaatggagtcatcaccgtgaagccagacttcaccggcctgaagggcccctaccgcatcgagacagaaggagagaagcaggagctgtggaagtacaccatcgacaacgtgagcccccacgcccagcctgaggaggaggagcgggagcggcgggtcttcaaggacctgtatggccgccacaaggagtacctgagcagcctggtgggcacagactttgagatgacagtgcctggggccctgcggctgtttgtgaatggagaggtggtgtctgcccagggctatgaatatgacaacctgtatgtgcacttctttgtggagctgcccacagcccactggagcagccctgccttccagcagctgtctggagtgacccagacctgcaccaccaagagcctggccatggacaaggtggcccacttctcctaccccttcacctttgaggccttcttcctgcatgaagatgagagcagtgatgccctgcctgagtggcctgtgctgtactgtgaggtgctgagcctggacttctggcagcgctacagagtggagggctacggggctgtggtgctgcctgccaccccaggccccagctggaacagagcccccttcaggaagggctgcggcgtgtgctggacagtgtggaagggcagcgccagccgggtgcccttcaccatgtgctag

SEQ ID NO: 158986 - DNA, 1566 bp, synthetic construct
  misc_feature 1..1566: note = Description of Artificial Sequence: Synthetic coding sequence
  source 1..1566: mol_type = other DNA
atggccgagaccgtgtggagcacagacaccggggaggccgtgtaccgcagccgggaccctgtgaggaacctgcggctgcgggtgcacctgcagaggatcaccagcagcaacttcctgcactaccagcctgctgctgagctgggcaaggacctgattgacctggccaccttccggccccagcccacagccagcggccacaggcctgaggaggatgaggaggaggagatcgtcatcggctggcaggagaagctgttcagccagtttgaggtggacctgtaccagaatgaaacagcctgccagagccccctggactaccagtaccggcaggagatcctgaagctggagaacagcggcggcaagaagaacagacgcatcttcacctacacagacagcgaccgctacaccaacctggaggagcactgccagaggatgaccacagctgccagcgaggtgcccagcttcctggtggagaggatggccaacgtgagaagaagacggcaggacagaagaggcatggagggcggcatcctgaagagcagaattgtgacctgggagcccagcgaggagtttgtgaggaacaaccacgtgatcaacacccccctgcagaccatgcacatcatggctgacctgggcccctacaagaagctgggctacaagaagtatgaacatgtgctgtgcaccctgaaggtggacagcaatggagtcatcaccgtgaagccagacttcaccggcctgaagggcccctacagaattgaaacagaaggagagaagcaggagctgtggaagtacaccatcgacaacgtgagcccccacgcccagcctgaggaggaggagcgggagaggagggtcttcaaggacctgtatggccgccacaaggagtacctgagcagcctggtgggcacagactttgagatgacagtgcctggggccctgcggctgtttgtgaatggagaggtggtgtctgcccagggctatgaatatgacaacctgtatgtgcacttctttgtggagctgcccacagcccactggagcagccctgccttccagcagctgagcggcgtgacccagacctgcaccaccaagagcctggccatggacaaggtggcccacttctcctaccccttcacctttgaggccttcttcctgcatgaagatgagagcagtgatgccctgcctgagtggcctgtgctgtactgtgaggtgctgagcctggacttctggcagcgctacagagtggagggctatggagctgtggtgctgcctgccaccccaggcagccacaccctgactgtgtccacctggaggcctgtggagctgggcaccgtggccgagctgcggcgcttcttcatcggcggcagcctggagctggaggacctgtcctatgtgcgcatccctggcagcttcaaggccctgctgagcagcagcaagaccaaggagggcaggaaggtggatggagagcgggtgctgaacccccagcctgtgtccctgagcctcttccctgggaagccccacagcacagcctggggcctgctgcggctgcgctatgagctgttcctgagcaagtag

SEQ ID NO: 158987 - DNA, 1680 bp, synthetic construct
  misc_feature 1..1680: note = Description of Artificial Sequence: Synthetic coding sequence
  source 1..1680: mol_type = other DNA
atggccgagaccgtgtggagcacagacaccggggaggccgtgtaccgcagccgggaccctgtgaggaacctgcggctgcgggtgcacctgcagaggatcaccagcagcaacttcctgcactaccagcctgctgctgagctgggcaaggacctgattgacctggccaccttccggccccagcccacagccagcggccacaggcctgaggaggatgaggaggaggagatcgtcatcggctggcaggagaagctgttcagccagtttgaggtggacctgtaccagaatgaaacagcctgccagagccccctggactaccagtaccggcaggagatcctgaagctggagaacagcggcggcaagaagaacagacgcatcttcacctacacagacagcgaccgctacaccaacctggaggagcactgccagaggatgaccacagctgccagcgaggtgcccagcttcctggtggagaggatggccaacgtgagaagaagacggcaggacagaagaggcatggagggcggcatcctgaagagcagaattgtgacctgggagcccagcgaggagtttgtgaggaacaaccacgtgatcaacacccccctgcagaccatgcacatcatggctgacctgggcccctacaagaagctgggctacaagaagtatgaacatgtgctgtgcaccctgaaggtggacagcaatggagtcatcaccgtgaagccagacttcaccggcctgaagggcccctacagaattgaaacagaaggagagaagcaggagctgtggaagtacaccatcgacaacgtgagcccccacgcccagcctgaggaggaggagcgggagaggagggtcttcaaggacctgtatggccgccacaaggagtacctgagcagcctggtgggcacagactttgagatgacagtgcctggggccctgcggctgtttgtgaatggagaggtggtgtctgcccagggctatgaatatgacaacctgtatgtgcacttctttgtggagctgcccacagcccactggagcagccctgccttccagcagctgagcggcgtgacccagacctgcaccaccaagagcctggccatggacaaggtggcccacttctcctaccccttcacctttgaggccttcttcctgcatgaagatgagagcagtgatgccctgcctgagtggcctgtgctgtactgtgaggtgctgagcctggacttctggcagcgctacagagtggagggctatggagctgtggtgctgcctgccaccccaggcagccacaccctgactgtgtccacctggaggcctgtggagctgggcaccgtggccgagctgcggcgcttcttcatcggcggcagcctggagctggaggacctgtcctatgtgcgcatccctggcagcttcaagggggagcggctgagccgcttcggcctgaggacagagaccactggaacagtgaccttccggctgcactgcctgcagcagagccgggccttcatggagagcagcagcctgcagaagaggatgaggtctgtgctggaccggctggagggcttcagccagcagagcagcatccacaacgtgctggaggccttcagaagagcccggcggaggatgcaggaggcccgggagagcctgccccaggacctggtgagccccagcggcaccctggtgtcctag

SEQ ID NO: 158988 - DNA, 1563 bp, synthetic construct
  misc_feature 1..1563: note = Description of Artificial Sequence: Synthetic coding sequence
  source 1..1563: mol_type = other DNA
atggccgagaccgtgtggagcacagacaccggggaggccgtgtaccgcagccgggaccctgtgaggaacctgcggctgcgggtgcacctgcagaggatcaccagcagcaacttcctgcactaccagcctgctgctgagctgggcaaggacctgattgacctggccaccttccggccccagcccacagccagcggccacaggcctgaggaggatgaggaggaggagatcgtcatcggctggcaggagaagctgttcagccagtttgaggtggacctgtaccagaatgaaacagcctgccagagccccctggactaccagtaccggcaggagatcctgaagctggagaacagcggcggcaagaagaacagacgcatcttcacctacacagacagcgaccgctacaccaacctggaggagcactgccagaggatgaccacagctgccagcgaggtgcccagcttcctggtggagaggatggccaacgtgagaagaagacggcaggacagaagaggcatggagggcggcatcctgaagagcagaattgtgacctgggagcccagcgaggagtttgtgaggaacaaccacgtgatcaacacccccctgcagaccatgcacatcatggctgacctgggcccctacaagaagctgggctacaagaagtatgaacatgtgctgtgcaccctgaaggtggacagcaatggagtcatcaccgtgaagccagacttcaccggcctgaagggcccctacagaattgaaacagaaggagagaagcaggagctgtggaagtacaccatcgacaacgtgagcccccacgcccagcctgaggaggaggagcgggagaggagggtcttcaaggacctgtatggccgccacaaggagtacctgagcagcctggtgggcacagactttgagatgacagtgcctggggccctgcggctgtttgtgaatggagaggtggtgtctgcccagggctatgaatatgacaacctgtatgtgcacttctttgtggagctgcccacagcccactggagcagccctgccttccagcagctgagcggcgtgacccagacctgcaccaccaagagcctggccatggacaaggtggcccacttctcctaccccttcacctttgaggccttcttcctgcatgaagatgagagcagtgatgccctgcctgagtggcctgtgctgtactgtgaggtgctgagcctggacttctggcagcgctacagagtggagggctatggagctgtggtgctgcctgccaccccaggcagccacaccctgactgtgtccacctggaggcctgtggagctgggcaccgtggccgagctgcggcgcttcttcatcggcggcagcctggagctggaggacctgtcctatgtgcgcatccctggcagcttcaagggcctgagcagcagcaagaccaaggagggcaggaaggtggatggagagcgggtgctgaacccccagcctgtgtccctgagcctcttccctgggaagccccacagcacagcctggggcctgctgcggctgcgctatgagctgttcctgagcaagtag

SEQ ID NO: 158989 - DNA, 1650 bp, synthetic construct
  misc_feature 1..1650: note = Description of Artificial Sequence: Synthetic coding sequence
  source 1..1650: mol_type = other DNA
atggctgtgcctgtgtcctcctttgcccagaggaccaggagccgcttccgggtgcacctgcagaggatcaccagcagcaacttcctgcactaccagcctgctgctgagctgggcaaggacctgattgacctggccaccttccggccccagcccacagccagcggccacaggcctgaggaggatgaggaggaggagatcgtcatcggctggcaggagaagctgttcagccagtttgaggtggacctgtaccagaatgaaacagcctgccagagccccctggactaccagtaccggcaggagatcctgaagctggagaacagcggcggcaagaagaacagacgcatcttcacctacacagacagcgaccgctacaccaacctggaggagcactgccagaggatgaccacagctgccagcgaggtgcccagcttcctggtggagaggatggccaacgtgagaagaagacggcaggacagaagaggcatggagggcggcatcctgaagagcagaattgtgacctgggagcccagcgaggagtttgtgaggaacaaccacgtgatcaacacccccctgcagaccatgcacatcatggctgacctgggcccctacaagaagctgggctacaagaagtatgaacatgtgctgtgcaccctgaaggtggacagcaatggagtcatcaccgtgaagccagacttcaccggcctgaagggcccctacagaattgaaacagaaggagagaagcaggagctgtggaagtacaccatcgacaacgtgagcccccacgcccagcctgaggaggaggagcgggagaggagggtcttcaaggacctgtatggccgccacaaggagtacctgagcagcctggtgggcacagactttgagatgacagtgcctggggccctgcggctgtttgtgaatggagaggtggtgtctgcccagggctatgaatatgacaacctgtatgtgcacttctttgtggagctgcccacagcccactggagcagccctgccttccagcagctgagcggcgtgacccagacctgcaccaccaagagcctggccatggacaaggtggcccacttctcctaccccttcacctttgaggccttcttcctgcatgaagatgagagcagtgatgccctgcctgagtggcctgtgctgtactgtgaggtgctgagcctggacttctggcagcgctacagagtggagggctatggagctgtggtgctgcctgccaccccaggcagccacaccctgactgtgtccacctggaggcctgtggagctgggcaccgtggccgagctgcggcgcttcttcatcggcggcagcctggagctggaggacctgtcctatgtgcgcatccctggcagcttcaagggggagcggctgagccgcttcggcctgaggacagagaccactggaacagtgaccttccggctgcactgcctgcagcagagccgggccttcatggagagcagcagcctgcagaagaggatgaggtctgtgctggaccggctggagggcttcagccagcagagcagcatccacaacgtgctggaggccttcagaagagcccggcggaggatgcaggaggcccgggagagcctgccccaggacctggtgagccccagcggcaccctggtgtcctag

SEQ ID NO: 158990 - DNA, 1071 bp, synthetic construct
  misc_feature 1..1071: note = Description of Artificial Sequence: Synthetic coding sequence
  source 1..1071: mol_type = other DNA
atgcacatcatggctgacctgggcccctacaagaagctgggctacaagaagtatgagcacgtgctgtgcaccctgaaggtggacagcaatggagtcatcaccgtgaagccagacttcaccggcctgaagggcccctaccgcatcgagacagaaggagagaagcaggagctgtggaagtacaccatcgacaacgtgagcccccacgcccagcctgaggaggaggagcgggagcggcgggtcttcaaggacctgtatggccgccacaaggagtacctgagcagcctggtgggcacagactttgagatgacagtgcctggggccctgcggctgtttgtgaatggagaggtggtgtctgcccagggctatgaatatgacaacctgtatgtgcacttctttgtggagctgcccacagcccactggagcagccctgccttccagcagctgtctggagtgacccagacctgcaccaccaagagcctggccatggacaaggtggcccacttctcctaccccttcacctttgaggccttcttcctgcatgaagatgagagcagtgatgccctgcctgagtggcctgtgctgtactgtgaggtgctgagcctggacttctggcagcgctacagagtggagggctacggggctgtggtgctgcctgccaccccaggcagccacaccctgactgtgtccacctggaggcctgtggagctgggcaccgtggccgagctgcggcgcttcttcatcggcggcagcctggagctggaggacctgtcctatgtgcgcatccctggcagcttcaagggggagcggctgagcagatttggcctgaggacagagaccaccggcaccgtgaccttccggctgcactgcctgcagcagagccgggccttcatggagagcagcagcctgcagaagaggatgaggtctgtgctggaccggctggagggcttcagccagcagagcagcatccacaacgtgctggaggccttccggcgggcccggcggaggatgcaggaggcccgggagagcctgccccaggacctggtgagccccagcggcaccctggtgtcctag

SEQ ID NO: 158991 - DNA, 4746 bp, synthetic construct
  misc_feature 1..4746: note = Description of Artificial Sequence: Synthetic coding sequence
  source 1..4746: mol_type = other DNA
atgaaggcccagggcgagacagaggagagcgagaagctgagcaagatgagcagcctgctggagcggctgcacgccaagttcaaccagaaccggccctggagcgagaccatcaagctggtgcggcaggtgatggagaagagggtggtgatgagcagcggcggccaccagcacctggtgtcctgcctggagaccctgcagaaggccctgaaggtgaccagcctgcctgccatgacagaccggctggagagcatcgcccggcagaatggcctgggcagccacctgagcgccagcggcacagagtgctacatcaccagtgacatgttttatgtggaggtgcagctggaccctgctggccagctgtgtgatgtgaaggtggcccaccacggggagaaccctgtgtcctgcccagagctggtgcagcagctgcgggagaagaactttgatgagttcagcaagcacctgaagggcctggtgaacctgtacaacctgcccggggacaacaagctgaagaccaagatgtacctggccctgcagagcctggagcaggacctgagcaagatggccatcatgtactggaaggccaccaatgccggccccctggacaagatcctgcacggctctgtgggctacctgacccccaggtctgggggccacctgatgaacctgaagtactacgtgagccccagcgacctgctggatgacaagacagccagccccatcatcctgcacgagaacaacgtgagccgcagcctgggcatgaatgcctctgtgaccatcgagggcaccagcgctgtgtacaagctgcccatcgcccccctcatcatgggcagccaccctgtggacaacaagtggacccccagcttcagcagcatcaccagcgccaacagcgtggacctgcctgcctgcttcttcctgaagttcccccagcccatccctgtgtcccgggcctttgtgcagaagctgcagaactgcaccggcatccccctgtttgagacccagcccacctacgcccccctgtatgagctgatcacccagtttgagctgagcaaggaccctgaccccatccccctgaaccacaacatgaggttctatgctgccctgcccggccagcagcactgctacttcctgaacaaggatgcccccctgcctgatggccgcagcctgcagggcaccctggtgtccaagatcaccttccagcaccctggccgggtgcccctcatcctgaacctgatccgccaccaggtggcctacaacaccctgattggcagctgtgtgaagaggaccatcctgaaggaggacagccctggcctgctgcagtttgaggtgtgccccctgtctgagagccgcttctctgtgtccttccagcaccctgtgaatgacagcctggtgtgtgtggtgatggatgtgcaggacagcacccacgtgtcctgcaagctgtacaagggcctgagtgatgccctgatctgcacagatgacttcatcgccaaggtggtgcagcgctgcatgagcatccctgtgaccatgagggccatccggaggaaggccgagaccatccaggccgacaccccagccctgagcctgattgctgagaccgtggaggacatggtgaagaagaacctgcccccagccagcagccctggctacggcatgaccaccggcaacaaccccatgagcggcaccaccacccccaccaacaccttccctgggggccccatcaccaccctcttcaacatgtccatgagcatcaaggacagacatgagagcgtgggccatggagaggacttcagcaaggtgtcccagaaccccatcctgaccagcctgctgcagatcactggaaatggaggcagcaccatcggcagcagccccaccccaccccaccacaccccacctcctgtgtcctccatggccggcaacaccaagaaccaccccatgctgatgaacctgctgaaggacaacccagcccaggacttcagcaccctgtatggcagcagccccctggagcggcagaacagcagcagcggcagccccaggatggagatctgcagcggcagcaacaagaccaagaagaagaagagcagccggctgcccccagagaagcccaagcaccagacagaagatgacttccagcgggagctgttctccatggatgtggacagccagaaccccatctttgatgtgaacatgacagctgacaccctggacaccccccacatcaccccagcccccagccagtgcagcaccccacccaccacctacccccagcctgtgccccacccccagcccagcatccagaggatggtgcggctgagcagcagtgacagcattggaccagatgtgacagacatcctgagtgacattgctgaggaggccagcaagctgcccagcaccagtgatgactgcccagccatcggcacccccctgcgggacagcagcagcagcggccacagccagagcaccctgtttgacagtgatgtgttccagaccaacaacaatgaaaacccctacacagatcctgctgacctgattgctgatgctgctggcagccccagcagtgacagccccaccaaccacttcttccatgatggagtggacttcaacccagacctgctgaacagccagagccagagcggctttggagaggagtactttgatgagagcagccagagcggggacaatgatgacttcaagggctttgccagccaggccctgaacaccctgggcgtgcccatgctgggcggggacaatggagagaccaagttcaagggcaacaaccaggccgacacagtggacttcagcatcatctctgtggccggcaaggccctggccccagctgacctgatggagcaccacagcggcagccagggccccctgctgaccaccggggacctgggcaaggagaagacccagaagagggtgaaggagggcaatggcaccagcaacagcaccctgagcggccctggcctggacagcaagccaggcaagaggagcaggacccccagcaatgatggcaagagcaaggacaagccacccaagaggaagaaggctgacacagagggcaagagccccagccacagcagcagcaaccggcccttcaccccacccaccagcactggaggcagcaagagccctggcagcgctggccgcagccagaccccacctggggtggccaccccacccatccccaagatcaccatccagatccccaagggcaccgtgatggtgggcaagcccagcagccacagccagtacaccagcagcggctctgtgagcagcagcggcagcaagagccaccacagccacagcagcagcagcagcagcagcgccagcaccagcggcaagatgaagagcagcaagtctgagggcagcagcagcagcaagctgagcagctccatgtacagcagccagggcagcagcggcagcagccagagcaagaacagcagccagagcggcggcaagccaggcagcagccccatcaccaagcacggcctgagcagcggcagcagcagcaccaagatgaagccccagggcaagcccagcagcctgatgaaccccagcctgagcaagcccaacatcagccccagccacagccggcccccaggcggcagtgacaagctggccagccccatgaagcctgtgcccggcaccccacccagcagcaaggccaagagccccatcagcagcggcagcggcggcagccacatgagcggcaccagcagcagcagcggcatgaagagcagcagcggcctgggcagcagcggcagcctgagccagaagaccccacccagcagcaacagctgcacagccagcagcagcagcttcagcagcagcggcagctccatgagcagcagccagaaccagcacggcagcagcaagggcaagagccccagcaggaacaagaagcccagcctgacagctgtgattgacaagctgaagcacggcgtggtgaccagcggccctggaggagaggaccccctggatggccagatgggcgtgtccaccaacagcagcagccaccccatgagcagcaagcacaacatgtctggaggagagttccagggcaagcgggagaagagtgacaaggacaagagcaaggtgtccaccagcggcagctctgtggacagcagcaagaagaccagcgagagcaagaatgtgggcagcactggagtggccaagatcatcatcagcaagcatgatggcggcagccccagcatcaaggccaaggtgaccctgcagaagccaggagagagcagtggagagggcctgcggccccagatggccagcagcaagaactacggcagccccctcatcagcggcagcacccccaagcatgagcggggcagccccagccacagcaagagccctgcctacaccccccagaacctggacagcgagagcgagagcggcagcagcattgctgagaagagctaccagaacagccccagcagtgatgatggcatccggcccctgcctgagtacagcacagagaagcacaagaagcacaagaaggagaagaagaaggtgaaggacaaggaccgggaccgggaccgggacaaggaccgggacaagaagaagagccacagcatcaagccagagagctggagcaagagccccatcagcagtgaccagagcctgtccatgaccagcaacaccatcctgtctgctgaccggcccagccggctgagcccagacttcatgattggagaagaagatgatgacctgatggatgtggccctgattggcaactag

SEQ ID NO: 158992 - DNA, 1671 bp, synthetic construct
  misc_feature 1..1671: note = Description of Artificial Sequence: Synthetic coding sequence
  source 1..1671: mol_type = other DNA
atgaaggcccagggcgagacagaggagagcgagaagctgagcaagatgagcagcctgctggagcggctgcacgccaagttcaaccagaaccggccctggagcgagaccatcaagctggtgcggcaggtgatggagaagagggtggtgatgagcagcggcggccaccagcacctggtgtcctgcctggagaccctgcagaaggccctgaaggtgaccagcctgcctgccatgacagaccggctggagagcatcgcccggcagaatggcctgggcagccacctgagcgccagcggcacagagtgctacatcaccagtgacatgttttatgtggaggtgcagctggaccctgctggccagctgtgtgatgtgaaggtggcccaccacggggagaaccctgtgtcctgcccagagctggtgcagcagctgcgggagaagaactttgatgagttcagcaagcacctgaagggcctggtgaacctgtacaacctgcccggggacaacaagctgaagaccaagatgtacctggccctgcagagcctggagcaggacctgagcaagatggccatcatgtactggaaggccaccaatgccggccccctggacaagatcctgcacggctctgtgggctacctgacccccaggtctgggggccacctgatgaacctgaagtactacgtgagccccagcgacctgctggatgacaagacagccagccccatcatcctgcacgagaacaacgtgagccgcagcctgggcatgaatgcctctgtgaccatcgagggcaccagcgctgtgtacaagctgcccatcgcccccctcatcatgggcagccaccctgtggacaacaagtggacccccagcttcagcagcatcaccagcgccaacagcgtggacctgcctgcctgcttcttcctgaagttcccccagcccatccctgtgtcccgggcctttgtgcagaagctgcagaactgcaccggcatccccctgtttgagacccagcccacctacgcccccctgtatgagctgatcacccagtttgagctgagcaaggaccctgaccccatccccctgaaccacaacatgaggttctatgctgccctgcccggccagcagcactgctacttcctgaacaaggatgcccccctgcctgatggccgcagcctgcagggcaccctggtgtccaagatcaccttccagcaccctggccgggtgcccctcatcctgaacctgatccgccaccaggtggcctacaacaccctgattggcagctgtgtgaagaggaccatcctgaaggaggacagccctggcctgctgcagtttgaggtgtgccccctgtctgagagccgcttctctgtgtccttccagcaccctgtgaatgacagcctggtgtgtgtggtgatggatgtgcaggacagcacccacgtgtcctgcaagctgtacaagggcctgagtgatgccctgatctgcacagatgacttcatcgccaaggtggtgcagcgctgcatgagcatccctgtgaccatgagggccatccggaggaaggccgagaccatccaggccgacaccccagccctgagcctgattgctgagaccgtggaggacatggtgaagaagaacctgcccccagccagcagccctggcagcaagaaccctgagctgggcagcggctag

SEQ ID NO: 158993 - DNA, 408 bp, synthetic construct
  misc_feature 1..408: note = Description of Artificial Sequence: Synthetic coding sequence
  source 1..408: mol_type = other DNA
atggccgagaagtttgaccacctggaggagcacctggagaagtttgtggagaacatccggcagctgggcatcatcgtgtctgacttccagcccagcagccaggccggcctgaaccagaagctgaacttcatcgtgacaggcctgcaggacatcgacaagtgccggcagcagctgcatgacatcaccgtgcccctggaggtgtttgagtacatcgaccagggcaggaacccccagctgtacaccaaggaatgtctggagcgggccctggccaagaatgagcaggtgaagggcaagattgacaccatgaagaagttcaagagcctgctgatccaggagctgagcaaggtgtttcctgaggacatggccaagtaccgcagcatccggggggaggaccacccccccagctag

SEQ ID NO: 158994 - DNA, 354 bp, synthetic construct
  misc_feature 1..354: note = Description of Artificial Sequence: Synthetic coding sequence
  source 1..354: mol_type = other DNA
atggccacctacagcctggccaatgaaaggctgcgggccctggaggacatcgagcgggagattggagccatcctgcagaatgccggcaccgtcatcctggagctgagcaaggagaagaccaatgaaaggctgctggaccggcaggccgccgccttcaccgcctctgtgcagcacgtggaggccgagctgagcgcccagatccgctacctgacccaggtggccaccggccagccccatgagggcagcagctacagcagcaggaaggactgccagatggccctgaagagggtggactatgcccggctgaagctgagtgatgtggcccggacctgtgagcagatgctggagaactag

SEQ ID NO: 158995 - DNA, 6543 bp, synthetic construct
  misc_feature 1..6543: note = Description of Artificial Sequence: Synthetic coding sequence
  source 1..6543: mol_type = other DNA
atggccgccttcggcatcctgtcctatgagcaccggcccctgaagaggccccggctgggccccccagatgtgtacccccaggaccccaagcagaaggaggatgagctgacagccctgaatgtgaagcagggcttcaacaaccagcctgctgtgtctggagatgagcacggcagcgccaagaatgtgtccttcaacccagccaagatcagcagcaacttcagcagcatcatcgccgagaagctgcgctgcaacaccctgcctgacacaggaagaaggaagccccaggtgaaccagaaggacaacttctggctggtgacagcccggagccagagcgccatcaacacctggttcacagacctggccggcaccaagcccctgacccagctggccaagaaggtgcccatcttcagcaagaaggaggaggtgtttggctacctggccaagtacacagtgcctgtgatgagagctgcctggctgatcaagatgacctgtgcctactatgctgccatcagcgagaccaaggtgaagaagagacatgtggaccccttcatggagtggacccagatcatcaccaagtacctgtgggagcagctgcagaagatggccgagtactacagacctggccctgctggcagcggcggctgcggcagcaccatcggccccctgccccatgatgtggaggtggccatccggcagtgggactacacagagaagctggccatgttcatgttccaggacggcatgctggacagacatgagttcctgacctgggtgctggagtgctttgagaagatccggcctggagaagatgagctgctgaagctgctgctgcccctgctgctgcgctacagcggggagtttgtgcagagcgcctacctgagccggcggctggcctacttctgcacccggcggctggccctgcagctggatggagtgagcagccacagcagccacgtgatcagcgcccagagcaccagcaccctgcccaccaccccagccccccagccccccaccagcagcacccccagcacccccttcagtgacctgctgatgtgcccccagcaccggcccctggtgtttggcctgagctgcatcctgcagaccatcctgctgtgctgccccagcgccctggtgtggcactacagcctgacagacagccgcatcaagacaggcagccccctggaccacctgcccatcgcccccagcaacctgcccatgcctgagggcaacagcgccttcacccagcaggtgcgggccaagctgcgggagattgagcagcagatcaaggagcggggccaggccgtggaggtgcgctggagctttgacaagtgccaggaggccacagctggcttcaccatcggccgggtgctgcacaccctggaggtgctggacagccacagctttgagaggagtgacttcagcaacagcctggacagcctgtgcaaccgcatcttcggcctgggccccagcaaggatggccacgagatcagcagtgatgatgatgctgtggtgtccctgctgtgtgagtgggccgtgtcctgcaagaggagcggccgccaccgggccatggtggtggccaagctgctggagaagaggcaggccgagattgaggccgagcgctgtggggagagcgaggccgcagatgagaagggcagcatcgccagcggcagcctgagcgcccccagcgcccccatcttccaggatgtgctgctgcagttcctggacacccaggcccccatgctgacagaccccaggtctgagagcgagcgggtggagttcttcaacctggtgctgctcttctgtgagctgatcagacatgatgtgttcagccacaacatgtacacctgcaccctcatcagcagaggagacctggccttcggggcccctggccccaggcctcccagcccctttgatgatcctgcagatgatcctgagcacaaggaggccgagggcagcagcagcagcaagctggaggaccccggcctgtctgagagcatggacatcgaccccagcagctctgtgctgtttgaggacatggagaagccagacttcagcctcttcagccccaccatgccctgtgagggcaagggcagccccagccctgagaagccagatgtggagaaggaggtgaagcccccacccaaggagaagattgagggcaccctgggcgtgctgtatgaccagcccaggcatgtgcagtatgccacccacttccccatcccccaggaggagagctgcagccatgagtgcaaccagaggctggtggtgctgtttggagtgggcaagcagagagatgatgcccggcatgccatcaagaagatcaccaaggacatcctgaaggtgctgaacagaaaaggaacagctgagacagaccagctggcccccatcgtgcccctgaaccctggggacctgaccttcctgggcggggaggatggccagaagagaagaagaaacagacctgaggccttccccacagctgaggacatctttgccaagttccagcacctgagccactatgaccagcaccaggtgacagcccaggtgtccagaaatgtgctggagcagatcaccagctttgccctgggcatgagctaccacctgcccctggtgcagcacgtgcagttcatctttgacctgatggagtacagcctgagcatcagcggcctgattgactttgccatccagctgctgaatgagctgtctgtggtggaggccgagctgctgctgaagagcagtgacctggtgggcagctacaccaccagcctgtgcctgtgcatcgtggccgtgctgcggcactaccacgcctgcctgatcctgaaccaggaccagatggcccaggtgtttgagggcctgtgtggggtggtgaagcacggcatgaacagaagtgatggcagcagcgctgagcgctgcatcctggcctacctgtatgacctgtacaccagctgcagccacctgaagaacaagtttggagagctgttcagtgacttctgcagcaaggtgaagaacaccatctactgcaatgtggagcccagcgagagcaacatgcgctgggcccctgagttcatgattgacaccctggagaacccagctgcccacaccttcacctacacaggcctgggcaagagcctgtctgaaaatcctgccaaccgctacagctttgtgtgcaatgccctgatgcacgtgtgtgtgggccaccacgaccctgacagagtgaatgacatcgccatcctgtgtgccgagctgaccggctactgcaagagcctgtctgctgagtggctgggcgtgctgaaggccctgtgctgcagcagcaacaacggcacctgtggcttcaatgacctgctgtgcaatgtggatgtgtctgacctgtccttccatgacagcctggccacctttgtggccatcctgattgcccggcagtgcctgctgctggaggacctgatccgctgtgccgccatccccagcctgctgaatgctgcctgcagcgagcaggacagcgagcccggggcccggctgacctgccgcatcctgctgcacctgttcaagaccccccagctgaacccctgccagagtgatggcaacaagcccaccgtgggcatccgcagcagctgtgacagacacctgctggccgccagccagaacagaattgtggatggagctgtgtttgctgtgctgaaggctgtgtttgtgctgggagatgctgagctgaagggcagcggcttcaccgtgactggaggaacagaggagctgcctgaggaggagggcggcggcggcagcggcggccggcggcagggcggcaggaacatctctgtggagacagccagcctggatgtgtatgccaagtatgtgctgcggagcatctgccagcaggagtgggtgggggagcgctgcctgaagagcctgtgtgaggacagcaatgacctgcaggaccctgtgctgagcagcgcccaggcccagaggctgatgcagctgatctgctacccccaccggctgctggacaatgaagatggagagaacccccagaggcagaggatcaagaggatcctgcagaacctggaccagtggaccatgaggcagagcagcctggagctgcagctgatgatcaagcagacccccaacaatgagatgaacagcctgctggagaacatcgccaaggccaccatcgaggtgttccagcagagcgctgagaccggcagcagcagcggcagcacagccagcaacatgcccagcagcagcaagaccaagcctgtgctgagcagcctggagaggtctggagtgtggctggtggcccccctcatcgccaagctgcccacctctgtgcagggccacgtgctgaaggctgctggggaggagctggagaagggccagcacctgggcagcagcagcaggaaggagcgggaccggcagaagcagaagtccatgagcctgctgagccagcagcccttcctgagcctggtgctgacctgcctgaagggccaggatgagcagcgggagggcctgctgaccagcctgtacagccaggtgcaccagatcgtgaacaactggagagatgaccagtacctggatgactgcaagcccaagcagctgatgcatgaggccctgaagctgcggctgaacctggtgggcggcatgtttgacacagtgcagaggagcacccagcagaccacagagtgggccatgctgctgctggagatcatcatctctggaacagtggacatgcagagcaacaatgagctgttcaccaccgtgctggacatgctgtctgtgctgatcaatggcaccctggccgctgacatgagcagcatcagccagggctccatggaggagaacaagagggcctacatgaacctggccaagaagctgcagaaggagctgggggagcggcagagcgacagcctggagaaggtgcggcagctgctgcccctgcccaagcagaccagagatgtgatcacctgtgagccccagggcagcctgattgacaccaagggcaacaagattgctggctttgacagcatcttcaagaaggagggcctgcaggtgtccaccaagcagaagatcagcccctgggacctgtttgagggcctgaagcccagcgcccccctgtcctggggctggtttggaacagtgcgggtggaccggcgggtggcccggggggaggagcagcagaggctgctgctgtaccacacccacctgcggccccggccccgggcctactacctggagcccctgcccctgcccccagaagatgaggagcccccagcccccaccctgctggagcctgagaagaaggcccctgagccccccaagacagacaagccaggggccgccccacccagcacagaggagaggaagaagaagagcaccaagggcaagaagaggagccagcctgccaccaagacagaggactatggcatgggccctggccgcagcggcccctacggcgtgacagtgcccccagacctgctgcaccaccccaaccctggcagcatcacccacctgaactaccggcagggcagcatcggcctgtacacccagaaccagcccctgcctgctgggggcccccgggtggacccctacagacctgtgcggctgcccatgcagaagctgcccacccggcccacctacccaggagtgctgcccaccaccatgactggagtgatgggcctggagcccagcagctacaagacctctgtgtaccggcagcagcagcctgctgtgccccagggccagaggctgcggcagcagctgcaggccaagatccagagccagggcatgctgggccagagctctgtgcaccagatgacccccagcagcagctatggcctgcagaccagccagggctacaccccctacgtgagccacgtgggcctgcagcagcacacaggccctgctggcaccatggtgccccccagctacagcagccagccctaccagagcacccaccccagcaccaaccccaccctggtggaccccaccaggcacctgcagcagaggccttctggctacgtgcaccagcaggcccccacctacggccacggcctgaccagcacccagcgcttcagccaccagaccctgcagcagacccccatgatcagcaccatgacccccatgtctgcccagggcgtgcaggccggcgtgcgcagcacagccatcctgcctgagcagcagcagcagcagcagcagcagcagcagcagcagcagcagcagcagcagcagcagcagcagcagcagcagcagcagtaccacatccggcagcagcagcagcagcagatcctgcggcagcagcagcagcagcagcagcagcagcagcagcagcagcagcagcagcagcagcagcagcagcagcagcagcagcagcaccagcagcagcagcagcagcaggccgccccaccccagccccagccccagagccagccccagttccagaggcagggcctgcagcagacccagcagcagcagcagacagctgccctggtgcggcagctgcagcagcagctgagcaacacccagccccagcccagcaccaacatcttcggccgctactag

SEQ ID NO: 158996 - DNA, 6534 bp, synthetic construct
  misc_feature 1..6534: note = Description of Artificial Sequence: Synthetic coding sequence
  source 1..6534: mol_type = other DNA
atggccgccttcggcatcctgtcctatgagcaccggcccctgaagaggccccggctgggccccccagatgtgtacccccaggaccccaagcagaaggaggatgagctgacagccctgaatgtgaagcagggcttcaacaaccagcctgctgtgtctggagatgagcacggcagcgccaagaatgtgtccttcaacccagccaagatcagcagcaacttcagcagcatcatcgccgagaagctgcgctgcaacaccctgcctgacacaggaagaaggaagccccaggtgaaccagaaggacaacttctggctggtgacagcccggagccagagcgccatcaacacctggttcacagacctggccggcaccaagcccctgacccagctggccaagaaggtgcccatcttcagcaagaaggaggaggtgtttggctacctggccaagtacacagtgcctgtgatgagagctgcctggctgatcaagatgacctgtgcctactatgctgccatcagcgagaccaaggtgaagaagagacatgtggaccccttcatggagtggacccagatcatcaccaagtacctgtgggagcagctgcagaagatggccgagtactacagacctggccctgctggcagcggcggctgcggcagcaccatcggccccctgccccatgatgtggaggtggccatccggcagtgggactacacagagaagctggccatgttcatgttccaggacggcatgctggacagacatgagttcctgacctgggtgctggagtgctttgagaagatccggcctggagaagatgagctgctgaagctgctgctgcccctgctgctgcgctacagcggggagtttgtgcagagcgcctacctgagccggcggctggcctacttctgcacccggcggctggccctgcagctggatggagtgagcagccacagcagccacgtgatcagcgcccagagcaccagcaccctgcccaccaccccagccccccagccccccaccagcagcacccccagcacccccttcagtgacctgctgatgtgcccccagcaccggcccctggtgtttggcctgagctgcatcctgcagaccatcctgctgtgctgccccagcgccctggtgtggcactacagcctgacagacagccgcatcaagacaggcagccccctggaccacctgcccatcgcccccagcaacctgcccatgcctgagggcaacagcgccttcacccagcaggtgcgggccaagctgcgggagattgagcagcagatcaaggagcggggccaggccgtggaggtgcgctggagctttgacaagtgccaggaggccacagctggcttcaccatcggccgggtgctgcacaccctggaggtgctggacagccacagctttgagaggagtgacttcagcaacagcctggacagcctgtgcaaccgcatcttcggcctgggccccagcaaggatggccacgagatcagcagtgatgatgatgctgtggtgtccctgctgtgtgagtgggccgtgtcctgcaagaggagcggccgccaccgggccatggtggtggccaagctgctggagaagaggcaggccgagattgaggccgagcgctgtggggagagcgaggccgcagatgagaagggcagcatcgccagcggcagcctgagcgcccccagcgcccccatcttccaggatgtgctgctgcagttcctggacacccaggcccccatgctgacagaccccaggtctgagagcgagcgggtggagttcttcaacctggtgctgctcttctgtgagctgatcagacatgatgtgttcagccacaacatgtacacctgcaccctcatcagcagaggagacctggccttcggggcccctggccccaggcctcccagcccctttgatgatcctgcagatgatcctgagcacaaggaggccgagggcagcagcagcagcaagctggaggaccccggcctgtctgagagcatggacatcgaccccagcagctctgtgctgtttgaggacatggagaagccagacttcagcctcttcagccccaccatgccctgtgagggcaagggcagccccagccctgagaagccagatgtggagaaggaggtgaagcccccacccaaggagaagattgagggcaccctgggcgtgctgtatgaccagcccaggcatgtgcagtatgccacccacttccccatcccccaggaggagagctgcagccatgagtgcaaccagaggctggtggtgctgtttggagtgggcaagcagagagatgatgcccggcatgccatcaagaagatcaccaaggacatcctgaaggtgctgaacagaaaaggaacagctgagacagaccagctggcccccatcgtgcccctgaaccctggggacctgaccttcctgggcggggaggatggccagaagagaagaagaaacagacctgaggccttccccacagctgaggacatctttgccaagttccagcacctgagccactatgaccagcaccaggtgacagcccaggtgtccagaaatgtgctggagcagatcaccagctttgccctgggcatgagctaccacctgcccctggtgcagcacgtgcagttcatctttgacctgatggagtacagcctgagcatcagcggcctgattgactttgccatccagctgctgaatgagctgtctgtggtggaggccgagctgctgctgaagagcagtgacctggtgggcagctacaccaccagcctgtgcctgtgcatcgtggccgtgctgcggcactaccacgcctgcctgatcctgaaccaggaccagatggcccaggtgtttgagggcctgtgtggggtggtgaagcacggcatgaacagaagtgatggcagcagcgctgagcgctgcatcctggcctacctgtatgacctgtacaccagctgcagccacctgaagaacaagtttggagagctgttcagtgacttctgcagcaaggtgaagaacaccatctactgcaatgtggagcccagcgagagcaacatgcgctgggcccctgagttcatgattgacaccctggagaacccagctgcccacaccttcacctacacaggcctgggcaagagcctgtctgaaaatcctgccaaccgctacagctttgtgtgcaatgccctgatgcacgtgtgtgtgggccaccacgaccctgacagagtgaatgacatcgccatcctgtgtgccgagctgaccggctactgcaagagcctgtctgctgagtggctgggcgtgctgaaggccctgtgctgcagcagcaacaacggcacctgtggcttcaatgacctgctgtgcaatgtggatgtgtctgacctgtccttccatgacagcctggccacctttgtggccatcctgattgcccggcagtgcctgctgctggaggacctgatccgctgtgccgccatccccagcctgctgaatgctgcctgcagcgagcaggacagcgagcccggggcccggctgacctgccgcatcctgctgcacctgttcaagaccccccagctgaacccctgccagagtgatggcaacaagcccaccgtgggcatccgcagcagctgtgacagacacctgctggccgccagccagaacagaattgtggatggagctgtgtttgctgtgctgaaggctgtgtttgtgctgggagatgctgagctgaagggcagcggcttcaccgtgactggaggaacagaggagctgcctgaggaggagggcggcggcggcagcggcggccggcggcagggcggcaggaacatctctgtggagacagccagcctggatgtgtatgccaagtatgtgctgcggagcatctgccagcaggagtgggtgggggagcgctgcctgaagagcctgtgtgaggacagcaatgacctgcaggaccctgtgctgagcagcgcccaggcccagaggctgatgcagctgatctgctacccccaccggctgctggacaatgaagatggagagaacccccagaggcagaggatcaagaggatcctgcagaacctggaccagtggaccatgaggcagagcagcctggagctgcagctgatgatcaagcagacccccaacaatgagatgaacagcctgctggagaacatcgccaaggccaccatcgaggtgttccagcagagcgctgagaccggcagcagcagcggcagcacagccagcaacatgcccagcagcagcaagaccaagcctgtgctgagcagcctggagaggtctggagtgtggctggtggcccccctcatcgccaagctgcccacctctgtgcagggccacgtgctgaaggctgctggggaggagctggagaagggccagcacctgggcagcagcagcaggaaggagcgggaccggcagaagcagaagtccatgagcctgctgagccagcagcccttcctgagcctggtgctgacctgcctgaagggccaggatgagcagcgggagggcctgctgaccagcctgtacagccaggtgcaccagatcgtgaacaactggagagatgaccagtacctggatgactgcaagcccaagcagctgatgcatgaggccctgaagctgcggctgaacctggtgggcggcatgtttgacacagtgcagaggagcacccagcagaccacagagtgggccatgctgctgctggagatcatcatctctggaacagtggacatgcagagcaacaatgagctgttcaccaccgtgctggacatgctgtctgtgctgatcaatggcaccctggccgctgacatgagcagcatcagccagggctccatggaggagaacaagagggcctacatgaacctggccaagaagctgcagaaggagctgggggagcggcagagcgacagcctggagaaggtgcggcagctgctgcccctgcccaagcagaccagagatgtgatcacctgtgagccccagggcagcctgattgacaccaagggcaacaagattgctggctttgacagcatcttcaagaaggagggcctgcaggtgtccaccaagcagaagatcagcccctgggacctgtttgagggcctgaagcccagcgcccccctgtcctggggctggtttggaacagtgcgggtggaccggcgggtggcccggggggaggagcagcagaggctgctgctgtaccacacccacctgcggccccggccccgggcctactacctggagcccctgcccctgcccccagaagatgaggagcccccagcccccaccctgctggagcctgagaagaaggcccctgagccccccaagacagacaagccaggggccgccccacccagcacagaggagaggaagaagaagagcaccaagggcaagaagaggagccagcctgccaccaagacagaggactatggcatgggccctggccgcagcggcccctacggcgtgacagtgcccccagacctgctgcaccaccccaaccctggcagcatcacccacctgaactaccggcagggcagcatcggcctgtacacccagaaccagcccctgcctgctgggggcccccgggtggacccctacagacctgtgcggctgcccatgcagaagctgcccacccggcccacctacccaggagtgctgcccaccaccatgactggagtgatgggcctggagcccagcagctacaagacctctgtgtaccggcagcagcagcctgctgtgccccagggccagaggctgcggcagcagctgcagcagagccagggcatgctgggccagagctctgtgcaccagatgacccccagcagcagctatggcctgcagaccagccagggctacaccccctacgtgagccacgtgggcctgcagcagcacactggacctgctggcaccatggtgcccccatcctacagcagccagccctaccagagcacccaccccagcaccaaccccaccctggtggaccccaccaggcacctgcagcagaggcccagcggctacgtgcaccagcaggcccccacctacggccacggcctgaccagcacccagcgcttcagccaccagaccctgcagcagacccccatgatcagcaccatgacccccatgtctgcccagggcgtgcaggccggcgtgcgcagcacagccatcctgcctgagcagcagcagcagcagcagcagcagcagcagcagcagcagcagcagcagcagcagcagcagcagcagcagcagcagcagtaccacatccggcagcagcagcagcagcagatcctgcggcagcagcagcagcagcagcagcagcagcagcagcagcagcagcagcagcagcagcagcagcagcagcagcagcagcagcaccagcagcagcagcagcagcaggccgccccaccccagccccagccccagagccagccccagttccagaggcagggcctgcagcagacccagcagcagcagcagacagctgccctggtgcggcagctgcagcagcagctgagcaacacccagccccagcccagcaccaacatcttcggccgctactag

SEQ ID NO: 158997 - DNA, 6531 bp, synthetic construct
  misc_feature 1..6531: note = Description of Artificial Sequence: Synthetic coding sequence
  source 1..6531: mol_type = other DNA
atggccgccttcggcatcctgtcctatgagcaccggcccctgaagaggccccggctgggccccccagatgtgtacccccaggaccccaagcagaaggaggatgagctgacagccctgaatgtgaagcagggcttcaacaaccagcctgctgtgtctggagatgagcacggcagcgccaagaatgtgtccttcaacccagccaagatcagcagcaacttcagcagcatcatcgccgagaagctgcgctgcaacaccctgcctgacacaggaagaaggaagccccaggtgaaccagaaggacaacttctggctggtgacagcccggagccagagcgccatcaacacctggttcacagacctggccggcaccaagcccctgacccagctggccaagaaggtgcccatcttcagcaagaaggaggaggtgtttggctacctggccaagtacacagtgcctgtgatgagagctgcctggctgatcaagatgacctgtgcctactatgctgccatcagcgagaccaaggtgaagaagagacatgtggaccccttcatggagtggacccagatcatcaccaagtacctgtgggagcagctgcagaagatggccgagtactacagacctggccctgctggcagcggcggctgcggcagcaccatcggccccctgccccatgatgtggaggtggccatccggcagtgggactacacagagaagctggccatgttcatgttccaggacggcatgctggacagacatgagttcctgacctgggtgctggagtgctttgagaagatccggcctggagaagatgagctgctgaagctgctgctgcccctgctgctgcgctacagcggggagtttgtgcagagcgcctacctgagccggcggctggcctacttctgcacccggcggctggccctgcagctggatggagtgagcagccacagcagccacgtgatcagcgcccagagcaccagcaccctgcccaccaccccagccccccagccccccaccagcagcacccccagcacccccttcagtgacctgctgatgtgcccccagcaccggcccctggtgtttggcctgagctgcatcctgcagaccatcctgctgtgctgccccagcgccctggtgtggcactacagcctgacagacagccgcatcaagacaggcagccccctggaccacctgcccatcgcccccagcaacctgcccatgcctgagggcaacagcgccttcacccagcaggtgcgggccaagctgcgggagattgagcagcagatcaaggagcggggccaggccgtggaggtgcgctggagctttgacaagtgccaggaggccacagctggcttcaccatcggccgggtgctgcacaccctggaggtgctggacagccacagctttgagaggagtgacttcagcaacagcctggacagcctgtgcaaccgcatcttcggcctgggccccagcaaggatggccacgagatcagcagtgatgatgatgctgtggtgtccctgctgtgtgagtgggccgtgtcctgcaagaggagcggccgccaccgggccatggtggtggccaagctgctggagaagaggcaggccgagattgaggccgagcgctgtggggagagcgaggccgcagatgagaagggcagcatcgccagcggcagcctgagcgcccccagcgcccccatcttccaggatgtgctgctgcagttcctggacacccaggcccccatgctgacagaccccaggtctgagagcgagcgggtggagttcttcaacctggtgctgctcttctgtgagctgatcagacatgatgtgttcagccacaacatgtacacctgcaccctcatcagcagaggagacctggccttcggggcccctggccccaggcctcccagcccctttgatgatcctgcagatgatcctgagcacaaggaggccgagggcagcagcagcagcaagctggaggaccccggcctgtctgagagcatggacatcgaccccagcagctctgtgctgtttgaggacatggagaagccagacttcagcctcttcagccccaccatgccctgtgagggcaagggcagccccagccctgagaagccagatgtggagaaggaggtgaagcccccacccaaggagaagattgagggcaccctgggcgtgctgtatgaccagcccaggcatgtgcagtatgccacccacttccccatcccccaggaggagagctgcagccatgagtgcaaccagaggctggtggtgctgtttggagtgggcaagcagagagatgatgcccggcatgccatcaagaagatcaccaaggacatcctgaaggtgctgaacagaaaaggaacagctgagacagaccagctggcccccatcgtgcccctgaaccctggggacctgaccttcctgggcggggaggatggccagaagagaagaagaaacagacctgaggccttccccacagctgaggacatctttgccaagttccagcacctgagccactatgaccagcaccaggtgacagcccaggtgtccagaaatgtgctggagcagatcaccagctttgccctgggcatgagctaccacctgcccctggtgcagcacgtgcagttcatctttgacctgatggagtacagcctgagcatcagcggcctgattgactttgccatccagctgctgaatgagctgtctgtggtggaggccgagctgctgctgaagagcagtgacctggtgggcagctacaccaccagcctgtgcctgtgcatcgtggccgtgctgcggcactaccacgcctgcctgatcctgaaccaggaccagatggcccaggtgtttgagggcctgtgtggggtggtgaagcacggcatgaacagaagtgatggcagcagcgctgagcgctgcatcctggcctacctgtatgacctgtacaccagctgcagccacctgaagaacaagtttggagagctgttcagtgacttctgcagcaaggtgaagaacaccatctactgcaatgtggagcccagcgagagcaacatgcgctgggcccctgagttcatgattgacaccctggagaacccagctgcccacaccttcacctacacaggcctgggcaagagcctgtctgaaaatcctgccaaccgctacagctttgtgtgcaatgccctgatgcacgtgtgtgtgggccaccacgaccctgacagagtgaatgacatcgccatcctgtgtgccgagctgaccggctactgcaagagcctgtctgctgagtggctgggcgtgctgaaggccctgtgctgcagcagcaacaacggcacctgtggcttcaatgacctgctgtgcaatgtggatgtgtctgacctgtccttccatgacagcctggccacctttgtggccatcctgattgcccggcagtgcctgctgctggaggacctgatccgctgtgccgccatccccagcctgctgaatgctgcctgcagcgagcaggacagcgagcccggggcccggctgacctgccgcatcctgctgcacctgttcaagaccccccagctgaacccctgccagagtgatggcaacaagcccaccgtgggcatccgcagcagctgtgacagacacctgctggccgccagccagaacagaattgtggatggagctgtgtttgctgtgctgaaggctgtgtttgtgctgggagatgctgagctgaagggcagcggcttcaccgtgactggaggaacagaggagctgcctgaggaggagggcggcggcggcagcggcggccggcggcagggcggcaggaacatctctgtggagacagccagcctggatgtgtatgccaagtatgtgctgcggagcatctgccagcaggagtgggtgggggagcgctgcctgaagagcctgtgtgaggacagcaatgacctgcaggaccctgtgctgagcagcgcccaggcccagaggctgatgcagctgatctgctacccccaccggctgctggacaatgaagatggagagaacccccagaggcagaggatcaagaggatcctgcagaacctggaccagtggaccatgaggcagagcagcctggagctgcagctgatgatcaagcagacccccaacaatgagatgaacagcctgctggagaacatcgccaaggccaccatcgaggtgttccagcagagcgctgagaccggcagcagcagcggcagcacagccagcaacatgcccagcagcagcaagaccaagcctgtgctgagcagcctggagaggtctggagtgtggctggtggcccccctcatcgccaagctgcccacctctgtgcagggccacgtgctgaaggctgctggggaggagctggagaagggccagcacctgggcagcagcagcaggaaggagcgggaccggcagaagcagaagtccatgagcctgctgagccagcagcccttcctgagcctggtgctgacctgcctgaagggccaggatgagcagcgggagggcctgctgaccagcctgtacagccaggtgcaccagatcgtgaacaactggagagatgaccagtacctggatgactgcaagcccaagcagctgatgcatgaggccctgaagctgcggctgaacctggtgggcggcatgtttgacacagtgcagaggagcacccagcagaccacagagtgggccatgctgctgctggagatcatcatctctggaacagtggacatgcagagcaacaatgagctgttcaccaccgtgctggacatgctgtctgtgctgatcaatggcaccctggccgctgacatgagcagcatcagccagggctccatggaggagaacaagagggcctacatgaacctggccaagaagctgcagaaggagctgggggagcggcagagcgacagcctggagaaggtgcggcagctgctgcccctgcccaagcagaccagagatgtgatcacctgtgagccccagggcagcctgattgacaccaagggcaacaagattgctggctttgacagcatcttcaagaaggagggcctgcaggtgtccaccaagcagaagatcagcccctgggacctgtttgagggcctgaagcccagcgcccccctgtcctggggctggtttggaacagtgcgggtggaccggcgggtggcccggggggaggagcagcagaggctgctgctgtaccacacccacctgcggccccggccccgggcctactacctggagcccctgcccctgcccccagaagatgaggagcccccagcccccaccctgctggagcctgagaagaaggcccctgagccccccaagacagacaagccaggggccgccccacccagcacagaggagaggaagaagaagagcaccaagggcaagaagaggagccagcctgccaccaagacagaggactatggcatgggccctggccgcagcggcccctacggcgtgacagtgcccccagacctgctgcaccaccccaaccctggcagcatcacccacctgaactaccggcagggcagcatcggcctgtacacccagaaccagcccctgcctgctgggggcccccgggtggacccctacagacctgtgcggctgcccatgcagaagctgcccacccggcccacctacccaggagtgctgcccaccaccatgactggagtgatgggcctggagcccagcagctacaagacctctgtgtaccggcagcagcagcctgctgtgccccagggccagaggctgcggcagcagctgcagagccagggcatgctgggccagagctctgtgcaccagatgacccccagcagcagctatggcctgcagaccagccagggctacaccccctacgtgagccacgtgggcctgcagcagcacacaggccctgctggcaccatggtgccccccagctacagcagccagccctaccagagcacccaccccagcaccaaccccaccctggtggaccccaccaggcacctgcagcagaggccttctggctacgtgcaccagcaggcccccacctacggccacggcctgaccagcacccagcgcttcagccaccagaccctgcagcagacccccatgatcagcaccatgacccccatgtctgcccagggcgtgcaggccggcgtgcgcagcacagccatcctgcctgagcagcagcagcagcagcagcagcagcagcagcagcagcagcagcagcagcagcagcagcagcagcagcagcagcagcagtaccacatccggcagcagcagcagcagcagatcctgcggcagcagcagcagcagcagcagcagcagcagcagcagcagcagcagcagcagcagcagcagcagcagcagcagcagcagcaccagcagcagcagcagcagcaggccgccccaccccagccccagccccagagccagccccagttccagaggcagggcctgcagcagacccagcagcagcagcagacagctgccctggtgcggcagctgcagcagcagctgagcaacacccagccccagcccagcaccaacatcttcggccgctactag

SEQ ID NO: 158998 - DNA, 393 bp, synthetic construct
  misc_feature 1..393: note = Description of Artificial Sequence: Synthetic coding sequence
  source 1..393: mol_type = other DNA
tgaacacccaacagaagaaggaagaagcagctgaatgctgccttcctgccccaggatgagctgacagccctgaatgtgaagcagggcttcaacaaccagcctgctgtgtctggagatgaacatggcagcgccaagaatgtgtccttcaacccagccaagatcagcagcaacttcagcagcatcatcgccgagaagctgcgctgcaacaccctgcctgacaccggccgcaggaagccccaggtgaaccagaaggacaacttctggctggtgacagcccggagccagagcgccatcaacacctggttcacagacctggccggcaccaagcccctgacccagctggccaagaaggtgcccatcttcagcaagaaggaggaggtgtttggctactag

SEQ ID NO: 158999 - DNA, 6384 bp, synthetic construct
  misc_feature 1..6384: note = Description of Artificial Sequence: Synthetic coding sequence
  source 1..6384: mol_type = other DNA
gaagatgagctgacagccctgaatgtgaagcagggcttcaacaaccagcctgctgtgtctggagatgagcacggcagcgccaagaatgtgtccttcaacccagccaagatcagcagcaacttcagcagcatcatcgccgagaagctgcgctgcaacaccctgcctgacacaggaagaaggaagccccaggtgaaccagaaggacaacttctggctggtgacagcccggagccagagcgccatcaacacctggttcacagacctggccggcaccaagcccctgacccagctggccaagaaggtgcccatcttcagcaagaaggaggaggtgtttggctacctggccaagtacacagtgcctgtgatgagagctgcctggctgatcaagatgacctgtgcctactatgctgccatcagcgagaccaaggtgaagaagagacatgtggaccccttcatggagtggacccagatcatcaccaagtacctgtgggagcagctgcagaagatggccgagtactacagacctggccctgctggcagcggcggctgcggcagcaccatcggccccctgccccatgatgtggaggtggccatccggcagtgggactacacagagaagctggccatgttcatgttccaggacggcatgctggacagacatgagttcctgacctgggtgctggagtgctttgagaagatccggcctggagaagatgagctgctgaagctgctgctgcccctgctgctgcgctacagcggggagtttgtgcagagcgcctacctgagccggcggctggcctacttctgcacccggcggctggccctgcagctggatggagtgagcagccacagcagccacgtgatcagcgcccagagcaccagcaccctgcccaccaccccagccccccagccccccaccagcagcacccccagcacccccttcagtgacctgctgatgtgcccccagcaccggcccctggtgtttggcctgagctgcatcctgcagaccatcctgctgtgctgccccagcgccctggtgtggcactacagcctgacagacagccgcatcaagacaggcagccccctggaccacctgcccatcgcccccagcaacctgcccatgcctgagggcaacagcgccttcacccagcaggtgcgggccaagctgcgggagattgagcagcagatcaaggagcggggccaggccgtggaggtgcgctggagctttgacaagtgccaggaggccacagctggcttcaccatcggccgggtgctgcacaccctggaggtgctggacagccacagctttgagaggagtgacttcagcaacagcctggacagcctgtgcaaccgcatcttcggcctgggccccagcaaggatggccacgagatcagcagtgatgatgatgctgtggtgtccctgctgtgtgagtgggccgtgtcctgcaagaggagcggccgccaccgggccatggtggtggccaagctgctggagaagaggcaggccgagattgaggccgagcgctgtggggagagcgaggccgcagatgagaagggcagcatcgccagcggcagcctgagcgcccccagcgcccccatcttccaggatgtgctgctgcagttcctggacacccaggcccccatgctgacagaccccaggtctgagagcgagcgggtggagttcttcaacctggtgctgctcttctgtgagctgatcagacatgatgtgttcagccacaacatgtacacctgcaccctcatcagcagaggagacctggccttcggggcccctggccccaggcctcccagcccctttgatgatcctgcagatgatcctgagcacaaggaggccgagggcagcagcagcagcaagctggaggaccccggcctgtctgagagcatggacatcgaccccagcagctctgtgctgtttgaggacatggagaagccagacttcagcctcttcagccccaccatgccctgtgagggcaagggcagccccagccctgagaagccagatgtggagaaggaggtgaagcccccacccaaggagaagattgagggcaccctgggcgtgctgtatgaccagcccaggcatgtgcagtatgccacccacttccccatcccccaggaggagagctgcagccatgagtgcaaccagaggctggtggtgctgtttggagtgggcaagcagagagatgatgcccggcatgccatcaagaagatcaccaaggacatcctgaaggtgctgaacagaaaaggaacagctgagacagaccagctggcccccatcgtgcccctgaaccctggggacctgaccttcctgggcggggaggatggccagaagagaagaagaaacagacctgaggccttccccacagctgaggacatctttgccaagttccagcacctgagccactatgaccagcaccaggtgacagcccaggtgtccagaaatgtgctggagcagatcaccagctttgccctgggcatgagctaccacctgcccctggtgcagcacgtgcagttcatctttgacctgatggagtacagcctgagcatcagcggcctgattgactttgccatccagctgctgaatgagctgtctgtggtggaggccgagctgctgctgaagagcagtgacctggtgggcagctacaccaccagcctgtgcctgtgcatcgtggccgtgctgcggcactaccacgcctgcctgatcctgaaccaggaccagatggcccaggtgtttgagggcctgtgtggggtggtgaagcacggcatgaacagaagtgatggcagcagcgctgagcgctgcatcctggcctacctgtatgacctgtacaccagctgcagccacctgaagaacaagtttggagagctgttcagtgacttctgcagcaaggtgaagaacaccatctactgcaatgtggagcccagcgagagcaacatgcgctgggcccctgagttcatgattgacaccctggagaacccagctgcccacaccttcacctacacaggcctgggcaagagcctgtctgaaaatcctgccaaccgctacagctttgtgtgcaatgccctgatgcacgtgtgtgtgggccaccacgaccctgacagagtgaatgacatcgccatcctgtgtgccgagctgaccggctactgcaagagcctgtctgctgagtggctgggcgtgctgaaggccctgtgctgcagcagcaacaacggcacctgtggcttcaatgacctgctgtgcaatgtggatgtgtctgacctgtccttccatgacagcctggccacctttgtggccatcctgattgcccggcagtgcctgctgctggaggacctgatccgctgtgccgccatccccagcctgctgaatgctgcctgcagcgagcaggacagcgagcccggggcccggctgacctgccgcatcctgctgcacctgttcaagaccccccagctgaacccctgccagagtgatggcaacaagcccaccgtgggcatccgcagcagctgtgacagacacctgctggccgccagccagaacagaattgtggatggagctgtgtttgctgtgctgaaggctgtgtttgtgctgggagatgctgagctgaagggcagcggcttcaccgtgactggaggaacagaggagctgcctgaggaggagggcggcggcggcagcggcggccggcggcagggcggcaggaacatctctgtggagacagccagcctggatgtgtatgccaagtatgtgctgcggagcatctgccagcaggagtgggtgggggagcgctgcctgaagagcctgtgtgaggacagcaatgacctgcaggaccctgtgctgagcagcgcccaggcccagaggctgatgcagctgatctgctacccccaccggctgctggacaatgaagatggagagaacccccagaggcagaggatcaagaggatcctgcagaacctggaccagtggaccatgaggcagagcagcctggagctgcagctgatgatcaagcagacccccaacaatgagatgaacagcctgctggagaacatcgccaaggccaccatcgaggtgttccagcagagcgctgagaccggcagcagcagcggcagcacagccagcaacatgcccagcagcagcaagaccaagcctgtgctgagcagcctggagaggtctggagtgtggctggtggcccccctcatcgccaagctgcccacctctgtgcagggccacgtgctgaaggctgctggggaggagctggagaagggccagcacctgggcagcagcagcaggaaggagcgggaccggcagaagcagaagtccatgagcctgctgagccagcagcccttcctgagcctggtgctgacctgcctgaagggccaggatgagcagcgggagggcctgctgaccagcctgtacagccaggtgcaccagatcgtgaacaactggagagatgaccagtacctggatgactgcaagcccaagcagctgatgcatgaggccctgaagctgcggctgaacctggtgggcggcatgtttgacacagtgcagaggagcacccagcagaccacagagtgggccatgctgctgctggagatcatcatctctggaacagtggacatgcagagcaacaatgagctgttcaccaccgtgctggacatgctgtctgtgctgatcaatggcaccctggccgctgacatgagcagcatcagccagggctccatggaggagaacaagagggcctacatgaacctggccaagaagctgcagaaggagctgggggagcggcagagcgacagcctggagaaggtgcggcagctgctgcccctgcccaagcagaccagagatgtgatcacctgtgagccccagggcagcctgattgacaccaagggcaacaagattgctggctttgacagcatcttcaagaaggagggcctgcaggtgtccaccaagcagaagatcagcccctgggacctgtttgagggcctgaagcccagcgcccccctgtcctggggctggtttggaacagtgcgggtggaccggcgggtggcccggggggaggagcagcagaggctgctgctgtaccacacccacctgcggccccggccccgggcctactacctggagcccctgcccctgcccccagaagatgaggagcccccagcccccaccctgctggagcctgagaagaaggcccctgagccccccaagacagacaagccaggggccgccccacccagcacagaggagaggaagaagaagagcaccaagggcaagaagaggagccagcctgccaccaagacagaggactatggcatgggccctggccgcagcggcccctacggcgtgacagtgcccccagacctgctgcaccaccccaaccctggcagcatcacccacctgaactaccggcagggcagcatcggcctgtacacccagaaccagcccctgcctgctgggggcccccgggtggacccctacagacctgtgcggctgcccatgcagaagctgcccacccggcccacctacccaggagtgctgcccaccaccatgactggagtgatgggcctggagcccagcagctacaagacctctgtgtaccggcagcagcagcctgctgtgccccagggccagaggctgcggcagcagctgcagcagagccagggcatgctgggccagagctctgtgcaccagatgacccccagcagcagctatggcctgcagaccagccagctgagccccagcagcctgcagggctacaccccctacgtgagccacgtgggcctgcagcagcacacaggccctgctgaccccaccaggcacctgcagcagaggcccagcggctacgtgcaccagcaggcccccacctacggccacggcctgaccagcacccagcgcttcagccaccagaccctgcagcagacccccatgatcagcaccatgacccccatgtctgcccagggcgtgcaggccggcgtgcgcagcacagccatcctgcctgagcagcagcagcagcagcagcagcagcagcagcagcagcagcagcagcagcagcagcagcagcagcagcagcagcagcagtaccacatccggcagcagcagcagcagcagatcctgcggcagcagcagcagcagcagcagcagcagcagcagcagcagcagcagcagcagcagcagcagcagcagcagcagcagcagcaccagcagcagcagcagcagcaggccgccccaccccagccccagccccagagccagccccagttccagaggcagggcctgcagcagacccagcagcagcagcagacagctgccctggtgcggcagctgcagcagcagctgagcaacacccagccccagcccagcaccaacatcttcggccgctactag

SEQ ID NO: 159000 - DNA, 2778 bp, synthetic construct
  misc_feature 1..2778: note = Description of Artificial Sequence: Synthetic coding sequence
  source 1..2778: mol_type = other DNA
gggggcagcggcggccggcggcagggcggcaggaacatctctgtggagacagccagcctggatgtgtatgccaagtatgtgctgcggagcatctgccagcaggagtgggtgggggagcgctgcctgaagagcctgtgtgaggacagcaatgacctgcaggaccctgtgctgagcagcgcccaggcccagaggctgatgcagctgatctgctacccccaccggctgctggacaatgaagatggagagaacccccagaggcagaggatcaagaggatcctgcagaacctggaccagtggaccatgaggcagagcagcctggagctgcagctgatgatcaagcagacccccaacaatgagatgaacagcctgctggagaacatcgccaaggccaccatcgaggtgttccagcagagcgctgagaccggcagcagcagcggcagcacagccagcaacatgcccagcagcagcaagaccaagcctgtgctgagcagcctggagaggtctggagtgtggctggtggcccccctgattgccaagctgcccacctctgtgcagggccacgtgctgaaggccgccggggaggagctggagaagggccagcacctgggcagcagcagcaggaaggagcgggaccggcagaagcagaagtccatgagcctgctgagccagcagcccttcctgagcctggtgctgacctgcctgaagggccaggatgagcagcgggagggcctgctgaccagcctgtacagccaggtgcaccagatcgtgaacaactggagagatgaccagtacctggatgactgcaagcccaagcagctgatgcatgaggccctgaagctgcggctgaacctggtgggcggcatgtttgacacagtgcagaggagcacccagcagaccacagagtgggccatgctgctgctggagatcatcatcagcggcaccgtggacatgcagagcaacaatgaactcttcaccaccgtgctggacatgctgtctgtgctgatcaatggcaccctggccgctgacatgagcagcatcagccagggctccatggaggagaacaagagggcctacatgaacctggccaagaagctgcagaaggagctgggggagcggcagagcgacagcctggagaaggtgcggcagctgctgcccctgcccaagcagaccagagatgtgatcacctgtgagccccagggcagcctgattgacaccaagggcaacaagattgctggctttgacagcatcttcaagaaggagggcctgcaggtgtccaccaagcagaagatcagcccctgggacctgtttgagggcctgaagcccagcgcccccctgtcctggggctggtttggcaccgtgcgggtggacagaagagtggcccggggggaggagcagcagaggctgctgctgtaccacacccacctgcggccccggccccgggcctactacctggagcccctgcccctgcccccagaagatgaggagcccccagcccccaccctgctggagcctgagaagaaggcccctgagccccccaagacagacaagccaggagctgccccacccagcacagaggagaggaagaagaagagcaccaagggcaagaagaggagccagcctgccaccaagacagaagattatggcatgggccctggccgcagcggcccctatggagtgacagtgcccccagacctgctgcaccaccccaaccctggcagcatcacccacctgaactaccggcagggcagcatcggcctgtacacccagaaccagcccctgcctgctgggggcccccgggtggacccctacagacctgtgcggctgcccatgcagaagctgcccacccggcccacctacccaggagtgctgcccaccaccatgactggagtgatgggcctggagcccagcagctacaagacctctgtgtaccggcagcagcagcctgctgtgccccagggccagaggctgcggcagcagctgcaggccaagatccagagccagggcatgctgggccagagctctgtgcaccagatgacccccagcagcagctatggcctgcagaccagccagggctacaccccctacgtgagccacgtgggcctgcagcagcacactggacctgctggcaccatggtgcccccatcctacagcagccagccctaccagagcacccaccccagcaccaaccccaccctggtggaccccaccaggcacctgcagcagaggcccagcggctacgtgcaccagcaggcccccacctacggccacggcctgaccagcacccagcgcttcagccaccagaccctgcagcagacccccatgatcagcaccatgacccccatgtctgcccagggcgtgcaggccggcgtgcgcagcacagccatcctgcctgagcagcagcagcagcagcagcagcagcagcagcagcagcagcagcagcagcagcagcagcagcagcagcagcagcagcagtaccacatccggcagcagcagcagcagcagatcctgcggcagcagcagcagcagcagcagcagcagcagcagcagcagcagcagcagcagcagcagcagcagcagcagcagcagcagcaccagcagcagcagcagcagcaggccgccccaccccagccccagccccagagccagccccagttccagaggcagggcctgcagcagacccagcagcagcagcagacagctgccctggtgcggcagctgcagcagcagctgagcaacacccagccccagcccagcaccaacatcttcggccgctactag

SEQ ID NO: 159001 - DNA, 756 bp, synthetic construct
  misc_feature 1..756: note = Description of Artificial Sequence: Synthetic coding sequence
  source 1..756: mol_type = other DNA
tgagaaaggaagaagaagagcaccaagggcaagaagaggagccagcctgccaccaagacagaagattatggcatgggccctggccgcagcggcccctatggagtgacagtgcccccagacctgctgcaccaccccaaccctggcagcatcacccacctgaactaccggcagggcagcatcggcctgtacacccagaaccagcccctgcctgctgggggcccccgggtggacccctacagacctgtgcggctgcccatgcagaagctgcccacccggcccacctacccaggagtgctgcccaccaccatgactggagtgatgggcctggagcccagcagctacaagacctctgtgtaccggcagcagcagcctgctgtgccccagggccagaggctgcggcagcagctgcagcagagccagggcatgctgggccagagctctgtgcaccagatgacccccagcagcagctatggcctgcagaccagccagggctacaccccctacgtgagccacgtgggcctgcagcagcacacaggccctgctgaccccaccaggcacctgcagcagaggcccagcggctacgtgcaccagcaggcccccacctacggccacggcctgaccagcacccagcgcttcagccaccagaccctgcagcagacccccatgatcagcaccatgacccccatgtctgcccagggcgtgcaggccggcgtgcgcagcacagccatcctgcctgagcagcagcagcagcagtag

SEQ ID NO: 159002 - DNA, 6003 bp, synthetic construct
  misc_feature 1..6003: note = Description of Artificial Sequence: Synthetic coding sequence
  source 1..6003: mol_type = other DNA
atggccgccttcggcatcctgtcctatgagcaccggcccctgaagaggccccggctgggccccccagatgtgtacccccaggaccccaagcagaaggaggatgagctgacagccctgaatgtgaagcagggcttcaacaaccagcctgctgtgtctggagatgagcacggcagcgccaagaatgtgtccttcaacccagccaagatcagcagcaacttcagcagcatcatcgccgagaagctgcgctgcaacaccctgcctgacacaggaagaaggaagccccaggtgaaccagaaggacaacttctggctggtgacagcccggagccagagcgccatcaacacctggttcacagacctggccggcaccaagcccctgacccagctggccaagaaggtgcccatcttcagcaagaaggaggaggtgtttggctacctggccaagtacacagtgcctgtgatgagagctgcctggctgatcaagatgacctgtgcctactatgctgccatcagcgagaccaaggtgaagaagagacatgtggaccccttcatggagtggacccagatcatcaccaagtacctgtgggagcagctgcagaagatggccgagtactacagacctggccctgctggcagcggcggctgcggcagcaccatcggccccctgccccatgatgtggaggtggccatccggcagtgggactacacagagaagctggccatgttcatgttccaggacggcatgctggacagacatgagttcctgacctgggtgctggagtgctttgagaagatccggcctggagaagatgagctgctgaagctgctgctgcccctgctgctgcgctacagcggggagtttgtgcagagcgcctacctgagccggcggctggcctacttctgcacccggcggctggccctgcagctggatggagtgagcagccacagcagccacgtgatcagcgcccagagcaccagcaccctgcccaccaccccagccccccagccccccaccagcagcacccccagcacccccttcagtgacctgctgatgtgcccccagcaccggcccctggtgtttggcctgagctgcatcctgcagaccatcctgctgtgctgccccagcgccctggtgtggcactacagcctgacagacagccgcatcaagacaggcagccccctggaccacctgcccatcgcccccagcaacctgcccatgcctgagggcaacagcgccttcacccagcaggtgcgggccaagctgcgggagattgagcagcagatcaaggagcggggccaggccgtggaggtgcgctggagctttgacaagtgccaggaggccacagctggcttcaccatcggccgggtgctgcacaccctggaggtgctggacagccacagctttgagaggagtgacttcagcaacagcctggacagcctgtgcaaccgcatcttcggcctgggccccagcaaggatggccacgagatcagcagtgatgatgatgctgtggtgtccctgctgtgtgagtgggccgtgtcctgcaagaggagcggccgccaccgggccatggtggtggccaagctgctggagaagaggcaggccgagattgaggccgagcgctgtggggagagcgaggccgcagatgagaagggcagcatcgccagcggcagcctgagcgcccccagcgcccccatcttccaggatgtgctgctgcagttcctggacacccaggcccccatgctgacagaccccaggtctgagagcgagcgggtggagttcttcaacctggtgctgctcttctgtgagctgatcagacatgatgtgttcagccacaacatgtacacctgcaccctcatcagcagaggagacctggccttcggggcccctggccccaggcctcccagcccctttgatgatcctgcagatgatcctgagcacaaggaggccgagggcagcagcagcagcaagctggaggaccccggcctgtctgagagcatggacatcgaccccagcagctctgtgctgtttgaggacatggagaagccagacttcagcctcttcagccccaccatgccctgtgagggcaagggcagccccagccctgagaagccagatgtggagaaggaggtgaagcccccacccaaggagaagattgagggcaccctgggcgtgctgtatgaccagcccaggcatgtgcagtatgccacccacttccccatcccccaggaggagagctgcagccatgagtgcaaccagaggctggtggtgctgtttggagtgggcaagcagagagatgatgcccggcatgccatcaagaagatcaccaaggacatcctgaaggtgctgaacagaaaaggaacagctgagacagaccagctggcccccatcgtgcccctgaaccctggggacctgaccttcctgggcggggaggatggccagaagagaagaagaaacagacctgaggccttccccacagctgaggacatctttgccaagttccagcacctgagccactatgaccagcaccaggtgacagcccaggtgtccagaaatgtgctggagcagatcaccagctttgccctgggcatgagctaccacctgcccctggtgcagcacgtgcagttcatctttgacctgatggagtacagcctgagcatcagcggcctgattgactttgccatccagctgctgaatgagctgtctgtggtggaggccgagctgctgctgaagagcagtgacctggtgggcagctacaccaccagcctgtgcctgtgcatcgtggccgtgctgcggcactaccacgcctgcctgatcctgaaccaggaccagatggcccaggtgtttgagggcctgtgtggggtggtgaagcacggcatgaacagaagtgatggcagcagcgctgagcgctgcatcctggcctacctgtatgacctgtacaccagctgcagccacctgaagaacaagtttggagagctgttcagtgacttctgcagcaaggtgaagaacaccatctactgcaatgtggagcccagcgagagcaacatgcgctgggcccctgagttcatgattgacaccctggagaacccagctgcccacaccttcacctacacaggcctgggcaagagcctgtctgaaaatcctgccaaccgctacagctttgtgtgcaatgccctgatgcacgtgtgtgtgggccaccacgaccctgacagagtgaatgacatcgccatcctgtgtgccgagctgaccggctactgcaagagcctgtctgctgagtggctgggcgtgctgaaggccctgtgctgcagcagcaacaacggcacctgtggcttcaatgacctgctgtgcaatgtggatgtgtctgacctgtccttccatgacagcctggccacctttgtggccatcctgattgcccggcagtgcctgctgctggaggacctgatccgctgtgccgccatccccagcctgctgaatgctgcctgcagcgagcaggacagcgagcccggggcccggctgacctgccgcatcctgctgcacctgttcaagaccccccagctgaacccctgccagagtgatggcaacaagcccaccgtgggcatccgcagcagctgtgacagacacctgctggccgccagccagaacagaattgtggatggagctgtgtttgctgtgctgaaggctgtgtttgtgctgggagatgctgagctgaagggcagcggcttcaccgtgactggaggaacagaggagctgcctgaggaggagggcggcggcggcagcggcggccggcggcagggcggcaggaacatctctgtggagacagccagcctggatgtgtatgccaagtatgtgctgcggagcatctgccagcaggagtgggtgggggagcgctgcctgaagagcctgtgtgaggacagcaatgacctgcaggaccctgtgctgagcagcgcccaggcccagaggctgatgcagctgatctgctacccccaccggctgctggacaatgaagatggagagaacccccagaggcagaggatcaagaggatcctgcagaacctggaccagtggaccatgaggcagagcagcctggagctgcagctgatgatcaagcagacccccaacaatgagatgaacagcctgctggagaacatcgccaaggccaccatcgaggtgttccagcagagcgctgagaccggcagcagcagcggcagcacagccagcaacatgcccagcagcagcaagaccaagcctgtgctgagcagcctggagaggtctggagtgtggctggtggcccccctcatcgccaagctgcccacctctgtgcagggccacgtgctgaaggctgctggggaggagctggagaagggccagcacctgggcagcagcagcaggaaggagcgggaccggcagaagcagaagtccatgagcctgctgagccagcagcccttcctgagcctggtgctgacctgcctgaagggccaggatgagcagcgggagggcctgctgaccagcctgtacagccaggtgcaccagatcgtgaacaactggagagatgaccagtacctggatgactgcaagcccaagcagctgatgcatgaggccctgaagctgcggctgaacctggtgggcggcatgtttgacacagtgcagaggagcacccagcagaccacagagtgggccatgctgctgctggagatcatcatctctggaacagtggacatgcagagcaacaatgagctgttcaccaccgtgctggacatgctgtctgtgctgatcaatggcaccctggccgctgacatgagcagcatcagccagggctccatggaggagaacaagagggcctacatgaacctggccaagaagctgcagaaggagctgggggagcggcagagcgacagcctggagaaggtgcggcagctgctgcccctgcccaagcagaccagagatgtgatcacctgtgagccccagggcagcctgattgacaccaagggcaacaagattgctggctttgacagcatcttcaagaaggagggcctgcaggtgtccaccaagcagaagatcagcccctgggacctgtttgagggcctgaagcccagcgcccccctgtcctggggctggtttggaacagtgcgggtggaccggcgggtggcccggggggaggagcagcagaggctgctgctgtaccacacccacctgcggccccggccccgggcctactacctggagcccctgcccctgcccccagaagatgaggagcccccagcccccaccctgctggagcctgagaagaaggcccctgagccccccaagacagacaagccaggggccgccccacccagcacagaggagaggaagaagaagagcaccaagggcaagaagaggagccagcctgccaccaagacagaggactatggcatgggccctggccgcagcggcccctacggcgtgacagtgcccccagacctgctgcaccaccccaaccctggcagcatcacccacctgaactaccggcagggcagcatcggcctgtacacccagaaccagcccctgcctgctgggggcccccgggtggacccctacagacctgtgcggctgcccatgcagaagctgcccacccggcccacctacccaggagtgctgcccaccaccatgactggagtgatgggcctggagcccagcagctacaagacctctgtgtaccggcagcagcagcctgctgtgccccagggccagaggctgcggcagcagctgcagcagagccagggcatgctgggccagagctctgtgcaccagatgacccccagcagcagctatggcctgcagaccagccagggctacaccccctacgtgagccacgtgggcctgcagcagcacactggacctgctgaccccaccaggcacctgcagcagaggccttctggctacgtgcaccagcaggcccccacctacggccacggcctgaccagcacccagagcttccacaccaggcactgcagccgccacccctag

SEQ ID NO: 159003 - DNA, 2271 bp, synthetic construct
  misc_feature 1..2271: note = Description of Artificial Sequence: Synthetic coding sequence
  source 1..2271: mol_type = other DNA
atggccgccttcggcctgctgtcctatgagcagaggcccctgaagaggccccggctgggccccccagatgtgtacccccaggaccccaagcagaaggaggatgagctgacagctgtgaatgtgaagcagggcttcaacaaccagcctgccttcaccggagatgagcacggcagcgccaggaacatcgtcatcaaccccagcaagattggagcctacttcagcagcatcctggccgagaagctgaagctgaacaccttccaggacaccgggaagaagaagccccaggtgaatgccaaggacaactactggctggtgacagcccggagccagagcgccatccacagctggttcagtgacctggccggcaacaagcccctgagcatcctggccaagaaggtgcccatcctgagcaagaaggaggatgtgtttgcctacctggccaagtacagcgtgcccatggtgcgggccacctggctgatcaagatgacctgtgcctactacagcgccatcagcgaggccaagatcaagaagaggcaggccccagaccccaacctggagtggacccagatcagcacccgctacctgcgggagcagctggccaagatcagtgacttctaccacatggccagcagcactggagatggccctgtgcctgtgcccccagaggtggagcaggccatgaagcagtgggagtacaatgagaagctggccttccacatgttccaggagggcatgctggagaagcatgagtacctgacctggatcctggatgtgctggagaagatccggcccatggatgatgacctgctgaagctgctgctgcccctgatgctgcagtacagtgatgaatttgtgcagagcgcctacctgagccggcggctggcctacttctgtgcccggcggctgagcctgctgctgagtgacagccccaacctgctggccgcccacagcccccacatgatgattggccccaacaacagcagcattggagcccccagccctggccccccaggccctggcatgagccctgtgcagctggccttcagtgacttcctgagctgtgcccagcacggccccctggtgtatggcctgagctgcatgctgcagacagtgaccctgtgctgccccagcgccctggtgtggaactacagcaccaatgaaaacaagagcgccaaccctggcagccccctggacctgctgcaggtggcccccagcagcctgcccatgcctgggggcaacacagccttcaaccagcaggtgcgggcccgcatctatgaggtggagcagcagatcaagcagaggggccgggctgtggaggtgcgctggagctttgacaagtgccaggagagcacagctggggtgaccatcagccgggtgctgcacaccctggaggtgctggacagacactgctttgacagaacagacagcagcaacagcatggagaccctgtaccacaagatcttctgggccaaccagaacaaggacaaccaggaggtggccccaaatgatgaagctgtggtgaccctgctgtgtgagtgggccgtgtcctgcaagaggtctgggaagcaccgggccatggctgtggccaagctgctggagaagaggcaggccgagattgaagctgagcgctgtggggagagcgaggtgctggatgagaaggagagcatcagcagcagcagcctggccggcagcagcctgcctgtgttccagaatgtgctgctgcgcttcctggacacccaggcccccagcctgagtgaccccaacagtgaatgtgagaaggtggagtttgtgaacctggtgctgctcttctgtgagttcatcagacatgatgtgttcagccatgatgcctacatgtgcaccctcatcagcagaggagacctgtctgtgacagccagcacccggcccaggagccctgtgggagaaaatgctgatgagcactacagcaaggaccatgatgtgaagatggaggagcagagcatcatggcccacatgggcatcgacagcggcaccaccaacatctttgatgaggtggacaagagtgacttcaagacagactttggcagcgagttccccatcttcagccccatgcctggagagagctgtgaaaatgccaacaccagcctgggccgcaggatgtctgtgaactgtgagaagctggtgaagcgggagaagccccgggagctgatcttccccagcaactatgacctgctgcggcacctgcagtatgccacccacttccccatccccctggtgagccactgcttctcctag

SEQ ID NO: 159004 - DNA, 2166 bp, synthetic construct
  misc_feature 1..2166: note = Description of Artificial Sequence: Synthetic coding sequence
  source 1..2166: mol_type = other DNA
atggccgccttcggcctgctgtcctatgagcagaggcccctgaagaggccccggctgggccccccagatgtgtacccccaggaccccaagcagaaggaggatgagctgacagctgtgaatgtgaagcagggcttcaacaaccagcctgccttcaccggagatgagcacggcagcgccaggaacatcgtcatcaaccccagcaagattggagcctacttcagcagcatcctggccgagaagctgaagctgaacaccttccaggacaccgggaagaagaagccccaggtgaatgccaaggacaactactggctggtgacagcccggagccagagcgccatccacagctggttcagtgacctggccggcaacaagcccctgagcatcctggccaagaaggtgcccatcctgagcaagaaggaggatgtgtttgcctacctggccaagtacagcgtgcccatggtgcgggccacctggctgatcaagatgacctgtgcctactacagcgccatcagcgaggccaagatcaagaagaggcaggccccagaccccaacctggagtggacccagatcagcacccgctacctgcgggagcagctggccaagatcagtgacttctaccacatggccagcagcactggagatggccctgtgcctgtgcccccagaggtggagcaggccatgaagcagtgggagtacaatgagaagctggccttccacatgttccaggagggcatgctggagaagcatgagtacctgacctggatcctggatgtgctggagaagatccggcccatggatgatgacctgctgaagctgctgctgcccctgatgctgcagtacagtgatgaatttgtgcagagcgcctacctgagccggcggctggcctacttctgtgcccggcggctgagcctgctgctgagtgacagccccaacctgctggccgcccacagcccccacatgatgattggccccaacaacagcagcattggagcccccagccctggccccccaggccctggcatgagccctgtgcagctggccttcagtgacttcctgagctgtgcccagcacggccccctggtgtatggcctgagctgcatgctgcagacagtgaccctgtgctgccccagcgccctggtgtggaactacagcaccaatgaaaacaagagcgccaaccctggcagccccctggacctgctgcaggtggcccccagcagcctgcccatgcctgggggcaacacagccttcaaccagcaggtgcgggcccgcatctatgaggtggagcagcagatcaagcagaggggccgggctgtggaggtgcgctggagctttgacaagtgccaggagagcacagctggggtgaccatcagccgggtgctgcacaccctggaggtgctggacagacactgctttgacagaacagacagcagcaacagcatggagaccctgtaccacaagatcttctgggccaaccagaacaaggacaaccaggaggtggccccaaatgatgaagctgtggtgaccctgctgtgtgagtgggccgtgtcctgcaagaggtctgggaagcaccgggccatggctgtggccaagctgctggagaagaggcaggccgagattgaagctgagcgctgtggggagagcgaggtgctggatgagaaggagagcatcagcagcagcagcctggccggcagcagcctgcctgtgttccagaatgtgctgctgcgcttcctggacacccaggcccccagcctgagtgaccccaacagtgaatgtgagaaggtggagtttgtgaacctggtgctgctcttctgtgagttcatcagacatgatgtgttcagccatgatgcctacatgtgcaccctcatcagcagaggagacctgtctgtgacagccagcacccggcccaggagccctgtgggagaaaatgctgatgagcactacagcaaggaccatgatgtgaagatggagatcttcagccccatgcctggagagagctgtgaaaatgccaacaccagcctgggccgcaggatgtctgtgaactgtgagaagctggtgaagcgggagaagccccgggagctgatcttccccagcaactatgacctgctgcggcacctgcagtatgccacccacttccccatccccctggtgagccactgcttctcctag

SEQ ID NO: 159005 - DNA, 6438 bp, synthetic construct
  misc_feature 1..6438: note = Description of Artificial Sequence: Synthetic coding sequence
  source 1..6438: mol_type = other DNA
atggccgccttcggcctgctgtcctatgagcagaggcccctgaagaggccccggctgggccccccagatgtgtacccccaggaccccaagcagaaggaggatgagctgacagctgtgaatgtgaagcagggcttcaacaaccagcctgccttcaccggagatgagcacggcagcgccaggaacatcgtcatcaaccccagcaagattggagcctacttcagcagcatcctggccgagaagctgaagctgaacaccttccaggacaccgggaagaagaagccccaggtgaatgccaaggacaactactggctggtgacagcccggagccagagcgccatccacagctggttcagtgacctggccggcaacaagcccctgagcatcctggccaagaaggtgcccatcctgagcaagaaggaggatgtgtttgcctacctggccaagtacagcgtgcccatggtgcgggccacctggctgatcaagatgacctgtgcctactacagcgccatcagcgaggccaagatcaagaagaggcaggccccagaccccaacctggagtggacccagatcagcacccgctacctgcgggagcagctggccaagatcagtgacttctaccacatggccagcagcactggagatggccctgtgcctgtgcccccagaggtggagcaggccatgaagcagtgggagtacaatgagaagctggccttccacatgttccaggagggcatgctggagaagcatgagtacctgacctggatcctggatgtgctggagaagatccggcccatggatgatgacctgctgaagctgctgctgcccctgatgctgcagtacagtgatgaatttgtgcagagcgcctacctgagccggcggctggcctacttctgtgcccggcggctgagcctgctgctgagtgacagccccaacctgctggccgcccacagcccccacatgatgattggccccaacaacagcagcattggagcccccagccctggccccccaggccctggcatgagccctgtgcagctggccttcagtgacttcctgagctgtgcccagcacggccccctggtgtatggcctgagctgcatgctgcagacagtgaccctgtgctgccccagcgccctggtgtggaactacagcaccaatgaaaacaagagcgccaaccctggcagccccctggacctgctgcaggtggcccccagcagcctgcccatgcctgggggcaacacagccttcaaccagcaggtgcgggcccgcatctatgaggtggagcagcagatcaagcagaggggccgggctgtggaggtgcgctggagctttgacaagtgccaggagagcacagctggggtgaccatcagccgggtgctgcacaccctggaggtgctggacagacactgctttgacagaacagacagcagcaacagcatggagaccctgtaccacaagatcttctgggccaaccagaacaaggacaaccaggaggtggccccaaatgatgaagctgtggtgaccctgctgtgtgagtgggccgtgtcctgcaagaggtctgggaagcaccgggccatggctgtggccaagctgctggagaagaggcaggccgagattgaagctgagcgctgtggggagagcgaggtgctggatgagaaggagagcatcagcagcagcagcctggccggcagcagcctgcctgtgttccagaatgtgctgctgcgcttcctggacacccaggcccccagcctgagtgaccccaacagtgaatgtgagaaggtggagtttgtgaacctggtgctgctcttctgtgagttcatcagacatgatgtgttcagccatgatgcctacatgtgcaccctcatcagcagaggagacctgtctgtgacagccagcacccggcccaggagccctgtgggagaaaatgctgatgagcactacagcaaggaccatgatgtgaagatggagatcttcagccccatgcctggagagagctgtgaaaatgccaacaccagcctgggccgcaggatgtctgtgaactgtgagaagctggtgaagcgggagaagccccgggagctgatcttccccagcaactatgacctgctgcggcacctgcagtatgccacccacttccccatccccctggatgagagcagcagccatgagtgcaaccagaggaccatcctgctgtatggagtgggcaaggagagagatgaggcccggcaccagctgaagaagatcaccaaggacatcctgaagatcctgaacaagaagagcaccacagaaacaggagtgggagatgagggccagaaggccaggaagaacaagcaggagaccttccccaccctggagaccgtcttcaccaagctgcagctgctgagctactttgaccagcaccaggtgaccagccagatcagcaacaacgtgctggagcagatcaccagctttgccagcggcaccagctaccacctgcccctggcccaccacatccagctgatctttgacctgatggagcccgccctgaacatcaatggcctgattgactttgccatccagctgctgaatgagctgtctgtggtggaggccgagctgctgctgaagagcagcagcctggccggcagctacaccaccggcctgtgtgtgtgcatcgtggccgtgctgcggcgctaccacagctgcctgatcctgaacccagaccagacagcccaggtgtttgagggcctgtgtggggtggtgaagcacgtggtgaaccccagcgagtgcagcagccctgagcgctgcatcctggcctacctgtatgacctgtatgtgtcctgcagccacctgcggagcaagtttggagacctcttcagcagcgcctgcagcaaggtgaagcagaccatctacaacaacgtgatgcctgccaacagcaacctgcgctgggaccctgacttcatgatggacttcatcgagaaccccagcgcccggagcatcaactacagcatgctgggcaagatcctgagtgacaatgctgccaaccgctacagctttgtgtgcaacaccctgatgaatgtgtgcatgggccaccaggatgctggccgcatcaatgacatcgccaacttcagcagcgagctgacagcctgctgcaccgtgctgagcagcgagtggctgggcgtgctgaaggccctgtgctgcagcagcaaccacgtgtggggcttcaatgatgtgctgtgcaccgtggatgtgtctgacctgtccttccatgacagcctggccaccttcatcgccatcctgattgcccggcagtgcttcagcctggaggatgtggtgcagcacgtggccctgcccagcctgctggccgccgcctgtggagatgctgatgctgagcccggggccaggatgacctgccgcctgctgctgcacctgttccgggccccccaggcctgcttcctgccccaggccaccgggaagcccttccctggcatccgcagcagctgtgacagacacctgctggccgccgcccacaacagcattgaggtgggcgctgtgtttgctgtgctgaaggccatcatgatgctgggagatgccaagattggcaacaacagcgtgagcagcctgaagaatgatgacttcaccatgaggggcctgcgctgtgatggaaatgctgatgacatctggacagccagccagaaccccaagagctgtgggaagagcatcagcattgaaacagccaacctgcgggagtatgcccgctacgtgctgcggaccatctgccagcaggagtgggtgggggagcactgcctgaaggagcctgagcggctgtgcacagacaaggagctgatcctggaccctgtgctgagcaacatgcaggcccagaagctgctgcagctgatctgctacccccacggcatcaaggaatgtacagaaggagacaacctgcagaggcagcacatcaagaggatcctgcagaacctggagcagtggaccctgcggcagagctggctggagctgcagctgatgatcaagcagtgcctgaaggaccccggcagcggctctgtggccgagatgaacaacctgctggacaacatcgccaaggccaccatcgaggtgttccagcagagcgctgacctgaacaacagcagcaacagcggcatgagcctcttcaaccccaacagcatcggcagcgctgacaccagcagcacccggcagaatggcatcaagaccttcctgagcagcagcgagcggcggggcgtgtggctggtggcccccctcatcgcccggctgcccacctctgtgcagggccgggtgctgaaggctgctggggaggagctggagaagggccagcacctgggcagcagcagcaagaaggagcgggaccggcagaagcagaagtccatgagcctgctgagccagcagcccttcctgagcctggtgctgacctgcctgaagggccaggatgagcagcgggagggcctgctgaccagcctgcagaaccaggtgaaccagatcctgagcaactggagggaggagcgctaccaggatgacatcaaggcccggcagatgatgcatgaggccctgcagctgcggctgaacctggtgggcggcatgtttgacacagtgcagaggagcacccagtggaccacagactgggccctgctgctgctgcagatcatcaccagcggcaccgtggacatgcacaccaacaatgagctgttcaccaccgtgctggacatgctgggcgtgctgatcaatggcaccctggccagtgacctgagcaatgccagccctgggggcagcgaggagaacaagagggcctacatgaacctggtgaagaagctgaagaaggagctgggggacaagaggtctgagagcattgacaaggtgcggcagctgctgcccctgcccaagcagacctgtgatgtgatcacctgtgagcccatgggcagcctgattgacaccaagggcaacaagattgctggctttgacagcattgacaagaagcagggcctgcaggtgtccaccaagcagaaggtgagcccctgggacctgtttgagggccagaagaacccagcccccctgtcctgggcctggtttggaacagtgcgggtggaccggcgggtcatcaagtatgaggagcagcaccacctgctgctgtaccacacccaccccatgcccaagcccaggagctactacctgcagcccctgcccctgcccccagaggaggaggaggaggagcccaccagccctgtgtcccaggagcctgagaggaagtctgctgagctgagtgaccagggcaagaccaccacagatgaggagaagaagaccaagggcaggaagaggaagaccaagagcagcagccgggtggatgagtacccccagagcaacatctacagagtgccccccaactacagccccatcagcagccagatgatgcaccacccccagagcaccctgtggggctacaacctggtgggccagccccagcagcccggcttcttcctgcagaaccagagcctgacccctgggggcagccggctggaccctgctggcagctttgtgcccaccaacaccaagcaggccctgagcaacatgctgcagaggagaagtggggccatgatgcagccccccagcctgcacgccatcaccagccagcagcagctgatccagatgaagctgctgcagcagcagcagcagcagaggctgctgcggcaggcccagacccggcccttccagcagggccagcccggggaccaggccgccctgtttgctgcccaggcccggcccagcccccagctgccccagtacccaggcctgcagcaggcccagaccatgccccagggctacaccatgtatggcacccagatgcccctgcagcagaccagccagcagcaggccggctctgtggtgctgagccccagctacaacagccgggcctacccagctgcccacagcaaccctgtgctgatggagcggctgcggcagatccagcagcagcccagcggctacgtgcagcagcaggccagcccctacctgcagcccctgaccggcagccagaggctgaaccaccaggccctgcagcagagccccctggtgggcggcggcattgatgctgtgctgaccagcgcccaccccaacctgcccagcgtgcccctgccccaggaccccatgaggccccggcagccccaggtgcggcagcagcagaggctgctgcagatgcagcagccccagcagccccagccccagcagcccccccagccccagcagagcagccagagccagagccagaccctgggcctgcaggccatgcagccccagcagcccctcttcccccggcagggcctgcagcagacccagcagcagcagcagacagctgccctggtgcggcagctgcagaagcagctgagcagcaaccagccccagcagggcgtgaccccctacggccaccccagccacttctag

SEQ ID NO: 159006 - DNA, 6522 bp, synthetic construct
  misc_feature 1..6522: note = Description of Artificial Sequence: Synthetic coding sequence
  source 1..6522: mol_type = other DNA
atgtctgccagctttgtgcccaacggggccagcctggaggactgccactgcaacctcttctgcctggccgacctgaccggcatcaagtggaagaagtatgtgtggcagggccccaccagcgcccccatcctcttccctgtgacagaggaggaccccatcctgagcagcttcagccgctgcctgaaggcagatgtgctgggcgtgtggaggcgggaccagaggcctggaagaagagagctgtggatcttctggtggggagaagatcctgtgctgctgaccctcttcaccatgacctaccagaagaagaagatggagtgtggccgcatggacttccccatgaatgctgtgctgtgcttccaggccgtgcacaacctgctggagcgctgcctgatgaacagaaactttgtgcgcatcggcaagtggtttgtgaagccctatgagaaggatgagaagcccatcaacaagtctgagcacctgagctgcagcttcaccttcttcctgcacggggacagcaatgtgtgcacctctgtggagatcaaccagcaccagcctgtgtacctgctgtctgaggagcacatcaccctggcccagcagagcaacagccccttccaggtgatcctgtgccccttcggcctgaatggcaccctgaccggccaggccttcaagatgtctgacagcgccaccaagaagctgattggagagtggaagcagttctaccccatcagctgctgcctgaaggagatgtctgaggagaagcaggaggacatggactgggaggatgacagcctggccgctgtggaggtgctggtggccggcgtgaggatgatctacccagcctgctttgtgctggtgccccagagcgacatccccacccccagccctgtgggcagcacccactgcagcagcagctgcctgggcgtgcaccaggtgcctgccagcacccgggaccctgccatgagctctgtgaccctgaccccacccaccagccctgaggaggtgcagacagtggacccccagagcgtgcagaagtgggtgaagttcagctctgtgtctgatggcttcaacagcgacagcaccagccaccacggcggcaagatccccaggaagctggccaaccacgtggtggacagagtgtggcaggagtgcaacatgaacagagcccagaacaagaggaagtacagcgccagcagcggcggcctgtgtgaggaggccacagctgccaaggtggcctcctgggactttgtggaggccacccagaggaccaactgcagctgcctgcggcacaagaacctgaagagcagaaatgccggccagcagggccaggcccccagcctgggccagcagcagcagatcctgcccaagcacaagaccaatgagaagcaggagaagtctgagaagccccagaagaggcccctgacccccttccaccaccgggtgtctgtgtctgatgatgtgggcatggatgctgacagcgccagccagaggctggtgatcagcgccccagacagccaggtgcgcttcagcaacatccgcaccaatgatgtggccaagaccccccagatgcacggcacagagatggccaacagcccccagcccccacccctgagcccccacccctgtgatgtggtggatgagggcgtgaccaagacccccagcaccccccagagccagcacttctaccagatgcccaccccagaccccctggtgcccagcaagcccatggaggacagaattgacagcctgagccagagcttccccccccagtaccaggaggccgtggagcccaccgtgtatgtgggcacagctgtgaacctggaggaggatgaggccaacatcgcctggaagtactacaagttccccaagaagaaggatgtggagttcctgcccccccagctgcccagcgacaagttcaaggatgatcctgtgggccccttcggccaggagagcgtgacctctgtgacagagctgatggtgcagtgcaagaagcccctgaaggtgtctgatgagctggtgcagcagtaccagatcaagaaccagtgcctgagcgccatcgccagtgatgctgagcaggagcccaagattgacccctatgcctttgtggagggagatgaggagttcctgttcccagacaagaaggaccggcagaacagcgagcgggaggccggcaagaagcacaaggtggaggatggcaccagctctgtgacagtgctgagccatgaagaagatgccatgagcctcttcagccccagcatcaagcaggatgccccccggcccaccagccacgcccggccccccagcaccagcctcatctatgacagcgacctggccgtgtcctacacagacctggacaacctcttcaacagtgatgaagatgagctgaccccaggcagcaagaagagcgccaacggcagtgatgacaaggccagctgcaaggagagcaagacaggcaacctggaccccctgagctgcatcagcacagctgacctgcacaagatgtaccccaccccacccagcctggagcagcacatcatgggcttcagccccatgaacatgaacaacaaggagtatggctccatggacaccaccccaggcggcaccgtgctggagggcaacagcagcagcattggagcccagttcaagattgaggtggatgagggcttctgcagccccaagcccagcgagatcaaggacttctcctatgtgtacaagccagagaactgccagatcctggtgggctgcagcatgtttgcccccctgaagaccctgcccagccagtacctgccccccatcaagctgcctgaggagtgcatctaccggcagagctggacagtgggcaagctggagctgctgagcagcggccccagcatgcccttcatcaaggagggagatggcagcaacatggaccaggagtatggaacagcctacaccccccagacccacaccagctttggcatgccacccagcagcgccccacccagcaacagcggggccggcatcctgcccagccccagcaccccccgcttccccacccccaggacccccaggacccccaggaccccaagaggagctgggggccctgccagcgcccagggctctgtgaagtatgagaacagcgacctgtacagccctgccagcacccccagcacctgccggcccctgaacagcgtggagcccgccaccgtgcccagcatccctgaggcccacagcctgtatgtgaacctgatcctgtctgagagcgtgatgaacctcttcaaggactgcaactttgacagctgctgcatctgtgtgtgcaacatgaacatcaagggagcagatgtgggcgtgtacatcccagaccccacccaggaggcccagtaccgctgcacctgtggcttctctgctgtgatgaacaggaagtttggaaacaacagcggcctcttcctggaggatgagctggacatcatcggcaggaacacagactgtgggaaggaggccgagaagagatttgaggccctgcgggccaccagcgctgagcacgtgaatggaggcctgaaggagagcgagaagctgagtgatgacctgatcctgctgctgcaggaccagtgcaccaacctcttcagcccctttggagctgctgaccaggaccccttccccaagtctggagtcatcagcaactgggtgcgggtggaggagcgggactgctgcaatgactgctacctggccctggagcacggccggcagttcatggacaacatgtctgggggcaaggtggatgaggccctggtgaagagcagctgcctgcacccctggagcaagagaaatgatgtgtccatgcagtgcagccaggacatcctgaggatgctgctgagcctgcagcctgtgctgcaggatgccatccagaagaagaggacagtgcggccctggggcgtgcagggccccctgacctggcagcagttccacaagatggccggccggggcagctatggaacagatgagagccctgagcccctgcccatccccaccttcctgctgggctatgactatgactacctggtgctgagcccctttgccctgccctactgggagcggctgatgctggagccctacggcagccagagggacatcgcctacgtggtgctgtgcccagaaaatgaggccctgctgaatggagccaagagcttcttccgggacctgacagccatctatgagagctgccgcctgggccagcacaggcctgtgtcccggctgctgacagatggcatcatgagggtgggcagcacagccagcaagaagctgtctgagaagctggtggccgagtggttcagccaggccgcagatggcaacaatgaggccttcagcaagctgaagctgtatgcccaggtgtgccgctatgacctgggcccctacctggccagcctgcccctggacagcagcctgctgagccagcccaacctggtggcccccaccagccagagcctcatcaccccaccccagatgaccaacacaggaaatgccaacacccccagcgccaccctggccagcgctgccagcagcaccatgacagtgaccagcggcgtggccatcagcacctctgtggccacagccaacagcaccctgaccacagccagcaccagcagcagcagcagcagcaacctgaacagcggcgtgagcagcaacaagctgcccagcttcccccccttcggctccatgaacagcaatgctgctggctccatgagcacccaggccaacacagtgcagagcggccagctgggcggccagcagaccagcgccctgcagacagctggcatctctggagagagcagcagcctgcccacccagccccacccagatgtgtctgagagcaccatggaccgggacaaggtgggcatccccacagatggagacagccatgctgtgacctaccccccagccatcgtggtgtacatcatcgaccccttcacctatgaaaatacagatgagagcaccaacagcagctctgtgtggaccctgggcctgctgcgctgcttcctggagatggtgcagaccctgcccccccacatcaagagcacagtgtctgtgcagatcatcccctgccagtacctgctgcagcctgtgaagcatgaagatcgggagatctacccccagcacctgaagagcctggccttcagcgccttcacccagtgccggcggcccctgcccaccagcaccaacgtgaagaccctgactggatttggacctggcctggccatggagacagccctgcggagcccagacaggcctgagtgcatccggctgtatgccccacccttcatcctggcccctgtgaaggacaagcagacagagctgggggagacctttggagaggccggccagaagtacaacgtgctgtttgtgggctactgcctgagccatgaccagcgctggatcctggccagctgcacagacctgtatggagagctgctggagacctgcatcatcaacattgatgtgcccaacagagcccggaggaagaagagcagcgccaggaagtttggcctgcagaagctgtgggagtggtgcctgggcctggtgcagatgagcagcctgccctggagggtggtgattggccgcctgggcagaattggacatggagagctgaaggactggagctgcctgctgagcagaagaaacctgcagagcctgagcaagaggctgaaggacatgtgcaggatgtgtggcatctctgctgctgacagccccagcatcctgagcgcctgcctggtggccatggagccccagggcagctttgtgatcatgccagacagcgtgtccactggatctgtgtttggccgcagcaccaccctgaacatgcagaccagccagctgaacaccccccaggacaccagctgcacccacatcctggtgttccccaccagcgcctctgtgcaggtggccagcgccacctacaccacagagaacctggacctggccttcaaccccaacaatgatggagcagatggcatgggcatctttgacctgctggacacaggagatgacctggaccctgacatcatcaacatcctgcctgccagccccaccggcagccctgtgcacagccctggcagccactacccccacggcggagatgctgggaagggccagagcacagaccggctgctgagcacagagccccatgaggaggtgcccaacatcctgcagcagcccctggccctgggctactttgtgtccacagccaaggccggccccctgcctgactggttctggagcgcctgcccccaggcccagtaccagtgccccctcttcctgaaggccagcctgcacctgcacgtgcccagcgtgcagagtgatgagctgctgcacagcaagcacagccaccccctggacagcaaccagaccagtgatgtgctgcgctttgtgctggagcagtacaatgccctgtcctggctgacctgtgaccctgccacccaggacagaagaagctgcctgcccatccactttgtggtgctgaaccagctgtacaacttcatcatgaacatgctgtag

SEQ ID NO: 159007 - DNA, 6525 bp, synthetic construct
  misc_feature 1..6525: note = Description of Artificial Sequence: Synthetic coding sequence
  source 1..6525: mol_type = other DNA
atgtctgccagctttgtgcccaacggggccagcctggaggactgccactgcaacctcttctgcctggccgacctgaccggcatcaagtggaagaagtatgtgtggcagggccccaccagcgcccccatcctcttccctgtgacagaggaggaccccatcctgagcagcttcagccgctgcctgaaggcagatgtgctgggcgtgtggaggcgggaccagaggcctggaagaagagagctgtggatcttctggtggggcgaggaccccagctttgctgacctgatccaccacgacctgtctgaggaggaggatggagtgtgggagaatggcctgtcctatgagtgcaggaccctgctcttcaaggctgtgcacaacctgctggagcgctgcctgatgaacagaaactttgtgagaattggcaagtggtttgtgaagccctatgagaaggatgagaagcccatcaacaagtctgagcacctgagctgcagcttcaccttcttcctgcatggagacagcaatgtgtgcacctctgtggagatcaaccagcaccagcctgtgtacctgctgtctgaggagcacatcaccctggcccagcagagcaacagccccttccaggtgatcctgtgccccttcggcctgaatggcaccctgaccggccaggccttcaagatgtctgattctgccaccaagaagctgattggagagtggaagcagttctaccccatcagctgctgcctgaaggagatgtctgaggagaagcaggaggacatggactgggaggatgacagcctggccgctgtggaggtgctggtggccggcgtgaggatgatctacccagcctgctttgtgctggtgccccagagcgacatccccacccccagccctgtgggcagcacccactgcagcagcagctgcctgggcgtgcaccaggtgcctgccagcacccgggaccctgccatgagctctgtgaccctgaccccacccaccagccctgaggaggtgcagacagtggacccccagagcgtgcagaagtgggtgaagttcagctctgtgtctgatggcttcaacagcgacagcaccagccaccacggcggcaagatccccaggaagctggccaaccacgtggtggacagagtgtggcaggagtgcaacatgaacagagcccagaacaagaggaagtacagcgccagcagcggcggcctgtgtgaggaggccacagctgccaaggtggcctcctgggactttgtggaggccacccagaggaccaactgcagctgcctgcggcacaagaacctgaagagcagaaatgccggccagcagggccaggcccccagcctgggccagcagcagcagatcctgcccaagcacaagaccaatgagaagcaggagaagtctgagaagccccagaagaggcccctgacccccttccaccaccgggtgtctgtgtctgatgatgtgggcatggatgctgacagcgccagccagaggctggtgatcagcgccccagacagccaggtgcgcttcagcaacatccgcaccaatgatgtggccaagaccccccagatgcatggaacagagatggccaacagcccccagcccccacccctgagcccccacccctgtgatgtggtggatgaaggagtgaccaagacccccagcaccccccagagccagcacttctaccagatgcccaccccagaccccctggtgcccagcaagcccatggaggacagaattgacagcctgagccagagcttccccccccagtaccaggaggccgtggagcccaccgtgtatgtgggcacagctgtgaacctggaggaggatgaggccaacatcgcctggaagtactacaagttccccaagaagaaggatgtggagttcctgcccccccagctgcccagcgacaagttcaaggatgatcctgtgggccccttcggccaggagagcgtgacctctgtgacagagctgatggtgcagtgcaagaagcccctgaaggtgtctgatgagctggtgcagcagtaccagatcaagaaccagtgcctgagcgccatcgccagtgatgctgagcaggagcccaagattgacccctatgcctttgtggagggagatgaggagttcctgttcccagacaagaaggaccggcagaacagcgagcgggaggccggcaagaagcacaaggtggaggatggcaccagctctgtgacagtgctgagccatgaggaggatgccatgagcctcttcagccccagcatcaagcaggatgccccccggcccaccagccacgcccggccccccagcaccagcctcatctatgacagcgacctggccgtgtcctacacagacctggacaacctcttcaacagtgatgaagatgagctgaccccaggcagcaagaagagcgccaatggaagtgatgacaaggccagctgcaaggagagcaagacaggcaacctggaccccctgagctgcatcagcacagctgacctgcacaagatgtaccccaccccacccagcctggagcagcacatcatgggcttcagccccatgaacatgaacaacaaggagtatggctccatggacaccacccctgggggcaccgtgctggagggcaacagcagcagcatcggggcccagttcaagattgaggtggatgagggcttctgcagccccaagcccagcgagatcaaggacttctcctatgtgtacaagccagagaactgccagatcctggtgggctgcagcatgtttgcccccctgaagaccctgcccagccagtacctgccccccatcaagctgcctgaggagtgcatctaccggcagagctggacagtgggcaagctggagctgctgagcagcggccccagcatgcccttcatcaaggagggagatggcagcaacatggaccaggagtatggaacagcctacaccccccagacccacaccagctttggcatgccacccagcagcgccccacccagcaacagcggggccggcatcctgcccagccccagcaccccccgcttccccacccccaggacccccaggacccccaggacccccaggggggccggcggccctgccagcgcccagggctctgtgaagtatgaaaattctgacctgtacagccctgccagcacccccagcacctgccggcccctgaacagcgtggagcccgccaccgtgcccagcatccctgaggcccacagcctgtatgtgaacctgatcctgtctgagagcgtgatgaacctcttcaaggactgcaactttgacagctgctgcatctgtgtgtgcaacatgaacatcaagggagcagatgtgggcgtgtacatcccagaccccacccaggaggcccagtaccgctgcacctgtggcttctctgctgtgatgaacaggaagtttggaaacaacagcggcctcttcctggaggatgagctggacatcattggaagaaacacagactgtgggaaggaggccgagaagagatttgaggccctgcgggccaccagcgctgagcacgtgaatggaggcctgaaggagagcgagaagctgagtgatgacctgatcctgctgctgcaggaccagtgcaccaacctcttcagcccctttggagctgctgaccaggaccccttccccaagagcggggtcatcagcaactgggtgcgggtggaggagcgggactgctgcaatgactgctacctggccctggagcacggccggcagttcatggacaacatgtctgggggcaaggtggatgaggccctggtgaagagcagctgcctgcacccctggagcaagagaaatgatgtgtccatgcagtgcagccaggacatcctgaggatgctgctgagcctgcagcctgtgctgcaggatgccatccagaagaagaggacagtgcggccctggggcgtgcagggccccctgacctggcagcagttccacaagatggccggccggggcagctatggaacagatgagagccctgagcccctgcccatccccaccttcctgctgggctatgactatgactacctggtgctgagcccctttgccctgccctactgggagcggctgatgctggagccctacggcagccagagggacatcgcctacgtggtgctgtgcccagaaaatgaggccctgctgaatggagccaagagcttcttccgggacctgacagccatctatgagagctgccgcctgggccagcacaggcctgtgtcccggctgctgacagatggcatcatgagggtgggcagcacagccagcaagaagctgtctgagaagctggtggccgagtggttcagccaggccgcagatggcaacaatgaggccttcagcaagctgaagctgtatgcccaggtgtgccgctatgacctgggcccctacctggccagcctgcccctggacagcagcctgctgagccagcccaacctggtggcccccaccagccagagcctcatcaccccaccccagatgaccaacacaggaaatgccaacaccccatctgccaccctggccagcgctgccagcagcaccatgacagtgaccagcggcgtggccatcagcacctctgtggccacagccaacagcaccctgaccacagccagcaccagcagcagcagcagcagcaacctgaacagcggcgtgagcagcaacaagctgcccagcttccccccatttggctccatgaacagcaatgctgctggctccatgagcacccaggccaacacagtgcagagcggccagctgggcggccagcagaccagcgccctgcagacagctggcatcagcggggagagcagcagcctgcccacccagccccacccagatgtgtctgagagcaccatggaccgggacaaggtgggcatccccacagatggagacagccatgctgtgacctaccccccagccatcgtggtgtacatcatcgaccccttcacctatgagaacacagatgagagcaccaacagcagctctgtgtggaccctgggcctgctgcgctgcttcctggagatggtgcagaccctgcccccccacatcaagagcacagtgtctgtgcagatcatcccctgccagtacctgctgcagcctgtgaagcatgaggaccgggagatctacccccagcacctgaagagcctggccttcagcgccttcacccagtgcagaagacccctgcccaccagcaccaacgtgaagaccctgaccggcttcggccctggcctggccatggagacagccctgcggagcccagacaggcctgagtgcatccggctgtatgccccacccttcatcctggcccctgtgaaggacaagcagacagagctgggggagaccttcggggaggccggccagaagtacaacgtgctgtttgtgggctactgcctgagccatgaccagcgctggatcctggccagctgcacagacctgtatggagagctgctggagacctgcatcatcaacattgatgtgcccaacagagcccggaggaagaagagcagcgccaggaagtttggcctgcagaagctgtgggagtggtgcctgggcctggtgcagatgagcagcctgccctggagggtggtgattggccgcctgggccgcatcggccacggggagctgaaggactggagctgcctgctgagcagaagaaacctgcagagcctgagcaagaggctgaaggacatgtgcaggatgtgtggcatctctgctgctgacagccccagcatcctgagcgcctgcctggtggccatggagccccagggcagctttgtgatcatgccagattctgtgtccacaggctctgtgtttggccgcagcaccaccctgaacatgcagaccagccagctgaacaccccccaggacaccagctgcacccacatcctggtgttccccaccagcgcctctgtgcaggtggccagcgccacctacaccacagagaacctggacctggccttcaaccccaacaatgatggagcagatggcatgggcatctttgacctgctggacacaggagatgacctggaccctgacatcatcaacatcctgcctgccagccccaccggcagccctgtgcacagccctggcagccactacccccatggaggagatgctgggaagggccagagcacagaccggctgctgagcacagagccccatgaggaggtgcccaacatcctgcagcagcccctggccctgggctactttgtgtccacagccaaggccggccccctgcctgactggttctggagcgcctgcccccaggcccagtaccagtgccccctcttcctgaaggccagcctgcacctgcacgtgcccagcgtgcagagtgatgagctgctgcacagcaagcacagccaccccctggacagcaaccagaccagtgatgtgctgcgctttgtgctggagcagtacaatgccctgtcctggctgacctgtgaccctgccacccaggaccggcgcagctgcctgcccatccactttgtggtgctgaaccagctgtacaacttcatcatgaacatgctgtag

SEQ ID NO: 159008 - DNA, 6633 bp, synthetic construct
  misc_feature 1..6633: note = Description of Artificial Sequence: Synthetic coding sequence
  source 1..6633: mol_type = other DNA
atgacagctgctgccaactgggtggccaacggggccagcctggaggactgccacagcaacctcttcagcctggccgagctgaccggcatcaagtggaggcgctacaactttggaggccacggggactgtggccccatcatcagcgccccagcccaggatgaccccatcctgctgtccttcatccgctgcctgcaggccaacctgctgtgtgtgtggaggagagatgtgaagccagactgcaaggagctgtggatcttctggtggggagatgagcccaacctggtgggcgtcatccaccacgagctgcaggtggtggaggagggcctgtgggagaatggcctgtcctatgaatgtaggaccctgctcttcaaggccatccacaacctgctggagcgctgcctgatggacaagaactttgtgcgcatcggcaagtggtttgtgcggccctatgagaaggatgagaagcctgtgaacaagtctgagcacctgagctgtgccttcaccttcttcctgcacggggagagcaatgtgtgcacctctgtggagatcgcccagcaccagcccatctacctgatcaatgaggagcacatccacatggcccagagcagccctgcccccttccaggtgctggtgagcccctacggcctgaatggcaccctgaccggccaggcctacaagatgtctgaccctgccaccaggaagctgattgaggagtggcagtacttctaccccatggtgctgaagaagaaggaggagagcaaggaggaggatgagctgggctatgatgatgacttccctgtggccgtggaggtgattgtgggcggcgtgaggatggtgtaccccagcgcctttgtgctgatcagccagaatgacatccctgtgccccagagcgtggccagcgctgggggccacatcgctgtgggccagcagggcctgggctctgtgaaggaccccagcaactgtggcatgcccctgaccccacccaccagccctgagcaggccatcctgggggagagcggcggcatgcagagcgctgccagccacctggtgtcccaggacggcggcatgatcaccatgcacagccccaagaggtctgggaagatcccccccaagctgcacaaccacatggtgcaccgggtgtggaaggagtgcatcctgaacagaacccagagcaagaggagccagatgagcacccccaccctggaggaggagcccgccagcaacccagccacctgggactttgtggaccccacccagagggtgtcctgcagctgcagccgccacaagctgctgaagagatgtgctgtgggccccaacagaccacccaccgtgtcccagcccggcttctctgctggccccagcagcagcagcagcctgcccccaccagccagcagcaagcacaagacagctgagcggcaggagaagggggacaagctgcagaagaggcccctcatccccttccaccaccggcccagcgtggccgaggagctgtgcatggagcaggacaccccaggccagaagctgggcctggccggcatcgacagcagcctggaggtgagcagcagcaggaaatatgacaagcagatggctgtgcccagcaggaacaccagcaagcagatgaacctgaaccccatggacagcccccacagccccatcagccccctgccccccaccctgagcccccagccccggggccaggagacagagagcctggaccccccatctgtgcctgtgaacccagccctgtatggaaatggcctggagctgcagcagctgagcaccctggatgacagaacagtgctggtgggccagaggctgcccctgatggccgaggtgtctgaaacagccctgtactgcggcatccggcccagcaaccctgagagcagcgagaagtggtggcacagctaccgcctgcccccatctgatgatgctgagttccggcccccagagctgcagggcgagcgctgtgatgccaagatggaggtgaacagcgagagcacagccctgcagaggctgctggcccagcccaacaagcgcttcaagatctggcaggacaagcagccccagctgcagcccctgcacttcctggaccccctgcccctgagccagcagcccggggacagcctgggggaggtgaatgacccctacacctttgaagatggagacatcaagtacatcttcaccgccaacaagaagtgcaagcagggcacagagaaggacagcctgaagaagaacaagtcagaagatggcttcggcaccaaggatgtgaccaccccaggccacagcacccctgtgcctgatggcaagaatgccatgagcatcttcagcagcgccaccaagacagatgtgcggcaggacaatgctgctggccgggccggcagcagcagcctgacccaggtgacagacctggcccccagcctgcatgacctggacaacatctttgacaacagtgatgatgatgagctgggcgctgtgtccccagccctgcggagcagcaagatgcctgctgtgggcacagaggaccggcccctgggcaaggatggccgggctgctgtgccctacccacccaccgtggccgacctgcagaggatgttccccaccccacccagcctggagcagcacccagccttcagccctgtgatgaactacaaggatggcatcagcagcgagaccgtgacagccctgggcatgatggagagccccatggtgtccatggtgtccacccagctgacagagttcaagatggaggtggaggatggcctgggcagccccaagccagaggagatcaaggacttctcctatgtgcacaaggtgcccagcttccagccctttgtgggcagctccatgtttgcccccctgaagatgctgcccagccactgcctgctgcccctgaagatcccagatgcctgcctcttccggcccagctgggccatcccccccaagattgagcagctgcccatgcccccagctgccaccttcatcagagatggctacaacaacgtgcccagcgtgggcagcctggccgaccctgactacctgaacaccccccagatgaacacccctgtgaccctgaacagcgctgccccagccagcaacagcggggccggcgtgctgcccagccctgccaccccccgcttctctgtgcccacccccaggacccccaggacccccaggaccccccggggcggcggcacagccagcggccagggctctgtgaagtatgacagcacagaccagggcagccctgccagcacccccagcaccacccggcccctgaacagcgtggagcccgccaccatgcagcccatccctgaggcccacagcctgtatgtgaccctcatcctgagtgacagcgtgatgaacatcttcaaggacaggaactttgacagctgctgcatctgtgcctgcaacatgaacatcaagggagcagatgtgggcctgtacatcccagacagcagcaatgaagaccagtaccgctgcacctgtggcttcagcgccatcatgaacaggaagctgggctacaacagcggcctcttcctggaggatgagctggacatctttgggaagaacagcgacatcggccaggccgctgagcggcggctgatgatgtgccagagcaccttcctgccccaggtggagggcaccaagaagccccaggagccccccatcagcctgctgctgctgctgcagaaccagcacacccagccctttgccagcctgaacttcctggactacatcagcagcaacaaccggcagaccctgccctgtgtgtcctggagctatgacagagtgcaggccgacaacaatgactactggacagagtgcttcaatgccctggagcagggccggcagtatgtggacaaccccaccggcggcaaggtggatgaggccctggtgcgcagcgccaccgtgcacagctggccccacagcaatgtgctggacatctccatgctgagcagccaggatgtggtgaggatgctgctgagcctgcagcccttcctgcaggatgccatccagaagaagaggactggaagaacctgggagaacatccagcacgtgcagggccccctgacctggcagcagttccacaagatggccggccggggcacctacggcagcgaggagagccctgagcccctgcccatccccaccctgctggtgggctatgacaaggacttcctgaccatcagccccttcagcctgcccttctgggagcggctgctgctggacccctacggcggccacagagatgtggcctacatcgtggtgtgcccagaaaatgaggccctgctggagggcgccaagaccttcttccgggacctgtctgctgtgtatgagatgtgccgcctgggccagcacaagcccatctgcaaggtgctgagagatggcatcatgagggtgggcaagacagtggcccagaagctgacagatgagctggtgtctgagtggttcaaccagccctggagcggggaggagaatgacaaccacagccggctgaagctgtatgcccaggtgtgccgccaccacctggccccctacctggccaccctgcagctggacagcagcctgctgatcccccccaagtaccagaccccacctgctgctgcccagggccaggccaccccaggaaatgccggccccctggccccaaatggatctgctgcccccccagctggcagcgccttcaaccccaccagcaacagcagcagcaccaacccagctgccagcagcagcgccagcggcagctctgtgccccctgtgagcagcagcgccagcgcccctggcatcagccagatcagcaccaccagcagcagcggcttcagcggctctgtgggcggccagaaccccagcactggaggcatctctgctgacaggacccagggcaacatcggctgcggcggggacacagaccccggccagagcagcagccagcccagccaggacggccaggagagcgtgacagagcgggagagaattggcatccccacagagccagattctgctgacagccacgcccaccccccagctgtggtgatctacatggtggaccccttcacctacgccgctgaggaggacagcaccagcggcaacttctggctgctgagcctgatgcgctgctacacagagatgctggacaacctgcctgagcacatgagaaattccttcatcctgcagatcgtgccctgccagtacatgctgcagaccatgaaggatgagcaggtgttctacatccagtacctgaagtccatggccttctctgtgtactgccagtgcagaagacccctgcccacccagatccacatcaagagcctgaccggcttcggccctgctgccagcattgagatgaccctgaagaaccctgagcggcccagccccatccagctgtacagcccccccttcatcctggcccccatcaaggacaagcagacagagctgggggagaccttcggggaggccagccagaagtacaacgtgctgtttgtgggctactgcctgagccatgaccagcgctggctgctggccagctgcacagacctgcatggagagctgctggagacctgtgtggtgaacatcgccctgcccaacagaagcagaagaagcaaggtgtctgccaggaagattggcctgcagaagctgtgggagtggtgcatcggcatcgtgcagatgaccagcctgccctggagggtggtgattggccgcctgggccgcctgggccacggggagctgaaggactggagcatcctgctgggggagtgcagcctgcagaccatcagcaagaagctgaaggatgtgtgcaggatgtgtggcatctctgctgctgacagccccagcatcctgagcgcctgcctggtggccatggagccccagggcagctttgtggtgatgccagatgctgtgaccatgggctctgtgtttggccgcagcacagccctgaacatgcagagcagccagctgaacaccccccaggatgccagctgcacccacatcctggtgttccccaccagcagcaccatccaggtggccccagccaactacccaaatgaagatggcttcagccccaacaatgatgacatgtttgtggacctgcccttcccagatgacatggacaatgacatcggcatcctgatgacaggcaacctgcacagcagccccaacagcagccctgtgcccagccctggcagccccagcggcattggagtgggcagccacttccagcacagccgcagccagggcgagcggctgctgagccgggaggcccctgaggagctgaagcagcagcccctggccctgggctactttgtgtccacagccaaggccgagaacctgccccagtggttctggagcagctgcccccaggcccagaaccagtgccccctcttcctgaaggccagcctgcaccaccacatctctgtggcccagacagatgagctgctgcctgccaggaacagccagagggtgccccaccccctggacagcaagaccaccagtgatgtgctgcgctttgtgctggagcagtacaatgccctgtcctggctgacctgcaacccagccacccaggacaggaccagctgcctgcctgtgcactttgtggtgctgacccagctgtacaatgccatcatgaacatcctgtag

SEQ ID NO: 159009 - DNA, 4365 bp, synthetic construct
  misc_feature 1..4365: note = Description of Artificial Sequence: Synthetic coding sequence
  source 1..4365: mol_type = other DNA
atggcccctgtgcagctggagaaccaccagctggtgcccccaggcggcggcggcggcggcagcggcggcccccccagcgccccagcccctcctcctcctggagctgctgtggccgctgctgctgctgctgctgccagccctggctaccgcctgagcaccctgattgagttcctgctgcaccgggcctacagcgagctgatggtgctgacagacctgctgcccaggaagagtgatgtggagaggaagattgaaattgtgcagtttgccagcaggacccggcagctgtttgtgcggctgctggccctggtgaagtgggccaacaatgccggcaaggtggagaagtgtgccatgatcagcagcttcctggaccagcaggccatcctgtttgtggacacagctgaccggctggccagcctggccagagatgccctggtgcacgcccggctgcccagctttgccatcccctatgccattgatgtgctgaccaccggcagctacccccggctgcccacctgcatccgggacaagatcatccccccagaccccatcaccaagattgagaagcaggccaccctgcaccagctgaaccagatcctgcggcaccggctggtgaccacagacctgcccccccagctggccaacctgactgtggccaacggccgggtgaagttccgggtggagggggagtttgaggccaccctgactgtgatgggagatgatcctgatgtgccctggaggctgctgaagctggagatcctggtggaggacaaggagactggagatggccgggccctggtgcacagcatgcagatctccttcatccaccagctggtgcagagccggctgtttgctgatgagaagcccctgcaggacatgtacaactgcctgcacagcttctgcctgagcctgcagctggaggtgctgcacagccagaccctgatgctgatccgggagcgctggggagacctggtgcaggtggagcgctaccacgccggcaagtgcctgagcctgtctgtgtggaaccagcaggtgctgggcaggaagacaggaacagcctctgtgcacaaggtgaccatcaagattgatgaaaatgatgtgtccaagcccctgcagatcttccatgacccccccctgcctgccagtgacagcaagctggtggagcgggccatgaagattgaccacctgagcattgagaagctgctgattgacagcgtgcacgcccgggcccaccagaagctgcaggagctgaaggccatcctgcggggcttcaatgccaatgaaaacagcagcattgaaacagccctgcctgccctggtggtgcccatcctggagccctgtggcaacagcgagtgcctgcacatctttgtggacctgcacagcggcatgttccagctgatgctgtatggcctggaccaggccaccctggatgacatggagaagtctgtgaatgatgacatgaagaggatcatcccctggatccagcagctgaagttctggctgggccagcagcgctgcaagcagagcatcaagcacctgcccaccatcagcagcgagaccctgcagctgagcaactacagcacccaccccatcggcaacctgagcaagaacaagctgttcatcaagctgacccggctgccccagtactacatcgtggtggagatgctggaggtgcccaacaagcccacccagctgagctacaagtactacttcatgtctgtgaatgctgctgaccgggaggacagccctgccatggccctgctgctgcagcagttcaaggagaacatccaggacctggtgttccgcaccaagacaggcaagcagaccaggaccaatgccaagaggaagctgagtgatgacccctgccctgtggagagcaagaagaccaagagagctggggagatgtgtgccttcaacaaggtgctggcccactttgtggccatgtgtgacaccaacatgccctttgtgggcctgcggctggagctgagcaacctggagatcccccaccagggcgtgcaggtggagggagatggcttcagccacgccatccggctgctgaagatccccccctgcaagggcatcacagaggagacccagaaggccctggacaggagcctgctggactgcaccttccggctgcagggcaggaacaacagaacctgggtggccgagctggtgtttgccaactgccccctgaatggcaccagcacccgggagcagggccccagccgccacgtgtacctgacctatgagaacctgctgtctgagcctgtgggcggcaggaaggtggtggagatgttcctgaatgactggaacagcatcgcccggctgtatgaatgtgtgctggagtttgcccggagcctgcctgacatcccagcccacctgaacatcttcagcgaggtgcgggtgtacaactacaggaagctgatcctgtgctacggcaccaccaagggcagcagcatcagcatccagtggaacagcatccaccagaagttccacatcagcctgggcaccgtgggccccaacagcggctgcagcaactgccacaacaccatcctgcaccagctgcaggagatgttcaacaagacccccaacgtggtgcagctgctgcaggtgctgtttgacacccaggcccccctgaatgccatcaacaagctgcccaccgtgcccatgctgggcctgacccagaggaccaacacagcctaccagtgcttcagcatcctgccccagagcagcacccacatccggctggccttcaggaacatgtactgcatcgacatctactgccgcagccggggcgtggtggccatcagagatggagcctacagcctgtttgacaacagcaagctggtggagggcttctacccagcccctggcctgaagaccttcctgaacatgtttgtggacagcaaccaggatgccaggagaagatctgtgaatgaagatgacaacccccccagccccatcggcggggacatgatggacagcctcatcagccagctgcagcccccaccccagcagcagcccttccccaagcagcccggcaccagcggggcctaccccctgaccagcccccccaccagctaccacagcacagtgaaccagagccccagcatgatgcacacccagagccctggcaacctgcatgctgccagcagccccagcggggccctgcgggcccccagccctgccagctttgtgcccaccccaccacccagcagccacggcatcagcatcggccctggggccagctttgccagcccccacggcaccctggaccccagcagcccctacaccatggtgagccccagcggccgggccggcaactggccaggcagcccccaggtgtctggccccagccctgctgccaggatgcctggcatgagccctgccaaccccagcctgcacagccctgtgcctgatgccagccacagccccagggctggcaccagcagccagaccatgcccaccaacatgcccccacccaggaagctgccccagaggtcctgggccgccagcatccccaccatcctgacccacagcgccctgaacatcctgctgctgcccagccccaccccaggcctggtgcccggcctggccggcagctacctgtgcagccccctggagcgcttcctgggcagcgtcatcatgagaagacacctgcagaggatcatccagcaggagaccctgcagctgatcaacagcaatgaacctggggtcatcatgttcaagacagatgccctgaagtgccgggtggccctgagccccaagaccaaccagaccctgcagctgaaggtgaccccagaaaatgccggccagtggaagccagatgagctgcaggtgctggagaagttctttgagaccagggtggccggcccccccttcaaggccaacaccctcatcgccttcaccaagctgctgggcgcccccacccacatcctgcgggactgtgtgcacatcatgaagctggagctgttcccagaccaggccacccagctgaagtggaatgtgcagttctgcctgaccatccccccatctgccccacccatcgcccctcctggcaccccagctgtggtgctgaagagcaagatgctgttcttcctgcagctgacccagaagacctctgtgcccccccaggagcctgtgtccatcatcgtgcccatcatctatgacatggccagcggcaccacccagcaggccgacatcccccggcagcagaacagctctgtggccgcccccatgatggtgagcaacatcctgaagagatttgctgagatgaaccccccccggcagggcgagtgcaccatctttgctgctgtgcgggacctgatggccaacctgaccctgcccccaggcggccggccctag

SEQ ID NO: 159010 - DNA, 468 bp, synthetic construct
  misc_feature 1..468: note = Description of Artificial Sequence: Synthetic coding sequence
  source 1..468: mol_type = other DNA
gtggccggcccccccttcaaggccaacaccctcatcgccttcaccaagctgctgggcgcccccacccacatcctgcgggactgtgtgcacatcatgaagctggagctgttcccagaccaggccacccagctgaagtggaatgtgcagttctgcctgaccatccccccatctgccccacccatcgcccctcctggcaccccagctgtggtgctgaagagcaagatgctgttcttcctgcagctgacccagaagacctctgtgcccccccaggagcctgtgtccatcatcgtgcccatcatctatgacatggccagcggcaccacccagcaggccgacatcccccggcagcagaacagctctgtggccgcccccatgatggtgagcaacatcctgaagagatttgctgagatgaaccccccccggcagggcagcatcaagggcaccggctgccccagcgacttcctgtag

SEQ ID NO: 159011 - DNA, 996 bp, synthetic construct
  misc_feature 1..996: note = Description of Artificial Sequence: Synthetic coding sequence
  source 1..996: mol_type = other DNA
cccagcggccgggccggcaactggccaggcagcccccaggtgtctggccccagccctgctgccaggatgcctggcatgagccctgccaaccccagcctgcacagccctgtgcctgatgccagccacagcccccgggccggcaccagcagccagaccatgcccaccaacatgcccccacccaggaagctgccccagaggtcctgggccgccagcatccccaccatcctgacccacagcgccctgaacatcctgctgctgcccagccccaccccaggcctggtgcccggcctggccggcagctacctgtgcagccccctggagcgcttcctgggcagcgtcatcatgaggaggcacctgcagaggatcatccagcaggagaccctgcagctgatcaacagcaatgagcccggggtcatcatgttcaagacagatgccctgaagtgccgggtggccctgagccccaagaccaaccagaccctgcagctgaaggtgaccccagaaaatgccggccagtggaagccagatgagctgcaggtgctggagaagttctttgagaccagggtggccggcccccccttcaaggccaacaccctgattgccttcaccaagctgctgggcgcccccacccacatcctgcgggactgtgtgcacatcatgaagctggagctgttcccagaccaggccacccagctgaagtggaatgtgcagttctgcctgaccatcccccccagcgccccacccatcgcccctcctggcaccccagctgtggtgctgaagagcaagatgctgttcttcctgcagctgacccagaagacctctgtgcccccccaggagcctgtgtccatcatcgtgcccatcatctatgacatggccagcggcaccacccagcaggccgacatcccccggcagcagaacagctctgtggccgcccccatgatggtgagcaacatcctgaagagatttgctgagatgaaccccccccggcagggcacctag

SEQ ID NO: 159012 - DNA, 2367 bp, synthetic construct
  misc_feature 1..2367: note = Description of Artificial Sequence: Synthetic coding sequence
  source 1..2367: mol_type = other DNA
atggatgtgtctggccaggagacagactggaggagcacagccttccggcagaagctggtgtcccagattgaagatgccatgaggaaggccggcgtggcccacagcaagagcagcaaggacatggagagccacgtgttcctgaaggccaagaccagagatgagtacctgagcctggtggcccggctcatcatccacttccgggacatccacaacaagaagagccaggcctctgtgtctgaccccatgaatgccctgcagagcctgactggaggccctgctgctggagctgctggcatcggcatgccaccccggggccctggccagagcctgggcggcatgggcagcctgggcgccatgggccagcccatgagcctgagcggccagcccccacctggcaccagcggcatggccccccacagcatggctgtggtgtccacagccaccccccagacccagctgcagctgcagcaggtggccctgcagcagcagcagcagcagcagcagttccagcagcagcagcaggccgccctgcagcagcagcagcagcagcagcagcagcagcagttccaggcccagcagagcgccatgcagcagcagttccaggccgtggtgcagcagcagcagcagctgcagcagcagcagcagcagcagcagcacctgatcaagctgcaccaccagaaccagcagcagatccagcagcagcagcagcagctgcagagaattgcccagctgcagctgcagcagcagcagcagcagcagcagcagcagcagcagcagcagcagcaggccctgcaggcccagccccccatccagcagccccccatgcagcagccccagcccccacccagccaggccctgccccagcagctgcagcagatgcaccacacccagcaccaccagcccccaccccagccccagcagccccctgtggcccagaaccagcccagccagctgcccccccagagccagacccagcccctggtgtcccaggcccaggccctgcccggccagatgctgtacacccagccccccctgaagtttgtgcgggcccccatggtggtgcagcagccccctgtgcagccccaggtgcagcagcagcagacagctgtgcagacagcccaggccgcccagatggtggcccctggggtgcagatgatcacagaggccctggcccagggcggcatgcacatccgggcccgcttcccccccaccacagctgtgtctgccatccccagcagcagcatccccctgggccggcagcccatggcccaggtgtcccagagcagcctgcccatgctgagcagccccagccctggccagcaggtgcagaccccccagagcatgcctcctccaccccagcccagcccccagcccggccagcccagcagccagcccaacagcaatgtgagcagcggccctgcccccagccccagcagcttcctgcccagccccagcccccagcccagccagagccctgtgacagcccggaccccccagaacttctctgtgcccagccctggccccctgaacacccctgtgaaccccagctctgtgatgagccctgctggcagcagccaggccgaggagcagcagtacctggacaagctgaagcagctgagcaagtacatcgagcccctgcggaggatgatcaacaagattgacaagaatgaagacaggaagaaggacctgagcaagatgaagagcctgctggacatcctgacagaccccagcaagcgctgccccctgaagaccctgcagaagtgtgagatcgccctggagaagctgaagaatgacatggctgtgcccaccccacctcctcctcctgtgccccccaccaagcagcagtacctgtgccagcccctgctggatgctgtgctggccaacatccgcagccctgtgttcaaccacagcctgtaccgcacctttgtgcctgccatgacagccatccacggcccccccatcacagcccctgtggtgtgcaccaggaagaggcggctggaggatgatgagcggcagagcatccccagcgtgctgcagggcgaggtggcccggctggaccccaagttcctggtgaacctggaccccagccactgcagcaacaatggaacagtgcacctgatctgcaagctggatgacaaggacctgcccagcgtgccccccctggagctgtctgtgcctgctgactacccagcccagagccccctgtggattgaccggcagtggcagtatgatgccaaccccttcctgcagagcgtgcaccgctgcatgaccagccggctgctgcagctgcctgacaagcacagcgtgacagccctgctgaacacctgggcccagagcgtgcaccaggcctgcctgtctgctgcctag

SEQ ID NO: 159013 - DNA, 2247 bp, synthetic construct
  misc_feature 1..2247: note = Description of Artificial Sequence: Synthetic coding sequence
  source 1..2247: mol_type = other DNA
atggatgtgtctggccaggagacagactggaggagcacagccttccggcagaagctggtgtcccagattgaagatgccatgaggaaggccggcgtggcccacagcaagagcagcaaggacatggagagccacgtgttcctgaaggccaagaccagagatgagtacctgagcctggtggcccggctcatcatccacttccgggacatccacaacaagaagagccaggcctctgtgtctgaccccatgaatgccctgcagagcctgactggaggccctgctgctggagctgctggcatcggcatgccaccccggggccctggccagagcctgggcggcatgggcagcctgggcgccatgggccagcccatgagcctgagcggccagcccccacctggcaccagcggcatggccccccacagcatggctgtggtgtccacagccaccccccagacccagctgcagctgcagcaggtggccctgcagcagcagcagcagcagcagcagttccagcagcagcagcaggccgccctgcagcagcagcagcagcagcagcagcagcagcagttccaggcccagcagagcgccatgcagcagcagttccaggccgtggtgcagcagcagcagcagctgcagcagcagcagcagcagcagcagcacctgatcaagctgcaccaccagaaccagcagcagatccagcagcagcagcagcagctgcagagaattgcccagctgcagctgcagcagcagcagcagcagcagcagcagcagcagcagcagcagcagcaggccctgcaggcccagccccccatccagcagccccccatgcagcagccccagcccccacccagccaggccctgccccagcagctgcagcagatgcaccacacccagcaccaccagcccccaccccagccccagcagccccctgtggcccagaaccagcccagccagctgcccccccagagccagacccagcccctggtgtcccaggcccaggccctgcccggccagatgctgtacacccagccccccctgaagtttgtgcgggcccccatggtggtgcagcagccccctgtgcagccccaggtgcagcagcagcagacagctgtgcagacagcccaggccgcccagatggtggcccctggggtgcaggtgtcccagagcagcctgcccatgctgagcagccccagccctggccagcaggtgcagaccccccagagcatgcctcctccaccccagcccagcccccagcccggccagcccagcagccagcccaacagcaatgtgagcagcggccctgcccccagccccagcagcttcctgcccagccccagcccccagcccagccagagccctgtgacagcccggaccccccagaacttctctgtgcccagccctggccccctgaacacccctgtgaaccccagctctgtgatgagccctgctggcagcagccaggccgaggagcagcagtacctggacaagctgaagcagctgagcaagtacatcgagcccctgcggaggatgatcaacaagattgacaagaatgaagacaggaagaaggacctgagcaagatgaagagcctgctggacatcctgacagaccccagcaagcgctgccccctgaagaccctgcagaagtgtgagatcgccctggagaagctgaagaatgacatggctgtgcccaccccacctcctcctcctgtgccccccaccaagcagcagtacctgtgccagcccctgctggatgctgtgctggccaacatccgcagccctgtgttcaaccacagcctgtaccgcacctttgtgcctgccatgacagccatccacggcccccccatcacagcccctgtggtgtgcaccaggaagaggcggctggaggatgatgagcggcagagcatccccagcgtgctgcagggcgaggtggcccggctggaccccaagttcctggtgaacctggaccccagccactgcagcaacaatggaacagtgcacctgatctgcaagctggatgacaaggacctgcccagcgtgccccccctggagctgtctgtgcctgctgactacccagcccagagccccctgtggattgaccggcagtggcagtatgatgccaaccccttcctgcagagcgtgcaccgctgcatgaccagccggctgctgcagctgcctgacaagcacagcgtgacagccctgctgaacacctgggcccagagcgtgcaccaggcctgcctgtctgctgcctag

SEQ ID NO: 159014 - DNA, 2034 bp, synthetic construct
  misc_feature 1..2034: note = Description of Artificial Sequence: Synthetic coding sequence
  source 1..2034: mol_type = other DNA
atggatgtgtctggccaggagacagactggaggagcacagccttccggcagaagctggtgtcccagattgaagatgccatgaggaaggccggcgtggcccacagcaagagcagcaaggacatggagagccacgtgttcctgaaggccaagaccagagatgagtacctgagcctggtggcccggctcatcatccacttccgggacatccacaacaagaagagccaggcctctgtgtctgcccagctgcagctgcagcaggtggccctgcagcagcagcagcagcagcagcagttccagcagcagcagcaggccgccctgcagcagcagcagcagcagcagcagcagcagcagttccaggcccagcagagcgccatgcagcagcagttccaggccgtggtgcagcagcagcagcagctgcagcagcagcagcagcagcagcagcacctgatcaagctgcaccaccagaaccagcagcagatccagcagcagcagcagcagctgcagagaattgcccagctgcagctgcagcagcagcagcagcagcagcagcagcagcagcagcagcagcagcaggccctgcaggcccagccccccatccagcagccccccatgcagcagccccagcccccacccagccaggccctgccccagcagctgcagcagatgcaccacacccagcaccaccagcccccaccccagccccagcagccccctgtggcccagaaccagcccagccagctgcccccccagagccagacccagcccctggtgtcccaggcccaggccctgcccggccagatgctgtacacccagccccccctgaagtttgtgcgggcccccatggtggtgcagcagccccctgtgcagccccaggtgcagcagcagcagacagctgtgcagacagcccaggccgcccagatggtggcccctggggtgcaggtgtcccagagcagcctgcccatgctgagcagccccagccctggccagcaggtgcagaccccccagagcatgcctcctccaccccagcccagcccccagcccggccagcccagcagccagcccaacagcaatgtgagcagcggccctgcccccagccccagcagcttcctgcccagccccagcccccagcccagccagagccctgtgacagcccggaccccccagaacttctctgtgcccagccctggccccctgaacacccctgtgaaccccagctctgtgatgagccctgctggcagcagccaggccgaggagcagcagtacctggacaagctgaagcagctgagcaagtacatcgagcccctgcggaggatgatcaacaagattgacaagaatgaagacaggaagaaggacctgagcaagatgaagagcctgctggacatcctgacagaccccagcaagcgctgccccctgaagaccctgcagaagtgtgaaattgccctggagaagctgaagaatgacatggctgtgcccaccccacctcctcctcctgtgccccccaccaagcagcagtacctgtgccagcccctgctggatgctgtgctggccaacatccgcagccctgtgttcaaccacagcctgtaccgcacctttgtgcctgccatgacagccatccacggcccccccatcacagcccctgtggtgtgcaccaggaagaggcggctggaggatgatgagcggcagagcatccccagcgtgctgcagggcgaggtggcccggctggaccccaagttcctggtgaacctggaccccagccactgcagcaacaacggcaccgtgcacctgatctgcaagctggatgacaaggacctgcccagcgtgccccccctggagctgtctgtgcctgctgactacccagcccagagccccctgtggattgaccggcagtggcagtatgatgccaaccccttcctgcagagcgtgcaccgctgcatgaccagccggctgctgcagctgcctgacaagcacagcgtgacagccctgctgaacacctgggcccagagcgtgcaccaggcctgcctgtctgctgcctag

SEQ ID NO: 159015 - DNA, 2169 bp, synthetic construct
  misc_feature 1..2169: note = Description of Artificial Sequence: Synthetic coding sequence
  source 1..2169: mol_type = other DNA
atgaggaaggccggcgtggcccacagcaagagcagcaaggacatggagagccacgtgttcctgaaggccaagaccagagatgagtacctgagcctggtggcccggctcatcatccacttccgggacatccacaacaagaagagccaggcctctgtgtctgaccccatgaatgccctgcagagcctgactggaggccctgctgctggagctgctggcatcggcatgccaccccggggccctggccagagcctgggcggcatgggcagcctgggcgccatgggccagcccatgagcctgagcggccagcccccacctggcaccagcggcatggccccccacagcatggctgtggtgtccacagccaccccccagacccagctgcagctgcagcaggtggccctgcagcagcagcagcagcagcagcagttccagcagcagcagcaggccgccctgcagcagcagcagcagcagcagcagcagcagcagttccaggcccagcagagcgccatgcagcagcagttccaggccgtggtgcagcagcagcagcagctgcagcagcagcagcagcagcagcagcacctgatcaagctgcaccaccagaaccagcagcagatccagcagcagcagcagcagctgcagagaattgcccagctgcagctgcagcagcagcagcagcagcagcagcagcagcagcagcagcagcagcaggccctgcaggcccagccccccatccagcagccccccatgcagcagccccagcccccacccagccaggccctgccccagcagctgcagcagatgcaccacacccagcaccaccagcccccaccccagccccagcagccccctgtggcccagaaccagcccagccagctgcccccccagagccagacccagcccctggtgtcccaggcccaggccctgcccggccagatgctgtacacccagccccccctgaagtttgtgcgggcccccatggtggtgcagcagccccctgtgcagccccaggtgcagcagcagcagacagctgtgcagacagcccaggccgcccagatggtggcccctggggtgcaggtgtcccagagcagcctgcccatgctgagcagccccagccctggccagcaggtgcagaccccccagagcatgcctcctccaccccagcccagcccccagcccggccagcccagcagccagcccaacagcaatgtgagcagcggccctgcccccagccccagcagcttcctgcccagccccagcccccagcccagccagagccctgtgacagcccggaccccccagaacttctctgtgcccagccctggccccctgaacacccctgtgaaccccagctctgtgatgagccctgctggcagcagccaggccgaggagcagcagtacctggacaagctgaagcagctgagcaagtacatcgagcccctgcggaggatgatcaacaagattgacaagaatgaagacaggaagaaggacctgagcaagatgaagagcctgctggacatcctgacagaccccagcaagcgctgccccctgaagaccctgcagaagtgtgagatcgccctggagaagctgaagaatgacatggctgtgcccaccccacctcctcctcctgtgccccccaccaagcagcagtacctgtgccagcccctgctggatgctgtgctggccaacatccgcagccctgtgttcaaccacagcctgtaccgcacctttgtgcctgccatgacagccatccacggcccccccatcacagcccctgtggtgtgcaccaggaagaggcggctggaggatgatgagcggcagagcatccccagcgtgctgcagggcgaggtggcccggctggaccccaagttcctggtgaacctggaccccagccactgcagcaacaatggaacagtgcacctgatctgcaagctggatgacaaggacctgcccagcgtgccccccctggagctgtctgtgcctgctgactacccagcccagagccccctgtggattgaccggcagtggcagtatgatgccaaccccttcctgcagagcgtgcaccgctgcatgaccagccggctgctgcagctgcctgacaagcacagcgtgacagccctgctgaacacctgggcccagagcgtgcaccaggcctgcctgtctgctgcctag

SEQ ID NO: 159016 - DNA, 1914 bp, synthetic construct
  misc_feature 1..1914: note = Description of Artificial Sequence: Synthetic coding sequence
  source 1..1914: mol_type = other DNA
atggagagccacgtgttcctgaaggccaagaccagagatgagtacctgagcctggtggcccggctcatcatccacttccgggacatccacaacaagaagagccaggcctctgtgtctgcccagctgcagctgcagcaggtggccctgcagcagcagcagcagcagcagcagttccagcagcagcagcaggccgccctgcagcagcagcagcagcagcagcagcagcagcagttccaggcccagcagagcgccatgcagcagcagttccaggccgtggtgcagcagcagcagcagctgcagcagcagcagcagcagcagcagcacctgatcaagctgcaccaccagaaccagcagcagatccagcagcagcagcagcagctgcagagaattgcccagctgcagctgcagcagcagcagcagcagcagcagcagcagcagcagcagcagcagcaggccctgcaggcccagccccccatccagcagccccccatgcagcagccccagcccccacccagccaggccctgccccagcagctgcagcagatgcaccacacccagcaccaccagcccccaccccagccccagcagccccctgtggcccagaaccagcccagccagctgcccccccagagccagacccagcccctggtgtcccaggcccaggccctgcccggccagatgctgtacacccagccccccctgaagtttgtgcgggcccccatggtggtgcagcagccccctgtgcagccccaggtgcagcagcagcagacagctgtgcagacagcccaggccgcccagatggtggcccctggggtgcaggtgtcccagagcagcctgcccatgctgagcagccccagccctggccagcaggtgcagaccccccagagcatgcctcctccaccccagcccagcccccagcccggccagcccagcagccagcccaacagcaatgtgagcagcggccctgcccccagccccagcagcttcctgcccagccccagcccccagcccagccagagccctgtgacagcccggaccccccagaacttctctgtgcccagccctggccccctgaacacccctgtgaaccccagctctgtgatgagccctgctggcagcagccaggccgaggagcagcagtacctggacaagctgaagcagctgagcaagtacatcgagcccctgcggaggatgatcaacaagattgacaagaatgaagacaggaagaaggacctgagcaagatgaagagcctgctggacatcctgacagaccccagcaagcgctgccccctgaagaccctgcagaagtgtgaaattgccctggagaagctgaagaatgacatggctgtgcccaccccacctcctcctcctgtgccccccaccaagcagcagtacctgtgccagcccctgctggatgctgtgctggccaacatccgcagccctgtgttcaaccacagcctgtaccgcacctttgtgcctgccatgacagccatccacggcccccccatcacagcccctgtggtgtgcaccaggaagaggcggctggaggatgatgagcggcagagcatccccagcgtgctgcagggcgaggtggcccggctggaccccaagttcctggtgaacctggaccccagccactgcagcaacaacggcaccgtgcacctgatctgcaagctggatgacaaggacctgcccagcgtgccccccctggagctgtctgtgcctgctgactacccagcccagagccccctgtggattgaccggcagtggcagtatgatgccaaccccttcctgcagagcgtgcaccgctgcatgaccagccggctgctgcagctgcctgacaagcacagcgtgacagccctgctgaacacctgggcccagagcgtgcaccaggcctgcctgtctgctgcctag

SEQ ID NO: 159017 - DNA, 2169 bp, synthetic construct; identical to SEQ ID NO: 159015
  misc_feature 1..2169: note = Description of Artificial Sequence: Synthetic coding sequence
  source 1..2169: mol_type = other DNA

SEQ ID NO: 159018 - DNA, 2157 bp, synthetic construct
  misc_feature 1..2157: note = Description of Artificial Sequence: Synthetic coding sequence
  source 1..2157: mol_type = other DNA
atgaggaaggccggcgtggcccacagcaagagcagcaaggacatggagagccacgtgttcctgaaggccaagaccagagatgagtacctgagcctggtggcccggctcatcatccacttccgggacatccacaacaagaagagccaggcctctgtgtctgaccccatgaatgccctgcagagcctgactggaggccctgctgctggagctgctggcatcggcatgccaccccggggccctggccagagcctgggcggcatgggcagcctgggcgccatgggccagcccatgagcctgagcggccagcccccacctggcaccagcggcatggccccccacagcatggctgtggtgtccacagccaccccccagacccagctgcagctgcagcaggtggccctgcagcagcagcagcagcagcagcagttccagcagcagcagcaggccgccctgcagcagcagcagcagcagcagcagcagcagcagttccaggcccagcagagcgccatgcagcagcagttccaggccgtggtgcagcagcagcagcagctgcagcagcagcagcagcagcagcagcacctgatcaagctgcaccaccagaaccagcagcagcagcagcagcaggccctgcaggcccagccccccatccagcagccccccatgcagcagccccagcccccacccagccaggccctgccccagcagctgcagcagatgcaccacacccagcaccaccagcccccaccccagccccagcagccccctgtggcccagaaccagcccagccagctgcccccccagagccagacccagcccctggtgtcccaggcccaggccctgcccggccagatgctgtacacccagccccccctgaagtttgtgcgggcccccatggtggtgcagcagccccctgtgcagccccaggtgcagcagcagcagacagctgtgcagacagcccaggccgcccagatggtggcccctggggtgcagatgatcacagaggccctggcccagggcggcatgcacatccgggcccgcttcccccccaccacagctgtgtctgccatccccagcagcagcatccccctgggccggcagcccatggcccagcaggtgcagaccccccagagcatgcctcctccaccccagcccagcccccagcccggccagcccagcagccagcccaacagcaatgtgagcagcggccctgcccccagccccagcagcttcctgcccagccccagcccccagcccagccagagccctgtgacagcccggaccccccagaacttctctgtgcccagccctggccccctgaacacccctgtgaaccccagctctgtgatgagccctgctggcagcagccaggccgaggagcagcagtacctggacaagctgaagcagctgagcaagtacatcgagcccctgcggaggatgatcaacaagattgacaagaatgaagacaggaagaaggacctgagcaagatgaagagcctgctggacatcctgacagaccccagcaagcgctgccccctgaagaccctgcagaagtgtgagatcgccctggagaagctgaagaatgacatggctgtgcccaccccacctcctcctcctgtgccccccaccaagcagcagtacctgtgccagcccctgctggatgctgtgctggccaacatccgcagccctgtgttcaaccacagcctgtaccgcacctttgtgcctgccatgacagccatccacggcccccccatcacagcccctgtggtgtgcaccaggaagaggcggctggaggatgatgagcggcagagcatccccagcgtgctgcagggcgaggtggcccggctggaccccaagttcctggtgaacctggaccccagccactgcagcaacaatggaacagtgcacctgatctgcaagctggatgacaaggacctgcccagcgtgccccccctggagctgtctgtgcctgctgactacccagcccagagccccctgtggattgaccggcagtggcagtatgatgccaaccccttcctgcagagcgtgcaccgctgcatgaccagccggctgctgcagctgcctgacaagcacagcgtgacagccctgctgaacacctgggcccagagcgtgcaccaggcctgcctgtctgctgcctag

SEQ ID NO: 159019 - DNA, 570 bp, synthetic construct
  misc_feature 1..570: note = Description of Artificial Sequence: Synthetic coding sequence
  source 1..570: mol_type = other DNA
atgcagcagcagttccaggccgtggtgcagcagcagcagcagctgcagcagcagcagcagcagcagcagcacctgatcaagctgcaccaccagaaccagcagcagatccagcagcagcagcagcagctgcagagaattgcccagctgcagctgcagcagcagcagcagcagcagcagcagcagcagcagcagcagcagcaggccctgcaggcccagccccccatccagcagccccccatgcagcagccccagcccccacccagccaggccctgccccagcagctgcagcagatgcaccacacccagcaccaccagcccccaccccagccccagcagccccctgtggcccagaaccagcccagccagctgcccccccagagccagacccagcccctggtgtcccaggcccaggccctgcccggccagatgctgtacacccagccccccctgaagtttgtgcgggcccccatggtggtgcagcagccccctgtgcagccccaggtgcagcagcagcagacagctgtgcagacagcccaggccgcccagatggtggcccctggggtgcagtag

SEQ ID NO: 159020 - DNA, 1956 bp, synthetic construct
  misc_feature 1..1956: note = Description of Artificial Sequence: Synthetic coding sequence
  source 1..1956: mol_type = other DNA
atgtctggagtgcgggctgtgcgcatcagcattgaaagtgcctgtgagaagcaggtgcatgaggtgggcctggatggaacagagacctacctgccccccctgtccatgagccagaacctggcccggctggcccagagaattgacttcagccagggcagcggcagcgaggaggaggaggccgccggcacagaaggagatgcccaggagtggccaggagctggcagcagcgctgaccaggatgatgaggagggcgtggtgaagttccagcccagcctgtggccctgggacagcgtgaggaacaacctgcggagcgccctgacagagatgtgtgtgctgtatgatgtgctgagcatcgtgcgggacaagaagttcatgaccctggaccctgtgtcccaggatgccctgccccccaagcagaacccccagaccctgcagctgatcagcaagaagaagagcctggccggggccgcccagatcctgctgaagggagctgagcggctgaccaagtctgtgacagagaaccaggagaacaagctgcagagggacttcaacagcgagctgctgcggctgcggcagcactggaagctgaggaaggtgggggacaagatcctgggggacctgagctacagatctgctggcagcctcttcccccaccacggcacctttgaggtgatcaagaacacagacctggacctggacaagaagatccctgaggactactgccccctggatgtgcagatccccagcgacctggagggcagcgcctacatcaaggtgtccatccagaagcaggccccagacatcggggacctgggcaccgtgaacctcttcaagaggcccctgcccaagagcaagccaggcagcccccactggcagaccaagctggaggccgcccagaatgtgctgctgtgcaaggagatctttgcccagctgagccgggaggccgtgcagatcaagagccaggtgccccacatcgtggtgaagaaccagatcatcagccagcccttccccagcctgcagctgagcatcagcctgtgccacagcagcaatgacaagaagagccagaagtttgccacagagaagcagtgcccagaggaccacctgtatgtgctggagcacaacctgcacctgctgatccgggagttccacaagcagaccctgagcagcatcatgatgccccacccagccagcgcccccttcggccacaagaggatgaggctgagcggcccccaggcctttgacaagaatgagatcaacagcctgcagagcagcgagggcctgctggagaagatcatcaagcaggccaagcacatcttcctgcggagcagagctgctgccaccatcgacagcctggccagcagaattgaggacccccagatccaggcccactggagcaacatcaatgatgtgtatgagagctctgtgaaggtgctgatcaccagccagggctatgagcagatctgcaagagcatccagctgcagctgaacattggagtggagcagatccgggtggtgcacagagatggccgggtcatcaccctgagctaccaggagcaggagctgcaggacttcctgctgagccagatgagccagcaccaggtgcatgctgtgcagcagctggccaaggtgatgggctggcaggtgctgtccttcagcaaccacgtgggcctgggccccatcgagagcattggaaatgccagcgccatcaccgtggccagccccagcggggactatgccatctctgtgagaaatggacctgagagcggcagcaagatcatggtgcagttccccaggaaccagtgcaaggacctgcccaagagtgatgtgctgcaggacaacaagtggagccacctgcggggccccttcaaggaggtgcagtggaacaagatggagggcaggaactttgtgtacaagatggagctgctgatgtctgccctgagcccctgcctgctgtag

SEQ ID NO: 159021 - DNA, 1866 bp, synthetic construct
  misc_feature 1..1866: note = Description of Artificial Sequence: Synthetic coding sequence
  source 1..1866: mol_type = other DNA
atgtctggagtgcgggctgtgcgcatcagcattgaaagtgcctgtgagaagcaggtgcatgaggtgggcctggatggaacagagacctacctgccccccctgtccatgagccaggagtggccaggagctggcagcagcgctgaccaggatgatgaggagggcgtggtgaagttccagcccagcctgtggccctgggacagcgtgaggaacaacctgcggagcgccctgacagagatgtgtgtgctgtatgatgtgctgagcatcgtgcgggacaagaagttcatgaccctggaccctgtgtcccaggatgccctgccccccaagcagaacccccagaccctgcagctgatcagcaagaagaagagcctggccggggccgcccagatcctgctgaagggagctgagcggctgaccaagtctgtgacagagaaccaggagaacaagctgcagagggacttcaacagcgagctgctgcggctgcggcagcactggaagctgaggaaggtgggggacaagatcctgggggacctgagctacagatctgctggcagcctcttcccccaccacggcacctttgaggtgatcaagaacacagacctggacctggacaagaagatccctgaggactactgccccctggatgtgcagatccccagcgacctggagggcagcgcctacatcaaggtgtccatccagaagcaggccccagacatcggggacctgggcaccgtgaacctcttcaagaggcccctgcccaagagcaagccaggcagcccccactggcagaccaagctggaggccgcccagaatgtgctgctgtgcaaggagatctttgcccagctgagccgggaggccgtgcagatcaagagccaggtgccccacatcgtggtgaagaaccagatcatcagccagcccttccccagcctgcagctgagcatcagcctgtgccacagcagcaatgacaagaagagccagaagtttgccacagagaagcagtgcccagaggaccacctgtatgtgctggagcacaacctgcacctgctgatccgggagttccacaagcagaccctgagcagcatcatgatgccccacccagccagcgcccccttcggccacaagaggatgaggctgagcggcccccaggcctttgacaagaatgagatcaacagcctgcagagcagcgagggcctgctggagaagatcatcaagcaggccaagcacatcttcctgcggagcagagctgctgccaccatcgacagcctggccagcagaattgaggacccccagatccaggcccactggagcaacatcaatgatgtgtatgagagctctgtgaaggtgctgatcaccagccagggctatgagcagatctgcaagagcatccagctgcagctgaacattggagtggagcagatccgggtggtgcacagagatggccgggtcatcaccctgagctaccaggagcaggagctgcaggacttcctgctgagccagatgagccagcaccaggtgcatgctgtgcagcagctggccaaggtgatgggctggcaggtgctgtccttcagcaaccacgtgggcctgggccccatcgagagcattggaaatgccagcgccatcaccgtggccagccccagcggggactatgccatctctgtgagaaatggacctgagagcggcagcaagatcatggtgcagttccccaggaaccagtgcaaggacctgcccaagagtgatgtgctgcaggacaacaagtggagccacctgcggggccccttcaaggaggtgcagtggaacaagatggagggcaggaactttgtgtacaagatggagctgctgatgtctgccctgagcccctgcctgctgtag

SEQ ID NO: 159022 - DNA, 438 bp, synthetic construct
  misc_feature 1..438: note = Description of Artificial Sequence: Synthetic coding sequence
  source 1..438: mol_type = other DNA
atgtctggagtgcgggctgtgcgcatcagcattgaaagtgcctgtgagaagcaggtgcatgaggtgggcctggatggaacagagacctacctgccccccctgtccatgagccagaacctggcccggctggcccagagaattgacttcagccagggcagcggcagcgaggaggaggaggccgccggcacagaaggagatgcccaggagtggccaggagctggcagcagcgctgaccaggatgatgaggagggcgtggtgaagttccagcccagcctgtggccctgggacagcgtgaggaacaacctgcggagcgccctgacagagatgtgtgtgctgtatgatgtgctgagcatcgtgcgggacaagaagttcatgaccctggaccctgtgtcccaggatgccctgccccccaagcaggtgtttgtggacttcaactag

SEQ ID NO: 159023 - DNA, 627 bp, synthetic construct
  misc_feature 1..627: note = Description of Artificial Sequence: Synthetic coding sequence
  source 1..627: mol_type = other DNA
atggaggcccctcctgtgaccatgatgcctgtgactggaggcaccatcaacatgatggagtacctgctgcagggctctgtgctggaccacagcctggagagcctcatccaccggctgcggggcctgtgtgacaacatggagcctgagaccttcctggaccacgagatggtgttcctgctgaagggccagcaggccagcccctttgtgctgcgggcccggcgctccatggacagagctggggccccctggcacctgcgctacctgggccagcctgagatgggagacaagaacagacatgccctggtgaggaactgtgtggacatcgccaccagcgagaacctgacagacttcctgatggagatgggcttcaggatggaccatgaatttgtggccaagggccacctgttcaggaagggcatcatgaagatcatggtgtacaagatcttccgcatcctggtgcccggcaacacagacagcacagaggccctgagcctgagctacctggtggagctgtctgtggtggccccagctggccaggacatggtgtctgatgacatgaagaactttgctgagcagctgaagcccctggtgcacctggagaagattgaccccaagaggctgatgtag

SEQ ID NO: 159024 - DNA, 627 bp, synthetic construct; identical to SEQ ID NO: 159023
  misc_feature 1..627: note = Description of Artificial Sequence: Synthetic coding sequence
  source 1..627: mol_type = other DNA

SEQ ID NO: 159025 - DNA, 585 bp, synthetic construct
  misc_feature 1..585: note = Description of Artificial Sequence: Synthetic coding sequence
  source 1..585: mol_type = other DNA
atggagaacttcaccgccctgtttggagcccaggccgaccccccacctccacccacagccctgggctttggacctgggaagcccccacctcctcctcctcctcctgctgggggcggccctggaacagcccccccacccacagctgccacagcccctcctggagctgacaagagcggggccggctgcggccccttctacctgatgagggagctgcccggcagcacagagctgaccggcagcaccaacctgatcacccactacaacctggagcaggcctacaacaagttctgtgggaagaaggtgaaggagaagctgagcaacttcctgcctgacctgcccggcatgattgacctgcccggcagccatgacaacagcagcctgcggagcctgattgagaagccacccatcctgagcagcagcttcaaccccatcaccggcaccatgctggccggcttccggctgcacacaggccccctgcctgagcagtgccgcctgatgcacatccagccccccaagaagaagaacaagcacaagcacaagcagagcaggacccaggaccctgtgcccccaggcaagcccagctag

SEQ ID NO: 159026 - DNA, 735 bp, synthetic construct
  misc_feature 1..735: note = Description of Artificial Sequence: Synthetic coding sequence
  source 1..735: mol_type = other DNA
atggagaacttcaccgccctgtttggagcccaggccgaccccccacctccacccacagccctgggctttggacctgggaagcccccacctcctcctcctcctcctgctgggggcggccctggaacagcccccccacccacagctgccacagcccctcctggagctgacaagagcggggccggctgcggccccttctacctgatgagggagctgcccggcagcacagagctgaccggcagcaccaacctgatcacccactacaacctggagcaggcctacaacaagttctgtgggaagaaggtgaaggagaagctgagcaacttcctgcctgacctgcccggcatgattgacctgcccggcagccatgacaacagcagcctgcggagcctgattgagaagccacccatcctgagcagcagcttcaaccccatcaccggcaccatgctggccggcttccggctgcacacaggccccctgcctgagcagtgccgcctgatgcacatccagccccccaagaagaagaacaagcacaagcacaagcagagcaggacccaggaccctgtgcccccagagacccccagcgacagcgaccacaagaagaagaagaagaagaaggaggaggaccctgagaggaagaggaagaagaaggagaagaagaagaagaagaacagacacagcccagaccaccctggcatgggcagcagccaggccagcagcagcagcagcctgaggtag

SEQ ID NO: 159027 - DNA, 639 bp, synthetic construct
  misc_feature 1..639: note = Description of Artificial Sequence: Synthetic coding sequence
  source 1..639: mol_type = other DNA
atgggcgtgacctgtgtgtcccagatgcctgtggccgagggcaagtctgtgcagcagacagtggagctgctgaccaggaagctggagatgctgggcgctgagaagcagggcaccttctgtgtggactgtgagacctaccacacagctgccagcaccctgggcagccagggccagacaggcaagctgatgtatgtgatgcacaacagcgagtaccccctgagctgctttgccctgtttgaaaatggcccctgcctgattgctgacaccaactttgatgtgctgatggtgaagctgaagggcttcttccagagcgccaaggccagcaagattgagacccggggcacccgctaccagtactgtgacttcctggtgaaggtgggcaccgtgaccatgggccccagcgcccggggcatctctgtggaggtggagtatggcccctgtgtggtggccagtgactgctggagcctgctgctggagttcctgcagagcttcctgggcagccacacccctggggccccagctgtgtttggaaacagacatgatgctgtgtatggccctgctgacaccatggtgcagtacatggagctgttcaacaagatcaggaagcagcagcaggtgcctgtggccggcatcagatag

SEQ ID NO: 159028 - DNA, 423 bp, synthetic construct
  misc_feature 1..423: note = Description of Artificial Sequence: Synthetic coding sequence
  source 1..423: mol_type = other DNA
atgcctgtggccgagggcaagtctgtgcagcagacagtggagctgctgaccaggaagctggagatgctgggcgctgagaagcagggcaccttctgtgtggactgtgagacctaccacacagctgccagcaccctgggcagccagggccagacaggcaagctgatgtatgtgatgcacaacagcgagtaccccctgagctgctttgccctgtttgaaaatggcccctgcctgattgctgacaccaactttgatgtgctgatggtgaagctgaagggcttcttccagagcgccaaggccagcaagattgagacccggggcacccgctaccagtactgtgacttcctggtgaaggtgggcaccgtgaccatgggccccagcgcccggggcatctctgtggaggtggagtatggcccctgtgtgtag

SEQ ID NO: 159029 - DNA, 438 bp, synthetic construct
  misc_feature 1..438: note = Description of Artificial Sequence: Synthetic coding sequence
  source 1..438: mol_type = other DNA
atgggcgtgacctgtgtgtcccagatgcctgtggccgagggcaagtctgtgcagcagacagtggagctgctgaccaggaagctggagatgctgggcgctgagaagcagggcaccttctgtgtggactgtgagacctaccacacagctgccagcaccctgggcagccagggccagacaggcaagctgatgtatgtgatgcacaacagcgagtaccccctgagctgctttgccctgtttgaaaatggcccctgcctgattgctgacaccaactttgatgtgctgatggtgaagctgaagggcttcttccagagcgccaaggccagcaagattgagacccggggcacccgctaccagtactgtgacttcctggtgaaggtgggcaccgtgaccatgggccccagcgcccggggcatctctgtggaggtgcggccctggtag

SEQ ID NO: 159030 - DNA, 372 bp, synthetic construct
  misc_feature 1..372: note = Description of Artificial Sequence: Synthetic coding sequence
  source 1..372: mol_type = other DNA
atgggcgtgacctgtgtgtcccagatgcctgtggccgagggcaagtctgtgcagcagacagtggagctgctgaccaggaagctggagatgctgggcgctgagaagcagggcaccttctgtgtggactgtgagacctaccacacagctgccagcaccctgggcagccagggccagacaggcaagctgatgtatgtgatgcacaacagcgagtaccccctgagctgctttgccctgtttgaaaatggcccctgcctgattgctgacaccaactttgatgtgctgatggtgaagctgaagggcttcttccagagcgccaaggccagcaagattgagacccggggcacccgctggagcatggcccctgtgtggtag

SEQ ID NO: 159031 - DNA, 435 bp, synthetic construct
  misc_feature 1..435: note = Description of Artificial Sequence: Synthetic coding sequence
  source 1..435: mol_type = other DNA
atggctgaccggctgacccagctgcaggatgctgtgaacagcctggccgaccagttctgcaatgccatcggcgtgctgcagcagtgtggccccccagccagcttcaacaacatccagacagccatcaacaaggaccagcctgccaaccccacagaggagtatgcccagctgtttgctgccctgattgccaggacagccaaggacattgatgtgctgattgacagcctgcccagcgaggagagcacagctgccctgcaggccgccagcctgtacaagctggaggaggagaaccacgaggccgccacctgcctggaggatgtggtgtacagaggagacatgctgctggagaagatccagagcgccctggccgacatcgcccagagccagctgaagaccaggagcggcacccacagccagagcctgcctgacagctag

SEQ ID NO: 159032 - DNA, 4098 bp, synthetic construct
  misc_feature 1..4098: note = Description of Artificial Sequence: Synthetic coding sequence
  source 1..4098: mol_type = other DNA
atggagacccagctgcagagcatctttgaggaggtggtgaagacagaggtgattgaggaggccttccctggcatgttcatggacaccccagaagatgagaagaccaagctgatcagctgcctgggcgccttccggcagttctggggcggcctgagccaggagagccatgagcagtgcatccagtggatcgtgaagttcatccacggccagcacagccccaagaggatctccttcctgtatgactgcctggccatggctgtggagaccggcctgctgcccccccggctggtgtgtgagagcctcatcaacagcgacaccctggagtgggagaggacccagctgtgggccctgaccttcaagctggtgaggaagatcatcggcggcgtggactacaagggcgtgcgggacctgctgaaggtgatcctggagaagatcctgaccatccccaacacagtgagcagcgctgtggtgcagcagctgctggccgcccgggaggtgattgcctacatcctggagagaaatgcctgcctgctgcctgcctactttgctgtgacagagatcaggaagctgtacccagagggcaagctgccccactggctgctgggcaacctggtgtctgactttgtggacaccttccggcccacagcccgcatcaacagcatctgtggccgctgcagcctgctgcctgtggtgaacaacagcggggccatctgcaacagctggaagctggaccctgccaccctgcgcttccccctgaagggcctgctgccctatgacaaggacctgtttgagccccagacagccctgctgcgctacgtgctggagcagccctacagccgggacatggtgtgcaacatgctgggcctgaacaagcagaccctgaacatcgcccagcacaagcagcgctgccctgtgctggaggaccagctggtggacctggtggtgtatgccatggagaggagtgaaacagaggagaagtttgatgatggcggcaccagccagctgctgtggcagcacctgagcagccagctgatcttctttgtgctcttccagtttgccagcttcccccacatggtgctgagcctgcaccagaagctggccggccggggcctcatcaagggccgggaccacctgatgtgggtgctgctgcagttcatcagcggcagcatccagaagaatgccctggccgacttcctgcctgtgatgaagctgtttgacctgctgtacccagagaaggagtacatccctgtgcctgacatcaacaagccccagagcacccacgcctttgccatgacctgcatctggatccacctgaacaggaaggcccagaatgacaacagcaagctgcagatccccatcccccacagcctgcggctgcaccacgagttcctgcagcagagcctgaggaacaagagcctgcagatgaatgactacaagatcgccctgctgtgcaatgcctacagcaccaacagcgagtgcttcaccctgcccatgggcgccctggtggagaccatctatggaaatggcatcatgaggatccccctgcccggcaccaactgcatggccagcggcagcatcacccccctgcccatgaacctgctggacagcctgactgtgcacgccaagatgagcctcatccacagcatcgccaccagggtcatcaagctggcccacgccaagagctctgtggccctggccccagccctggtggagacctacagccggctgctggtgtacatggagattgagagcctgggcatcaagggcttcatcagccagctgctgcccaccgtcttcaagagccacgcctggggcatcctgcacaccctgctggagatgttctcctacaggatgcaccacatccagccccactacagagtgcagctgctgagccacctgcacaccctggccgctgtggcccagaccaaccagaaccagctgcacctgtgtgtggagagcacagccctgcggctcatcacagccctgggcagcagcgaggtgcagccccagttcacccgcttcctgagtgaccccaagacagtgctgtctgctgagagcgaggagctgaacagagccctgatcctgaccctggcccgggccacccacgtgacagacttcttcaccggcagtgacagcatccagggcacctggtgcaaggacatcctgcagaccatcatgtccttcaccccccacaactgggccagccacaccctgagctgcttccctggccccctgcaggccttcttcaagcagaacaacgtgccccaggagagccgcttcaacctgaagaagaatgtggaggaggagtacaggaagtggaagtccatgagcaatgaaaatgacatcatcacccacttctccatgcagggcagccccccactcttcctgtgcctgctgtggaagatgctgctggagacagaccacatcaaccagatcggctacagagtgctggagcgcatcggggcccgggccctggtggcccacgtgaggacctttgctgacttcctggtgtatgagttcagcaccagcgctgggggccagcagctgaacaagtgcatcgagatcctgaatgacatggtgtggaagtacaacatcgtgaccctggacaggctcatcctgtgcctggccatgaggagccatgagggcaatgaggcccaggtgtgctacttcatcatccagctgctgctgctgaagcccaatgacttcaggaacagagtgtctgactttgtgaaggagaacagccctgagcactggctgcagaatgactggcacaccaagcacatgaactaccacaagaagtacccagagaagctgtactttgagggcctggccgagcaggtggacccccctgtgcagatccagagcccctacctgcccatctactttggaaatgtgtgcctgcgcttcctgcctgtgtttgatattgtcatccaccgcttcctggagctgctgcctgtgtccaagagcctggagaccctgctggaccacctgggcggcctgtacaagttccatgacaggcctgtgacctacctgtacaacaccctgcactactatgagatgcacctgcgggaccgggccttcctgaagaggaagctggtgcacgccatcatcggcagcctgaaggacaaccggccccagggctggtgcctgagtgacacctacctgaagtgtgccatgaatgcccgggaggagaacccctgggtgcctgatgacacctactactgccgcctcatcggccgcctggtggacaccatggccggcaagagccctggccccttccccaactgtgactggaggttcaatgagttccccaacccagctgcccacgccctgcacgtgacctgtgtggagctgatggccctggccgtgtctgggaaggaggtgggcaatgccctgctgaatgtggtgctgaagagccagcccctggtgccccgggagaacatcacagcctggatgaatgccatcggcctcatcatcacagccctgcctgagccctactggatcgtgctgcatgaccgcatcgtgtctgtcatcagcagccccagcctgaccagcgagacagagtgggtgggctaccccttccggctgtttgacttcaccgcctgccaccagagctacagcgagatgagctgcagctacaccctggccctggcccatgctgtgtggcaccacagcagcatcggccagctgagcctcatccccaagttcctgacagaggtgctgctgcccatcgtgaagacagagttccagctgctgtatgtgtaccacctggtgggccccttcctgcagcgcttccagcaggagaggacccgctgcatgattgaaattggagtggccttctatgacatgctgctgaatgtggaccagtgcagcacccacctgaactacatggaccccatctgtgacttcctgtaccacatgaagtacatgttcaccggggacagcgtgaaggagcaggtggagaagatcatctgcaacctgaagccagccctgaagctgcggctgcgcttcatcacccacatcagcaagatggagcctgctgctgtgcccccccaggccatgaacagcggcagccctgccccccagagcaaccagtag

SEQ ID NO: 159033 - DNA, 2661 bp, synthetic construct
  misc_feature 1..2661: note = Description of Artificial Sequence: Synthetic coding sequence
  source 1..2661: mol_type = other DNA
atggagacccagctgcagagcatctttgaggaggtggtgaagacagaggtgattgaggaggccttccctggcatgttcatggacaccccagaagatgagaagaccaagctgatcagctgcctgggcgccttccggcagttctggggcggcctgagccaggagagccatgagcagtgcatccagtggatcgtgaagttcatccacggccagcacagccccaagaggatctccttcctgtatgactgcctggccatggctgtggagaccggcctgctgcccccccggctggtgtgtgagagcctcatcaacagcgacaccctggagtgggagaggacccagctgtgggccctgaccttcaagctggtgaggaagatcatcggcggcgtggactacaagggcgtgcgggacctgctgaaggtgatcctggagaagatcctgaccatccccaacacagtgagcagcgctgtggtgcagcagctgctggccgcccgggaggtgattgcctacatcctggagagaaatgcctgcctgctgcctgcctactttgctgtgacagagatcaggaagctgtacccagagggcaagctgccccactggctgctgggcaacctggtgtctgactttgtggacaccttccggcccacagcccgcatcaacagcatctgtggccgctgcagcctgctgcctgtggtgaacaacagcggggccatctgcaacagctggaagctggaccctgccaccctgcgcttccccctgaagggcctgctgccctatgacaaggacctgtttgagccccagacagccctgctgcgctacgtgctggagcagccctacagccgggacatggtgtgcaacatgctgggcctgaacaagcagaccctgaacatcgcccagcacaagcagcgctgccctgtgctggaggaccagctggtggacctggtggtgtatgccatggagaggagtgaaacagaggagaagtttgatgatggcggcaccagccagctgctgtggcagcacctgagcagccagctgatcttctttgtgctcttccagtttgccagcttcccccacatggtgctgagcctgcaccagaagctggccggccggggcctcatcaagggccgggaccacctgatgtgggtgctgctgcagttcatcagcggcagcatccagaagaatgccctggccgacttcctgcctgtgatgaagctgtttgacctgctgtacccagagaaggagtacatccctgtgcctgacatcaacaagccccagagcacccacgcctttgccatgacctgcatctggatccacctgaacaggaaggcccagaatgacaacagcaagctgcagatccccatcccccacagcctgcggctgcaccacgagttcctgcagcagagcctgaggaacaagagcctgcagatgaatgactacaagatcgccctgctgtgcaatgcctacagcaccaacagcgagtgcttcaccctgcccatgggcgccctggtggagaccatctatggaaatggcatcatgaggatccccctgcccggcaccaactgcatggccagcggcagcatcacccccctgcccatgaacctgctggacagcctgactgtgcacgccaagatgagcctcatccacagcatcgccaccagggtcatcaagctggcccacgccaagagctctgtggccctggccccagccctggtggagacctacagccggctgctggtgtacatggagattgagagcctgggcatcaagggcttcatcagccagctgctgcccaccgtcttcaagagccacgcctggggcatcctgcacaccctgctggagatgttctcctacaggatgcaccacatccagccccactacagagtgcagctgctgagccacctgcacaccctggccgctgtggcccagaccaaccagaaccagctgcacctgtgtgtggagagcacagccctgcggctcatcacagccctgggcagcagcgaggtgcagccccagttcacccgcttcctgagtgaccccaagacagtgctgtctgctgagagcgaggagctgaacagagccctgatcctgaccctggcccgggccacccacgtgacagacttcttcaccggcagtgacagcatccagggcacctggtgcaaggacatcctgcagaccatcatgtccttcaccccccacaactgggccagccacaccctgagctgcttccctggccccctgcaggccttcttcaagcagaacaacgtgccccaggagagccgcttcaacctgaagaagaatgtggaggaggagtacaggaagtggaagtccatgagcaatgaaaatgacatcatcacccacttctccatgcagggcagccccccactcttcctgtgcctgctgtggaagatgctgctggagacagaccacatcaaccagatcggctacagagtgctggagcgcatcggggcccgggccctggtggcccacgtgaggacctttgctgacttcctggtgtatgagttcagcaccagcgctgggggccagcagctgaacaagtgcatcgagatcctgaatgacatggtgtggaagtacaacatcgtgaccctggacaggctcatcctgtgcctggtgcgcatcaacaccttcctgagcctcttctcctag

SEQ ID NO: 159034 - DNA, 4125 bp, synthetic construct
  misc_feature 1..4125: note = Description of Artificial Sequence: Synthetic coding sequence
  source 1..4125: mol_type = other DNA
atggagacccagctgcagagcatctttgaggaggtggtgaagacagaggtgattgaggaggccttccctggcatgttcatggacaccccagaagatgagaagaccaagctgatcagctgcctgggcgccttccggcagttctggggcggcctgagccaggagagccatgagcagtgcatccagtggatcgtgaagttcatccacggccagcacagccccaagaggatctccttcctgtatgactgcctggccatggctgtggagaccggcctgctgcccccccggctggtgtgtgagagcctcatcaacagcgacaccctggagtgggagaggacccagctgtgggccctgaccttcaagctggtgaggaagatcatcggcggcgtggactacaagggcgtgcgggacctgctgaaggtgatcctggagaagatcctgaccatccccaacacagtgagcagcgctgtggtgcagcagctgctggccgcccgggaggtgattgcctacatcctggagagaaatgcctgcctgctgcctgcctactttgctgtgacagagatcaggaagctgtacccagagggcaagctgccccactggctgctgggcaacctggtgtctgactttgtggacaccttccggcccacagcccgcatcaacagcatctgtggccgctgcagcctgctgcctgtggtgaacaacagcggggccatctgcaacagctggaagctggaccctgccaccctgcgcttccccctgaagggcctgctgccctatgacaaggacctgtttgagccccagacagccctgctgcgctacgtgctggagcagccctacagccgggacatggtgtgcaacatgctgggcctgaacaagcagaccctgaacatcgcccagcacaagcagcgctgccctgtgctggaggaccagctggtggacctggtggtgtatgccatggagaggagtgaaacagaggagaagtttgatgatggcggcaccagccagctgctgtggcagcacctgagcagccagctgatcttctttgtgctcttccagtttgccagcttcccccacatggtgctgagcctgcaccagaagctggccggccggggcctcatcaagggccgggaccacctgatgtgggtgctgctgcagttcatcagcggcagcatccagaagaatgccctggccgacttcctgcctgtgatgaagctgtttgacctgctgtacccagagaaggagtacatccctgtgcctgacatcaacaagccccagagcacccacgcctttgccatgacctgcatctggatccacctgaacaggaaggcccagaatgacaacagcaagctgcagatccccatcccccacagcctgcggctgcaccacgagttcctgcagcagagcctgaggaacaagagcctgcagatgaatgactacaagatcgccctgctgtgcaatgcctacagcaccaacagcgagtgcttcaccctgcccatgggcgccctggtggagaccatctatggaaatggcatcatgaggatccccctgcccggcaccaactgcatggccagcggcagcatcacccccctgcccatgaacctgctggacagcctgactgtgcacgccaagatgagcctcatccacagcatcgccaccagggtcatcaagctggcccacgccaagagctctgtggccctggccccagccctggtggagacctacagccggctgctggtgtacatggagattgagagcctgggcatcaagggcttcatcagccagctgctgcccaccgtcttcaagagccacgcctggggcatcctgcacaccctgctggagatgttctcctacaggatgcaccacatccagccccactacagagtgcagctgctgagccacctgcacaccctggccgctgtggcccagaccaaccagaaccagctgcacctgtgtgtggagagcacagccctgcggctcatcacagccctgggcagcagcgaggtgcagccccagttcacccgcttcctgagtgaccccaagacagtgctgtctgctgagagcgaggagctgaacagagccctgatcctgaccctggcccgggccacccacgtgacagacttcttcaccggcagtgacagcatccagggcacctggtgcaaggacatcctgcagaccatcatgtccttcaccccccacaactgggccagccacaccctgagctgcttccctggccccctgcaggccttcttcaagcagaacaacgtgccccaggagagccgcttcaacctgaagaagaatgtggaggaggagtacaggaagtggaagtccatgagcaatgaaaatgacatcatcacccacttctccatgcagggcagccccccactcttcctgtgcctgctgtggaagatgctgctggagacagaccacatcaaccagatcggctacagagtgctggagcgcatcggggcccgggccctggtggcccacgtgaggacctttgctgacttcctggtgtatgagttcagcaccagcgctgggggccagcagctgaacaagtgcatcgagatcctgaatgacatggtgtggaagtacaacatcgtgaccctggacaggctcatcctgtgcctggccatgaggagccatgagggcaatgaggcccaggtgtgctacttcatcatccagctgctgctgctgaagcccaatgacttcaggaacagagtgtctgactttgtgaaggagaacagccctgagcactggctgcagaatgactggcacaccaagcacatgaactaccacaagaagtacccagagaagctgtactttgagggcctggccgagcaggtggacccccctgtgcagatccagagcccctacctgcccatctactttggaaatgtgtgcctgcgcttcctgcctgtgtttgatattgtcatccaccgcttcctggagctgctgcctgtgtccaagagcctggagaccctgctggaccacctgggcggcctgtacaagttccatgacaggcctgtgacctacctgtacaacaccctgcactactatgagatgcacctgcgggaccgggccttcctgaagaggaagctggtgcacgccatcatcggcagcctgaaggacaaccggccccagggctggtgcctgagtgacacctacctgaagtgtgccatgaatgcccgggaggagaacccctgggtgcctgatgacacctactactgccgcctcatcggccgcctggtggacaccatggccggcaagagccctggccccttccccaactgtgactggaggttcaatgagttccccaacccagctgcccacgccctgcacgtgacctgtgtggagctgatggccctggccgtgtctgggaaggaggtgggcaatgccctgctgaatgtggtgctgaagagccagcccctggtgccccgggagaacatcacagcctggatgaatgccatcggcctcatcatcacagccctgcctgagccctactggatcgtgctgcatgaccgcatcgtgtctgtcatcagcagccccagcctgaccagcgagacagagtgggtgggctaccccttccggctgtttgacttcaccgcctgccaccagagctacagcgagatgagctgcagctacaccctggccctggcccatgctgtgtggcaccacagcagcatcggccagctgagcctcatccccaagttcctgacagaggtgctgctgcccatcgtgaagacagagttccagctgctgtatgtgtaccacctggtgggccccttcctgcagcgcttccagcaggagaggacccgctgcatgattgaaattggagtggccttctatgacatgctgctgaatgtggaccagtgcagcacccacctgaactacatggaccccatctgtgacttcctgtaccacatgaagtacatgttcaccggggacagcgtgaaggagcaggtgaagaagatcatctgcaacctgaagccagccctgaagctgcggctgcgcttcatcacccacatcagcaagatggagcctgctgctgtgcccccccaggccatgaacagcggcagccctgccccccagagcaaccaggtgcctgtgtccctgcctgtgacccagtag

SEQ ID NO: 159035 - DNA, 4095 bp, synthetic construct
  misc_feature 1..4095: note = Description of Artificial Sequence: Synthetic coding sequence
  source 1..4095: mol_type = other DNA
atggagacccagctgcagagcatctttgaggaggtggtgaagacagaggtgattgaggaggccttccctggcatgttcatggacaccccagaagatgagaagaccaagctgatcagctgcctgggcgccttccggcagttctggggcggcctgagccaggagagccatgagcagtgcatccagtggatcgtgaagttcatccacggccagcacagccccaagaggatctccttcctgtatgactgcctggccatggctgtggagaccggcctgctgcccccccggctggtgtgtgagagcctcatcaacagcgacaccctggagtgggagaggacccagctgtgggccctgaccttcaagctggtgaggaagatcatcggcggcgtggactacaagggcgtgcgggacctgctgaaggtgatcctggagaagatcctgaccatccccaacacagtgagcagcgctgtggtgcagcagctgctggccgcccgggaggtgattgcctacatcctggagagaaatgcctgcctgctgcctgcctactttgctgtgacagagatcaggaagctgtacccagagggcaagctgccccactggctgctgggcaacctggtgtctgactttgtggacaccttccggcccacagcccgcatcaacagcatctgtggccgctgcagcctgctgcctgtggtgaacaacagcggggccatctgcaacagctggaagctggaccctgccaccctgcgcttccccctgaagggcctgctgccctatgacaaggacctgtttgagccccagacagccctgctgcgctacgtgctggagcagccctacagccgggacatggtgtgcaacatgctgggcctgaacaagcagcacaagcagcgctgccctgtgctggaggaccagctggtggacctggtggtgtatgccatggagaggagtgaaacagaggagaagtttgatgatggcggcaccagccagctgctgtggcagcacctgagcagccagctgatcttctttgtgctcttccagtttgccagcttcccccacatggtgctgagcctgcaccagaagctggccggccggggcctcatcaagggccgggaccacctgatgtgggtgctgctgcagttcatcagcggcagcatccagaagaatgccctggccgacttcctgcctgtgatgaagctgtttgacctgctgtacccagagaaggagtacatccctgtgcctgacatcaacaagccccagagcacccacgcctttgccatgacctgcatctggatccacctgaacaggaaggcccagaatgacaacagcaagctgcagatccccatcccccacagcctgcggctgcaccacgagttcctgcagcagagcctgaggaacaagagcctgcagatgaatgactacaagatcgccctgctgtgcaatgcctacagcaccaacagcgagtgcttcaccctgcccatgggcgccctggtggagaccatctatggaaatggcatcatgaggatccccctgcccggcaccaactgcatggccagcggcagcatcacccccctgcccatgaacctgctggacagcctgactgtgcacgccaagatgagcctcatccacagcatcgccaccagggtcatcaagctggcccacgccaagagctctgtggccctggccccagccctggtggagacctacagccggctgctggtgtacatggagattgagagcctgggcatcaagggcttcatcagccagctgctgcccaccgtcttcaagagccacgcctggggcatcctgcacaccctgctggagatgttctcctacaggatgcaccacatccagccccactacagagtgcagctgctgagccacctgcacaccctggccgctgtggcccagaccaaccagaaccagctgcacctgtgtgtggagagcacagccctgcggctcatcacagccctgggcagcagcgaggtgcagccccagttcacccgcttcctgagtgaccccaagacagtgctgtctgctgagagcgaggagctgaacagagccctgatcctgaccctggcccgggccacccacgtgacagacttcttcaccggcagtgacagcatccagggcacctggtgcaaggacatcctgcagaccatcatgtccttcaccccccacaactgggccagccacaccctgagctgcttccctggccccctgcaggccttcttcaagcagaacaacgtgccccaggagagccgcttcaacctgaagaagaatgtggaggaggagtacaggaagtggaagtccatgagcaatgaaaatgacatcatcacccacttctccatgcagggcagccccccactcttcctgtgcctgctgtggaagatgctgctggagacagaccacatcaaccagatcggctacagagtgctggagcgcatcggggcccgggccctggtggcccacgtgaggacctttgctgacttcctggtgtatgagttcagcaccagcgctgggggccagcagctgaacaagtgcatcgagatcctgaatgacatggtgtggaagtacaacatcgtgaccctggacaggctcatcctgtgcctggccatgaggagccatgagggcaatgaggcccaggtgtgctacttcatcatccagctgctgctgctgaagcccaatgacttcaggaacagagtgtctgactttgtgaaggagaacagccctgagcactggctgcagaatgactggcacaccaagcacatgaactaccacaagaagtacccagagaagctgtactttgagggcctggccgagcaggtggacccccctgtgcagatccagagcccctacctgcccatctactttggaaatgtgtgcctgcgcttcctgcctgtgtttgatattgtcatccaccgcttcctggagctgctgcctgtgtccaagagcctggagaccctgctggaccacctgggcggcctgtacaagttccatgacaggcctgtgacctacctgtacaacaccctgcactactatgagatgcacctgcgggaccgggccttcctgaagaggaagctggtgcacgccatcatcggcagcctgaaggacaaccggccccagggctggtgcctgagtgacacctacctgaagtgtgccatgaatgcccgggaggagaacccctgggtgcctgatgacacctactactgccgcctcatcggccgcctggtggacaccatggccggcaagagccctggccccttccccaactgtgactggaggttcaatgagttccccaacccagctgcccacgccctgcacgtgacctgtgtggagctgatggccctggccgtgtctgggaaggaggtgggcaatgccctgctgaatgtggtgctgaagagccagcccctggtgccccgggagaacatcacagcctggatgaatgccatcggcctcatcatcacagccctgcctgagccctactggatcgtgctgcatgaccgcatcgtgtctgtcatcagcagccccagcctgaccagcgagacagagtgggtgggctaccccttccggctgtttgacttcaccgcctgccaccagagctacagcgagatgagctgcagctacaccctggccctggcccatgctgtgtggcaccacagcagcatcggccagctgagcctcatccccaagttcctgacagaggtgctgctgcccatcgtgaagacagagttccagctgctgtatgtgtaccacctggtgggccccttcctgcagcgcttccagcaggagaggacccgctgcatgattgaaattggagtggccttctatgacatgctgctgaatgtggaccagtgcagcacccacctgaactacatggaccccatctgtgacttcctgtaccacatgaagtacatgttcaccggggacagcgtgaaggagcaggtggagaagatcatctgcaacctgaagccagccctgaagctgcggctgcgcttcatcacccacatcagcaagatggagcctgctgctgtgcccccccaggccatgaacagcggcagccctgccccccagagcaaccaggtggacaccctgacctag

SEQ ID NO: 159036 - DNA, 4107 bp, synthetic construct
  misc_feature 1..4107: note = Description of Artificial Sequence: Synthetic coding sequence
  source 1..4107: mol_type = other DNA
atggagacccagctgcagagcatctttgaggaggtggtgaagacagaggtgattgaggaggccttccctggcatgttcatggacaccccagaagatgagaagaccaagctgatcagctgcctgggcgccttccggcagttctggggcggcctgagccaggagagccatgagcagtgcatccagtggatcgtgaagttcatccacggccagcacagccccaagaggatctccttcctgtatgactgcctggccatggctgtggagaccggcctgctgcccccccggctggtgtgtgagagcctcatcaacagcgacaccctggagtgggagaggacccagctgtgggccctgaccttcaagctggtgaggaagatcatcggcggcgtggactacaagggcgtgcgggacctgctgaaggtgatcctggagaagatcctgaccatccccaacacagtgagcagcgctgtggtgcagcagctgctggccgcccgggaggtgattgcctacatcctggagagaaatgcctgcctgctgcctgcctactttgctgtgacagagatcaggaagctgtacccagagggcaagctgccccactggctgctgggcaacctggtgtctgactttgtggacaccttccggcccacagcccgcatcaacagcatctgtggccgctgcagcctgctgcctgtggtgaacaacagcggggccatctgcaacagctggaagctggaccctgccaccctgcgcttccccctgaagggcctgctgccctatgacaaggacctgtttgagccccagacagccctgctgcgctacgtgctggagcagccctacagccgggacatggtgtgcaacatgctgggcctgaacaagcagcacaagcagcgctgccctgtgctggaggaccagctggtggacctggtggtgtatgccatggagaggagtgaaacagaggagaagtttgatgatggcggcaccagccagctgctgtggcagcacctgagcagccagctgatcttctttgtgctcttccagtttgccagcttcccccacatggtgctgagcctgcaccagaagctggccggccggggcctcatcaagggccgggaccacctgatgtgggtgctgctgcagttcatcagcggcagcatccagaagaatgccctggccgacttcctgcctgtgatgaagctgtttgacctgctgtacccagagaaggagtacatccctgtgcctgacatcaacaagccccagagcacccacgcctttgccatgacctgcatctggatccacctgaacaggaaggcccagaatgacaacagcaagctgcagatccccatcccccacagcctgcggctgcaccacgagttcctgcagcagagcctgaggaacaagagcctgcagatgaatgactacaagatcgccctgctgtgcaatgcctacagcaccaacagcgagtgcttcaccctgcccatgggcgccctggtggagaccatctatggaaatggcatcatgaggatccccctgcccggcaccaactgcatggccagcggcagcatcacccccctgcccatgaacctgctggacagcctgactgtgcacgccaagatgagcctcatccacagcatcgccaccagggtcatcaagctggcccacgccaagagctctgtggccctggccccagccctggtggagacctacagccggctgctggtgtacatggagattgagagcctgggcatcaagggcttcatcagccagctgctgcccaccgtcttcaagagccacgcctggggcatcctgcacaccctgctggagatgttctcctacaggatgcaccacatccagccccactacagagtgcagctgctgagccacctgcacaccctggccgctgtggcccagaccaaccagaaccagctgcacctgtgtgtggagagcacagccctgcggctcatcacagccctgggcagcagcgaggtgcagccccagttcacccgcttcctgagtgaccccaagacagtgctgtctgctgagagcgaggagctgaacagagccctgatcctgaccctggcccgggccacccacgtgacagacttcttcaccggcagtgacagcatccagggcacctggtgcaaggacatcctgcagaccatcatgtccttcaccccccacaactgggccagccacaccctgagctgcttccctggccccctgcaggccttcttcaagcagaacaacgtgccccaggagagccgcttcaacctgaagaagaatgtggaggaggagtacaggaagtggaagtccatgagcaatgaaaatgacatcatcacccacttctccatgcagggcagccccccactcttcctgtgcctgctgtggaagatgctgctggagacagaccacatcaaccagatcggctacagagtgctggagcgcatcggggcccgggccctggtggcccacgtgaggacctttgctgacttcctggtgtatgagttcagcaccagcgctgggggccagcagctgaacaagtgcatcgagatcctgaatgacatggtgtggaagtacaacatcgtgaccctggacaggctcatcctgtgcctggccatgaggagccatgagggcaatgaggcccaggtgtgctacttcatcatccagctgctgctgctgaagcccaatgacttcaggaacagagtgtctgactttgtgaaggagaacagccctgagcactggctgcagaatgactggcacaccaagcacatgaactaccacaagaagtacccagagaagctgtactttgagggcctggccgagcaggtggacccccctgtgcagatccagagcccctacctgcccatctactttggaaatgtgtgcctgcgcttcctgcctgtgtttgatattgtcatccaccgcttcctggagctgctgcctgtgtccaagagcctggagaccctgctggaccacctgggcggcctgtacaagttccatgacaggcctgtgacctacctgtacaacaccctgcactactatgagatgcacctgcgggaccgggccttcctgaagaggaagctggtgcacgccatcatcggcagcctgaaggacaaccggccccagggctggtgcctgagtgacacctacctgaagtgtgccatgaatgcccgggaggagaacccctgggtgcctgatgacacctactactgccgcctcatcggccgcctggtggacaccatggccggcaagagccctggccccttccccaactgtgactggaggttcaatgagttccccaacccagctgcccacgccctgcacgtgacctgtgtggagctgatggccctggccgtgtctgggaaggaggtgggcaatgccctgctgaatgtggtgctgaagagccagcccctggtgccccgggagaacatcacagcctggatgaatgccatcggcctcatcatcacagccctgcctgagccctactggatcgtgctgcatgaccgcatcgtgtctgtcatcagcagccccagcctgaccagcgagacagagtgggtgggctaccccttccggctgtttgacttcaccgcctgccaccagagctacagcgagatgagctgcagctacaccctggccctggcccatgctgtgtggcaccacagcagcatcggccagctgagcctcatccccaagttcctgacagaggtgctgctgcccatcgtgaagacagagttccagctgctgtatgtgtaccacctggtgggccccttcctgcagcgcttccagcaggagaggacccgctgcatgattgaaattggagtggccttctatgacatgctgctgaatgtggaccagtgcagcacccacctgaactacatggaccccatctgtgacttcctgtaccacatgaagtacatgttcaccggggacagcgtgaaggagcaggtggagaagatcatctgcaacctgaagccagccctgaagctgcggctgcgcttcatcacccacatcagcaagatggagcctgctgctgtgcccccccaggccatgaacagcggcagccctgccccccagagcaaccaggtgcctgtgtccctgcctgtgacccagtag

SEQ ID NO: 159037 - DNA, 4125 bp, synthetic construct
  misc_feature 1..4125: note = Description of Artificial Sequence: Synthetic coding sequence
  source 1..4125: mol_type = other DNA
atggagacccagctgcagagcatctttgaggaggtggtgaagacagaggtgattgaggaggccttccctggcatgttcatggacaccccagaagatgagaagaccaagctgatcagctgcctgggcgccttccggcagttctggggcggcctgagccaggagagccatgagcagtgcatccagtggatcgtgaagttcatccacggccagcacagccccaagaggatctccttcctgtatgactgcctggccatggctgtggagaccggcctgctgcccccccggctggtgtgtgagagcctcatcaacagcgacaccctggagtgggagaggacccagctgtgggccctgaccttcaagctggtgaggaagatcatcggcggcgtggactacaagggcgtgcgggacctgctgaaggtgatcctggagaagatcctgaccatccccaacacagtgagcagcgctgtggtgcagcagctgctggccgcccgggaggtgattgcctacatcctggagagaaatgcctgcctgctgcctgcctactttgctgtgacagagatcaggaagctgtacccagagggcaagctgccccactggctgctgggcaacctggtgtctgactttgtggacaccttccggcccacagcccgcatcaacagcatctgtggccgctgcagcctgctgcctgtggtgaacaacagcggggccatctgcaacagctggaagctggaccctgccaccctgcgcttccccctgaagggcctgctgccctatgacaaggacctgtttgagccccagacagccctgctgcgctacgtgctggagcagccctacagccgggacatggtgtgcaacatgctgggcctgaacaagcagctgatcagcgccctgcagcacaagcagcgctgccctgtgctggaggaccagctggtggacctggtggtgtatgccatggagaggagtgaaacagaggagaagtttgatgatggcggcaccagccagctgctgtggcagcacctgagcagccagctgatcttctttgtgctcttccagtttgccagcttcccccacatggtgctgagcctgcaccagaagctggccggccggggcctcatcaagggccgggaccacctgatgtgggtgctgctgcagttcatcagcggcagcatccagaagaatgccctggccgacttcctgcctgtgatgaagctgtttgacctgctgtacccagagaaggagtacatccctgtgcctgacatcaacaagccccagagcacccacgcctttgccatgacctgcatctggatccacctgaacaggaaggcccagaatgacaacagcaagctgcagatccccatcccccacagcctgcggctgcaccacgagttcctgcagcagagcctgaggaacaagagcctgcagatgaatgactacaagatcgccctgctgtgcaatgcctacagcaccaacagcgagtgcttcaccctgcccatgggcgccctggtggagaccatctatggaaatggcatcatgaggatccccctgcccggcaccaactgcatggccagcggcagcatcacccccctgcccatgaacctgctggacagcctgactgtgcacgccaagatgagcctcatccacagcatcgccaccagggtcatcaagctggcccacgccaagagctctgtggccctggccccagccctggtggagacctacagccggctgctggtgtacatggagattgagagcctgggcatcaagggcttcatcagccagctgctgcccaccgtcttcaagagccacgcctggggcatcctgcacaccctgctggagatgttctcctacaggatgcaccacatccagccccactacagagtgcagctgctgagccacctgcacaccctggccgctgtggcccagaccaaccagaaccagctgcacctgtgtgtggagagcacagccctgcggctcatcacagccctgggcagcagcgaggtgcagccccagttcacccgcttcctgagtgaccccaagacagtgctgtctgctgagagcgaggagctgaacagagccctgatcctgaccctggcccgggccacccacgtgacagacttcttcaccggcagtgacagcatccagggcacctggtgcaaggacatcctgcagaccatcatgtccttcaccccccacaactgggccagccacaccctgagctgcttccctggccccctgcaggccttcttcaagcagaacaacgtgccccaggagagccgcttcaacctgaagaagaatgtggaggaggagtacaggaagtggaagtccatgagcaatgaaaatgacatcatcacccacttctccatgcagggcagccccccactcttcctgtgcctgctgtggaagatgctgctggagacagaccacatcaaccagatcggctacagagtgctggagcgcatcggggcccgggccctggtggcccacgtgaggacctttgctgacttcctggtgtatgagttcagcaccagcgctgggggccagcagctgaacaagtgcatcgagatcctgaatgacatggtgtggaagtacaacatcgtgaccctggacaggctcatcctgtgcctggccatgaggagccatgagggcaatgaggcccaggtgtgctacttcatcatccagctgctgctgctgaagcccaatgacttcaggaacagagtgtctgactttgtgaaggagaacagccctgagcactggctgcagaatgactggcacaccaagcacatgaactaccacaagaagtacccagagaagctgtactttgagggcctggccgagcaggtggacccccctgtgcagatccagagcccctacctgcccatctactttggaaatgtgtgcctgcgcttcctgcctgtgtttgatattgtcatccaccgcttcctggagctgctgcctgtgtccaagagcctggagaccctgctggaccacctgggcggcctgtacaagttccatgacaggcctgtgacctacctgtacaacaccctgcactactatgagatgcacctgcgggaccgggccttcctgaagaggaagctggtgcacgccatcatcggcagcctgaaggacaaccggccccagggctggtgcctgagtgacacctacctgaagtgtgccatgaatgcccgggaggagaacccctgggtgcctgatgacacctactactgccgcctcatcggccgcctggtggacaccatggccggcaagagccctggccccttccccaactgtgactggaggttcaatgagttccccaacccagctgcccacgccctgcacgtgacctgtgtggagctgatggccctggccgtgtctgggaaggaggtgggcaatgccctgctgaatgtggtgctgaagagccagcccctggtgccccgggagaacatcacagcctggatgaatgccatcggcctcatcatcacagccctgcctgagccctactggatcgtgctgcatgaccgcatcgtgtctgtcatcagcagccccagcctgaccagcgagacagagtgggtgggctaccccttccggctgtttgacttcaccgcctgccaccagagctacagcgagatgagctgcagctacaccctggccctggcccatgctgtgtggcaccacagcagcatcggccagctgagcctcatccccaagttcctgacagaggtgctgctgcccatcgtgaagacagagttccagctgctgtatgtgtaccacctggtgggccccttcctgcagcgcttccagcaggagaggacccgctgcatgattgaaattggagtggccttctatgacatgctgctgaatgtggaccagtgcagcacccacctgaactacatggaccccatctgtgacttcctgtaccacatgaagtacatgttcaccggggacagcgtgaaggagcaggtggagaagatcatctgcaacctgaagccagccctgaagctgcggctgcgcttcatcacccacatcagcaagatggagcctgctgctgtgcccccccaggccatgaacagcggcagccctgccccccagagcaaccaggtgcctgtgtccctgcctgtgacccagtag

SEQ ID NO: 159038 - DNA, 114 bp, synthetic construct
  misc_feature 1..114: note = Description of Artificial Sequence: Synthetic coding sequence
  source 1..114: mol_type = other DNA
atggagacccagctgcagagcatctttgaggaggtggtgaagacagaggtgattgaggaggccttccctggcatgttcatggacaccccagaagatgagaagagcagcaagtag

SEQ ID NO: 159039 - DNA, 132 bp, synthetic construct
  misc_feature 1..132: note = Description of Artificial Sequence: Synthetic coding sequence
  source 1..132: mol_type = other DNA
atggagacccagctgcagagcatctttgaggaggtggtgaagacagaggtgattgaggaggccttccctggcatgttcatggacaccccagaagatgagaagaccaagctgttcatggagatggagctgtag

SEQ ID NO: 159040 - DNA, 1428 bp, synthetic construct
  misc_feature 1..1428: note = Description of Artificial Sequence: Synthetic coding sequence
  source 1..1428: mol_type = other DNA
atggagacccagctgcagagcatctttgaggaggtggtgaagacagaggtgattgaggaggccttccctggcatgttcatggacaccccagaagatgagaagaccaagctgatcagctgcctgggcgccttccggcagttctggggcggcctgagccaggagagccatgagcagtgcatccagtggatcgtgaagttcatccacggccagcacagccccaagaggatctccttcctgtatgactgcctggccatggctgtggagaccggcctgctgcccccccggctggtgtgtgagagcctcatcaacagcgacaccctggagtgggagaggacccagctgtgggccctgaccttcaagctggtgaggaagatcatcggcggcgtggactacaagggcgtgcgggacctgctgaaggtgatcctggagaagatcctgaccatccccaacacagtgagcagcgctgtggtgcagcagctgctggccgcccgggaggtgattgcctacatcctggagagaaatgcctgcctgctgcctgcctactttgctgtgacagagatcaggaagctgtacccagagggcaagctgccccactggctgctgggcaacctggtgtctgactttgtggacaccttccggcccacagcccgcatcaacagcatctgtggccgctgcagcctgctgcctgtggtgaacaacagcggggccatctgcaacagctggaagctggaccctgccaccctgcgcttccccctgaagggcctgctgccctatgacaaggacctgtttgagccccagacagccctgctgcgctacgtgctggagcagccctacagccgggacatggtgtgcaacatgctgggcctgaacaagcagcacaagcagcgctgccctgtgctggaggaccagctggtggacctggtggtgtatgccatggagaggagtgaaacagaggagaagtttgatgatggcggcaccagccagctgctgtggcagcacctgagcagccagctgatcttctttgtgctcttccagtttgccagcttcccccacatggtgctgagcctgcaccagaagctggccggccggggcctcatcaagggccgggaccacctgatgtgggtgctgctgcagttcatcagcggcagcatccagaagaatgccctggccgacttcctgcctgtgatgaagctgtttgacctgctgtacccagagaaggagtacatccctgtgcctgacatcaacaagccccagagcacccacgcctttgccatgacctgcatctggatccacctgaacaggaaggcccagaatgacaacagcaagctgcagatccccatcccccacagcctgcggctgcaccatgaaagtgcctttgccaactgcttccagatcacctgcatgggagacctgacccacaccccctag

SEQ ID NO: 159041 - DNA, 429 bp, synthetic construct
  misc_feature 1..429: note = Description of Artificial Sequence: Synthetic coding sequence
  source 1..429: mol_type = other DNA
atgcaccacatccagccccactacagagtgcagctgctgagccacctgcacaccctggccgctgtggcccagaccaaccagaaccagctgcacctgtgtgtggagagcacagccctgcggctcatcacagccctgggcagcagcgaggtgcagccccagttcacccgcttcctgagtgaccccaagacagtgctgtctgctgagagcgaggagctgaacagagccctgatcctgaccctggcccgggccacccacgtgacagacttcttcaccggcagtgacagcatccagggcacctggtgcaaggacatcctgcagaccatcatgtccttcaccccccacaactgggccagccacaccctgagctgcttccctggccccctgcagaccctgctgatcctgggggagctggccctgaggaagacctag

SEQ ID NO: 159042 - DNA, 2661 bp, synthetic construct
  misc_feature 1..2661: note = Description of Artificial Sequence: Synthetic coding sequence
  source 1..2661: mol_type = other DNA
atggagacccagctgcagagcatctttgaggaggtggtgaagacagaggtgattgaggaggccttccctggcatgttcatggacaccccagaagatgagaagaccaagctgatcagctgcctgggcgccttccggcagttctggggcggcctgagccaggagagccatgagcagtgcatccagtggatcgtgaagttcatccacggccagcacagccccaagaggatctccttcctgtatgactgcctggccatggctgtggagaccggcctgctgcccccccggctggtgtgtgagagcctcatcaacagcgacaccctggagtgggagaggacccagctgtgggccctgaccttcaagctggtgaggaagatcatcggcggcgtggactacaagggcgtgcgggacctgctgaaggtgatcctggagaagatcctgaccatccccaacacagtgagcagcgctgtggtgcagcagctgctggccgcccgggaggtgattgcctacatcctggagagaaatgcctgcctgctgcctgcctactttgctgtgacagagatcaggaagctgtacccagagggcaagctgccccactggctgctgggcaacctggtgtctgactttgtggacaccttccggcccacagcccgcatcaacagcatctgtggccgctgcagcctgctgcctgtggtgaacaacagcggggccatctgcaacagctggaagctggaccctgccaccctgcgcttccccctgaagggcctgctgccctatgacaaggacctgtttgagccccagacagccctgctgcgctacgtgctggagcagccctacagccgggacatggtgtgcaacatgctgggcctgaacaagcaggtgctgaagatcttcaagcacaagcagcgctgccctgtgctggaggaccagctggtggacctggtggtgtatgccatggagaggagtgaaacagaggagaagtttgatgatggcggcaccagccagctgctgtggcagcacctgagcagccagctgatcttctttgtgctcttccagtttgccagcttcccccacatggtgctgagcctgcaccagaagctggccggccggggcctcatcaagggccgggaccacctgatgtgggtgctgctgcagttcatcagcggcagcatccagaagaatgccctggccgacttcctgcctgtgatgaagctgtttgacctgctgtacccagagaaggagtacatccctgtgcctgacatcaacaagccccagagcacccacgcctttgccatgacctgcatctggatccacctgaacaggaaggcccagaatgacaacagcaagctgcagatccccatcccccacagcctgcggctgcaccacgagttcctgcagcagagcctgaggaacaagagcctgcagatgaatgactacaagatcgccctgctgtgcaatgcctacagcaccaacagcgagtgcttcaccctgcccatgggcgccctggtggagaccatctatggaaatggcatcatgaggatccccctgcccggcaccaactgcatggccagcggcagcatcacccccctgcccatgaacctgctggacagcctgactgtgcacgccaagatgagcctcatccacagcatcgccaccagggtcatcaagctggcccacgccaagagctctgtggccctggccccagccctggtggagacctacagccggctgctggtgtacatggagattgagagcctgggcatcaagggcttcatcagccagctgctgcccaccgtcttcaagagccacgcctggggcatcctgcacaccctgctggagatgttctcctacaggatgcaccacatccagccccactacagagtgcagctgctgagccacctgcacaccctggccgctgtggcccagaccaaccagaaccagctgcacctgtgtgtggagagcacagccctgcggctcatcacagccctgggcagcagcgaggtgcagccccagttcacccgcttcctgagtgaccccaagacagtgctgtctgctgagagcgaggagctgaacagagccctgatcctgaccctggcccgggccacccacgtgacagacttcttcaccggcagtgacagcatccagggcacctggtgcaaggacatcctgcagaccatcatgtccttcaccccccacaactgggccagccacaccctgagctgcttccctggccccctgcaggccttcttcaagcagaacaacgtgccccaggagagccgcttcaacctgaagaagaatgtggaggaggagtacaggaagtggaagtccatgagcaatgaaaatgacatcatcacccacttctccatgcagggcagccccccactcttcctgtgcctgctgtggaagatgctgctggagacagaccacatcaaccagatcggctacagagtgctggagcgcatcggggcccgggccctggtggcccacgtgaggacctttgctgacttcctggtgtatgagttcagcaccagcgctgggggccagcagctgaacaagtgcatcgagatcctgaatgacatggtgtggaagtacaacatcgtgaccctggacaggctcatcctgtgcctggtgcgcatcaacaccttcctgagcctcttctcctag

SEQ ID NO: 159043 - DNA, 3030 bp, synthetic construct
  misc_feature 1..3030: note = Description of Artificial Sequence: Synthetic coding sequence
  source 1..3030: mol_type = other DNA
atggagaggagtgaaacagaggagaagtttgatgatggcggcaccagccagctgctgtggcagcacctgagcagccagctgatcttctttgtgctcttccagtttgccagcttcccccacatggtgctgagcctgcaccagaagtacatccctgtgcctgacatcaacaagccccagagcacccacgcctttgccatgacctgcatctggatccacctgaacaggaaggcccagaatgacaacagcaagctgcagatccccatcccccacagcctgcggctgcaccacgagttcctgcagcagagcctgaggaacaagagcctgcagatgaatgactacaagatcgccctgctgtgcaatgcctacagcaccaacagcgagtgcttcaccctgcccatgggcgccctggtggagaccatctatggaaatggcatcatgaggatccccctgcccggcaccaactgcatggccagcggcagcatcacccccctgcccatgaacctgctggacagcctgactgtgcacgccaagatgagcctcatccacagcatcgccaccagggtcatcaagctggcccacgccaagagctctgtggccctggccccagccctggtggagacctacagccggctgctggtgtacatggagattgagagcctgggcatcaagggcttcatcagccagctgctgcccaccgtcttcaagagccacgcctggggcatcctgcacaccctgctggagatgttctcctacaggatgcaccacatccagccccactacagagtgcagctgctgagccacctgcacaccctggccgctgtggcccagaccaaccagaaccagctgcacctgtgtgtggagagcacagccctgcggctcatcacagccctgggcagcagcgaggtgcagccccagttcacccgcttcctgagtgaccccaagacagtgctgtctgctgagagcgaggagctgaacagagccctgatcctgaccctggcccgggccacccacgtgacagacttcttcaccggcagtgacagcatccagggcacctggtgcaaggacatcctgcagaccatcatgtccttcaccccccacaactgggccagccacaccctgagctgcttccctggccccctgcaggccttcttcaagcagaacaacgtgccccaggagagccgcttcaacctgaagaagaatgtggaggaggagtacaggaagtggaagtccatgagcaatgaaaatgacatcatcacccacttctccatgcagggcagccccccactcttcctgtgcctgctgtggaagatgctgctggagacagaccacatcaaccagatcggctacagagtgctggagagaattggagcccgggccctggtggcccacgtgaggacctttgctgacttcctggtgtatgagttcagcaccagcgctgggggccagcagctgaacaagtgcatcgagatcctgaatgacatggtgtggaagtacaacatcgtgaccctggacaggctcatcctgtgcctggccatgaggagccatgagggcaatgaggcccaggtgtgctacttcatcatccagctgctgctgctgaagcccaatgacttcaggaacagagtgtctgactttgtgaaggagaacagccctgagcactggctgcagaatgactggcacaccaagcacatgaactaccacaagaagtacccagagaagctgtactttgagggcctggccgagcaggtggacccccctgtgcagatccagagcccctacctgcccatctactttggaaatgtgtgcctgcgcttcctgcctgtgtttgacatcgtcatccaccgcttcctggagctgctgcctgtgtccaagagcctggagaccctgctggaccacctgggcggcctgtacaagttccatgacaggcctgtgacctacctgtacaacaccctgcactactatgagatgcacctgcgggaccgggccttcctgaagaggaagctggtgcacgccatcatcggcagcctgaaggacaaccggccccagggctggtgcctgagtgacacctacctgaagtgtgccatgaatgcccgggaggagaacccctgggtgcctgatgacacctactactgccgcctgattggccgcctggtggacaccatggccggcaagagccctggccccttccccaactgtgactggaggttcaatgagttccccaacccagctgcccacgccctgcacgtgacctgtgtggagctgatggccctggccgtgtctgggaaggaggtgggcaatgccctgctgaatgtggtgctgaagagccagcccctggtgccccgggagaacatcacagcctggatgaatgccatcggcctcatcatcacagccctgcctgagccctactggatcgtgctgcatgacagaattgtgtctgtcatcagcagccccagcctgaccagcgagacagagtgggtgggctaccccttccggctgtttgacttcaccgcctgccaccagagctacagcgagatgagctgcagctacaccctggccctggcccatgctgtgtggcaccacagcagcatcggccagctgagcctcatccccaagttcctgacagaggtgctgctgcccatcgtgaagacagagttccagctgctgtatgtgtaccacctggtgggccccttcctgcagcgcttccagcaggagaggacccgctgcatgattgaaattggagtggccttctatgacatgctgctgaatgtggaccagtgcagcacccacctgaactacatggaccccatctgtgacttcctgtaccacatgaagtacatgttcaccggggacagcgtgaaggagcaggtggagaagatcatctgcaacctgaagccagccctgaagctgcggctgcgcttcatcacccacatcagcaagatggagcctgctgctgtgcccccccaggccatgaacagcggcagccctgccccccagagcaaccaggtgcctgtgtccctgcctgtgacccagtag

SEQ ID NO: 159044 - DNA, 2970 bp, synthetic construct
  misc_feature 1..2970: note = Description of Artificial Sequence: Synthetic coding sequence
  source 1..2970: mol_type = other DNA
atgaaggtggtgaacctgaagcaggccatcctgcaggcctggaaggagcgctggagcgactaccagtgggccatcaacatgaagaagttcttccccaagggggccacctgggacatcctgaacctggctgatgccctgctggagcaggccatgattggccccagccccaaccccctcatcctgagctacctgaagtatgccatcagcagccagatggtgtcctacagctctgtgctgacagccatcagcaagtttgatgacttcagccgggacctgtgtgtgcaggccctgctggacatcatggacatgttctgtgaccggctgagctgccacggcaaggccgaggagtgcatcggcctgtgccgggccctgctgagcgccctgcactggctgctgcgctgcacagctgccagcgctgagcggctgcgggagggcctggaggccggcaccccagctgctggggagaagcagctggccatgtgcctgcagaggctggagaagaccctgagcagcaccaagaacagagccctgctgcacatcgccaagctggaggaggccagctcctggacagccatcgagcacagcctgctgaagctgggggagatcctggccaacctgagcaacccccagctgcggagccaggccgagcagtgtggcaccctcatccgcagcatccccaccatgctgtctgtgcatgctgagcagatgcacaagacaggcttccccaccgtgcacgccgtcatcctgctggagggcaccatgaacctgactggagagacccagagcctggtggagcagctgaccatggtgaagaggatgcagcacatccccacccccctgtttgtgctggagatctggaaggcctgctttgtgggcctcatcgagagccctgagggcacagaggagctgaagtggacagccttcaccttcctgaagatcccccaggtgctggtgaagctgaagaagtacagccatggagacaaggacttcacagaagatgtgaactgtgcctttgagttcctgctgaagctgacccccctgctggacaaggctgaccagcgctgcaactgtgactgcaccaacttcctgctgcaggagtgtgggaagcagggcctgctgtctgaggcctctgtgaacaacctgatggccaagaggaaggctgaccgggagcacgccccccagcagaagtctggagaaaatgccaacatccagcccaacatccagctgatcctgcgggcagagcccaccgtgaccaacatcctgaagaccatggatgctgaccacagcaagagccctgagggcctgctgggcgtgctgggccacatgctgagcggcaagagcctggacctgctgctggccgctgctgctgccaccgggaagctgaagagctttgccaggaagttcatcaacctgaatgagttcaccacctacggcagcgaggagagcaccaagccagcctctgtgcgggccctgctgtttgacatctccttcctgatgctgtgccacgtggcccagacctacggcagcgaggtgatcctgtctgagagcaggactggagctgaggtgcccttctttgagacctggatgcagacctgcatgcctgaggagggcaagatcctgaacccagaccacccctgcttccggccagacagcaccaaggtggagagcctggtggccctgctgaacaacagcagcgagatgaagctggtgcagatgaagtggcatgaggcctgcctgagcatctctgctgccatcctggagatcctgaatgcctgggagaatggagtgctggcctttgagagcatccagaagatcacagacaacatcaagggcaaggtgtgcagcctggccgtgtgtgctgtggcctggctggtggcccacgtgaggatgctgggcctggatgagcgggagaagagcctgcagatgatccggcagctggccggccccctcttcagcgagaacaccctgcagttctacaatgaaagagtggtgatcatgaacagcatcctggagaggatgtgtgctgatgtgctgcagcagacagccacccagatcaagttccccagcactggagtggacaccatgccctactggaacctgctgccccccaagaggcccatcaaggaggtgctgacagacatctttgccaaggtgctggagaagggctgggtggacagccgcagcatccacatctttgacaccctgctgcacatgggcggcgtgtactggttctgcaacaacctgatcaaggagctgctgaaggagaccaggaaggagcacaccctgcgggctgtggagctgctgtacagcatcttctgcctggacatgcagcaggtgaccctggtgctgctgggccacatcctgcccggcctgctgacagacagcagcaagtggcacagcctgatggaccccccaggcacagccctggccaagctggccgtgtggtgtgccctgagcagctacagcagccacaagggccaggccagcacccggcagaagaagaggcaccgggaggacatcgaggactacatcagcctcttccccctggatgatgtgcagcccagcaagctgatgaggctgctgagcagcaatgaagatgatgccaacatcctgagcagccccacagaccgctccatgagcagcagcctgagcgccagccagctgcacacagtgaacatgagggaccccctgaacagagtgctggccaacctcttcctgctgatcagcagcatcctgggcagcaggacagctggcccccacacccagtttgtgcagtggttcatggaggagtgtgtggactgcctggagcagggcggccggggctctgtgctgcagttcatgcccttcaccaccgtgtctgagctggtgaaggtgtctgccatgagcagccccaaggtggtgctggccatcacagacctgagcctgcccctgggccggcaggtggccgccaaggccatcgccgccctgtag

SEQ ID NO: 159045 - DNA, 2970 bp, synthetic construct; identical to SEQ ID NO: 159044
  misc_feature 1..2970: note = Description of Artificial Sequence: Synthetic coding sequence
  source 1..2970: mol_type = other DNA

SEQ ID NO: 159046 - DNA, 2931 bp, synthetic construct
  misc_feature 1..2931: note = Description of Artificial Sequence: Synthetic coding sequence
  source 1..2931: mol_type = other DNA
atgaaggtggtgaacctgaagcaggccatcctgcaggcctggaaggagcgctggagcgactaccagtgggccatcaacatgaagaagttcttccccaagggggccacctgggacatcctgaacctggctgatgccctgctggagcaggccatgattggccccagccccaaccccctcatcctgagctacctgaagtatgccatcagcagccagtttgatgacttcagccgggacctgtgtgtgcaggccctgctggacatcatggacatgttctgtgaccggctgagctgccacggcaaggccgaggagtgcatcggcctgtgccgggccctgctgagcgccctgcactggctgctgcgctgcacagctgccagcgctgagcggctgcgggagggcctggaggccggcaccccagctgctggggagaagcagctggccatgtgcctgcagaggctggagaagaccctgagcagcaccaagaacagagccctgctgcacatcgccaagctggaggaggccagctcctggacagccatcgagcacagcctgctgaagctgggggagatcctggccaacctgagcaacccccagctgcggagccaggccgagcagtgtggcaccctcatccgcagcatccccaccatgctgtctgtgcacgccgagcagatgcacaagacaggcttccccaccgtgcatgctgtgatcctgctggagggcaccatgaacctgaccggggagacccagagcctggtggagcagctgaccatggtgaagaggatgcagcacatccccacccccctgtttgtgctggagatctggaaggcctgctttgtgggcctgattgagagccctgagggcacagaggagctgaagtggacagccttcaccttcctgaagatcccccaggtgctggtgaagctgaagaagtacagccacggggacaaggacttcacagaagatgtgaactgtgcctttgagttcctgctgaagctgacccccctgctggacaaggctgaccagcgctgcaactgtgactgcaccaacttcctgctgcaggagtgtgggaagcagggcctgctgtctgaggcctctgtgaacaacctgatggccaagaggaaggctgaccgggagcacgccccccagcagaagagcggggagaatgccaacatccagcccaacatccagctgatcctgcgggcagagcccaccgtgaccaacatcctgaagaccatggatgctgaccacagcaagagccctgagggcctgctgggcgtgctgggccacatgctgagcggcaagagcctggacctgctgctggccgctgctgctgccaccgggaagctgaagagctttgccaggaagttcatcaacctgaatgagttcaccacctacggcagcgaggagagcaccaagccagcctctgtgcgggccctgctgtttgacatctccttcctgatgctgtgccacgtggcccagacctacggcagcgaggtgatcctgtctgagagcaggactggagctgaggtgcccttctttgagacctggatgcagacctgcatgcctgaggagggcaagatcctgaacccagaccacccctgcttccggccagacagcaccaaggtggagagcctggtggccctgctgaacaacagcagcgagatgaagctggtgcagatgaagtggcatgaggcctgcctgagcatctctgctgccatcctggagatcctgaatgcctgggagaatggagtgctggcctttgagagcatccagaagatcacagacaacatcaagggcaaggtgtgcagcctggccgtgtgtgctgtggcctggctggtggcccacgtgaggatgctgggcctggatgagcgggagaagagcctgcagatgatccggcagctggccggccccctcttcagcgagaacaccctgcagttctacaatgaaagagtggtgatcatgaacagcatcctggagaggatgtgtgctgatgtgctgcagcagacagccacccagatcaagttccccagcactggagtggacaccatgccctactggaacctgctgccccccaagaggcccatcaaggaggtgctgacagacatctttgccaaggtgctggagaagggctgggtggacagccgcagcatccacatctttgacaccctgctgcacatgggcggcgtgtactggttctgcaacaacctgatcaaggagctgctgaaggagaccaggaaggagcacaccctgcgggctgtggagctgctgtacagcatcttctgcctggacatgcagcaggtgaccctggtgctgctgggccacatcctgcccggcctgctgacagacagcagcaagtggcacagcctgatggaccccccaggcacagccctggccaagctggccgtgtggtgtgccctgagcagctacagcagccacaagggccaggccagcacccggcagaagaagaggcacagagaagatattgaggactacatcagcctcttccccctggatgatgtgcagcccagcaagctgatgaggctgctgagcagcaatgaagatgatgccaacatcctgagcagccccacagaccgctccatgagcagcagcctgagcgccagccagctgcacacagtgaacatgagggaccccctgaacagagtgctggccaacctcttcctgctgatcagcagcatcctgggcagcaggacagctggcccccacacccagtttgtgcagtggttcatggaggagtgtgtggactgcctggagcagggcggccggggctctgtgctgcagttcatgcccttcaccaccgtgtctgagctggtgaaggtgtctgccatgagcagccccaaggtggtgctggccatcacagacctgagcctgcccctgggccggcaggtggccgccaaggccatcgccgccctgtag

SEQ ID NO: 159047 - DNA, 2970 bp, synthetic construct; identical to SEQ ID NO: 159044
  misc_feature 1..2970: note = Description of Artificial Sequence: Synthetic coding sequence
  source 1..2970: mol_type = other DNA

SEQ ID NO: 159048 - DNA, 864 bp, synthetic construct
  misc_feature 1..864: note = Description of Artificial Sequence: Synthetic coding sequence
  source 1..864: mol_type = other DNA
tgaaacctgatcaaggagctgctgaaggagaccaggaaggagcacaccctgcgggctgtggagctgctgtacagcatcttctgcctggacatgcagcaggtgaccctggtgctgctgggccacatcctgcccggcctgctgacagacagcagcaagtggcacagcctgatggaccccccaggcacagccctggccaagctggccgtgtggtgtgccctgagcagctacagcagccacaagggccaggccagcacccggcagaagaagaggcacagagaagatattgaggactacatcagcctcttccccctggatgatgtgcagcccagcaagctgatgaggctgctgagcagcaatgaagatgatgccaacatcctgagcagccccaggagcagcctgggcagcccctgcaccagctacctgcgctgggtgaaggtgggcctgggccaccccaggggggcccccctgctgcacagcgctggctgcttccctgccctgcacctgctgcggcccacagctgaccgctccatgagcagcagcctgagcgccagccagctgcacacagtgaacatgagggaccccctgaacagagtgctggccaacctcttcctgctgatcagcagcatcctgggcagcaggacagctggcccccacacccagtttgtgcagtggttcatggaggagtgtgtggactgcctggagcagggcggccggggctctgtgctgcagttcatgcccttcaccaccgtgtctgagctggtgaaggtgtctgccatgagcagccccaaggtggtgctggccatcacagacctgagcctgcccctgggccggcaggtggccgccaaggccatcgccgccctgtag

SEQ ID NO: 159049 - DNA, 906 bp, synthetic construct
  misc_feature 1..906: note = Description of Artificial Sequence: Synthetic coding sequence
  source 1..906: mol_type = other DNA
atgaaggtggtgaacctgaagcaggccatcctgcaggcctggaaggagcgctggagcgactaccagtgggccatcaacatgaagaagttcttccccaagggggccacctgggacatcctgaacctggctgatgccctgctggagcaggccatgattggccccagccccaaccccctcatcctgagctacctgaagtatgccatcagcagccagatggtgtcctacagctctgtgctgacagccatcagcaagtttgatgacttcagccgggacctgtgtgtgcaggccctgctggacatcatggacatgttctgtgaccggctgagctgccacggcaaggccgaggagtgcatcggcctgtgccgggccctgctgagcgccctgcactggctgctgcgctgcacagctgccagcgctgagcggctgcgggagggcctggaggccggcaccccagctgctggggagaagcagctggccatgtgcctgcagaggctggagaagaccctgagcagcaccaagaacagagccctgctgcacatcgccaagctggaggaggccagcctgcacaccagccagggcctgggccagggcggcacccgggccaaccagcccacagcctcctggacagccatcgagcacagcctgctgaagctgggggagatcctggccaacctgagcaacccccagctgcggagccaggccgagcagtgtggcaccctcatccgcagcatccccaccatgctgtctgtgcacgccgagcagatgcacaagacaggcttccccaccgtgcatgctgtgatcctgctggagggcaccatgaacctgaccggggagacccagagcctggtggagcagctgaccatggtgaagaggatgcagcacatccccacccccctgtttgtgtag

SEQ ID NO: 159050 - DNA, 2700 bp, synthetic construct
  misc_feature 1..2700: note = Description of Artificial Sequence: Synthetic coding sequence
  source 1..2700: mol_type = other DNA
atgcccctggtgccccgctggtgccccaccctgctgagcagccagcccagcgtgtcctgccacggcaaggccgaggagtgcatcggcctgtgccgggccctgctgagcgccctgcactggctgctgcgctgcacagctgccagcgctgagcggctgcgggagggcctggaggccggcaccccagctgctggggagaagcagctggccatgtgcctgcagaggctggagaagaccctgagcagcaccaagaacagagccctgctgcacatcgccaagctggaggaggccagctcctggacagccatcgagcacagcctgctgaagctgggggagatcctggccaacctgagcaacccccagctgcggagccaggccgagcagtgtggcaccctcatccgcagcatccccaccatgctgtctgtgcatgctgagcagatgcacaagacaggcttccccaccgtgcacgccgtcatcctgctggagggcaccatgaacctgactggagagacccagagcctggtggagcagctgaccatggtgaagaggatgcagcacatccccacccccctgtttgtgctggagatctggaaggcctgctttgtgggcctcatcgagagccctgagggcacagaggagctgaagtggacagccttcaccttcctgaagatcccccaggtgctggtgaagctgaagaagtacagccatggagacaaggacttcacagaagatgtgaactgtgcctttgagttcctgctgaagctgacccccctgctggacaaggctgaccagcgctgcaactgtgactgcaccaacttcctgctgcaggagtgtgggaagcagggcctgctgtctgaggcctctgtgaacaacctgatggccaagaggaaggctgaccgggagcacgccccccagcagaagtctggagaaaatgccaacatccagcccaacatccagctgatcctgcgggcagagcccaccgtgaccaacatcctgaagaccatggatgctgaccacagcaagagccctgagggcctgctgggcgtgctgggccacatgctgagcggcaagagcctggacctgctgctggccgctgctgctgccaccgggaagctgaagagctttgccaggaagttcatcaacctgaatgagttcaccacctacggcagcgaggagagcaccaagccagcctctgtgcgggccctgctgtttgacatctccttcctgatgctgtgccacgtggcccagacctacggcagcgaggtgatcctgtctgagagcaggactggagctgaggtgcccttctttgagacctggatgcagacctgcatgcctgaggagggcaagatcctgaacccagaccacccctgcttccggccagacagcaccaaggtggagagcctggtggccctgctgaacaacagcagcgagatgaagctggtgcagatgaagtggcatgaggcctgcctgagcatctctgctgccatcctggagatcctgaatgcctgggagaatggagtgctggcctttgagagcatccagaagatcacagacaacatcaagggcaaggtgtgcagcctggccgtgtgtgctgtggcctggctggtggcccacgtgaggatgctgggcctggatgagcgggagaagagcctgcagatgatccggcagctggccggccccctcttcagcgagaacaccctgcagttctacaatgaaagagtggtgatcatgaacagcatcctggagaggatgtgtgctgatgtgctgcagcagacagccacccagatcaagttccccagcactggagtggacaccatgccctactggaacctgctgccccccaagaggcccatcaaggaggtgctgacagacatctttgccaaggtgctggagaagggctgggtggacagccgcagcatccacatctttgacaccctgctgcacatgggcggcgtgtactggttctgcaacaacctgatcaaggagctgctgaaggagaccaggaaggagcacaccctgcgggctgtggagctgctgtacagcatcttctgcctggacatgcagcaggtgaccctggtgctgctgggccacatcctgcccggcctgctgacagacagcagcaagtggcacagcctgatggaccccccaggcacagccctggccaagctggccgtgtggtgtgccctgagcagctacagcagccacaagggccaggccagcacccggcagaagaagaggcaccgggaggacatcgaggactacatcagcctcttccccctggatgatgtgcagcccagcaagctgatgaggctgctgagcagcaatgaagatgatgccaacatcctgagcagccccacagaccgctccatgagcagcagcctgagcgccagccagctgcacacagtgaacatgagggaccccctgaacagagtgctggccaacctcttcctgctgatcagcagcatcctgggcagcaggacagctggcccccacacccagtttgtgcagtggttcatggaggagtgtgtggactgcctggagcagggcggccggggctctgtgctgcagttcatgcccttcaccaccgtgtctgagctggtgaaggtgtctgccatgagcagccccaaggtggtgctggccatcacagacctgagcctgcccctgggccggcaggtggccgccaaggccatcgccgccctgtag

SEQ ID NO: 159051 - DNA, 756 bp, synthetic construct
  misc_feature 1..756: note = Description of Artificial Sequence: Synthetic coding sequence
  source 1..756: mol_type = other DNA
atgaagaagttcttccccaagggggccacctgggacatcctgaacctggctgatgccctgctggagcaggccatgattggccccagccccaaccccctcatcctgagctacctgaagtatgccatcagcagccagatggtgtcctacagctctgtgctgacagccatcatggagatcctgaatgcctgggagaatggagtgctggcctttgagagcatccagaagatcacagacaacatcaagggcaaggtgtgcagcctggccgtgtgtgctgtggcctggctggtggcccacgtgaggatgctgggcctggatgagcgggagaagagcctgcagatgatccggcagctggccggccccctcttcagcgagaacaccctgcagttctacaatgaaagagtggtgatcatgaacagcatcctggagaggatgtgtgctgatgtgctgcagcagacagccacccagatcaagttccccagcactggagtggacaccatgccctactggaacctgctgccccccaagaggcccatcaaggaggtgctgacagacatctttgccaaggtgctggagaagggctgggtggacagccgcagcatccacatctttgacaccctgctgcacatgggcggcgtgtactggttctgcaacaacctgatcaaggagctgctgaaggagaccaggaaggagcacaccctgcgggctgtggagctgctgtacagcatcttctgcctggacatgcagcaggtgacctag

SEQ ID NO: 159052 - DNA, 2466 bp, synthetic construct
  misc_feature 1..2466: note = Description of Artificial Sequence: Synthetic coding sequence
  source 1..2466: mol_type = other DNA
atgattggccccagccccaaccccctcatcctgagctacctgaagtatgccatcagcagccagatggtgtcctacagctctgtgctgacagccatcagcaagtttgatgacttcagccgggacctgtgtgtgcaggccctgctggacatcatggacatgttctgtgaccggctgagctgccacggcaaggccgaggagtgcatcggcctgtgccgggccctgctgagcgccctgcactggctgctgcgctgcacagctgccagcgctgagcggctgcgggagggcctggaggccggcaccccagctgctggggagaagcagctggccatgtgcctgcagaggctggagaagaccctgagcagcaccaagaacagagccctgctgcacatcgccaagctggaggaggccagctcctggacagccatcgagcacagcctgctgaagctgggggagatcctggccaacctgagcaacccccagctgcggagccaggccgagcagtgtggcaccctcatccgcagcatccccaccatgctgtctgtgcatgctgagcagatgcacaagacaggcttccccaccgtgcacgccgtcatcctgctggagggcaccatgaacctgactggagagacccagagcctggtggagcagctgaccatggtgaagaggatgcagcacatccccacccccctgtttgtgctggagatctggaaggcctgctttgtgggcctcatcgagagccctgagggcacagaggagctgaagtggacagccttcaccttcctgaagatcccccaggtgctggtgaagctgaagaagtacagccatggagacaaggacttcacagaagatgtgaactgtgcctttgagttcctgctgaagctgacccccctgctggacaaggctgaccagcgctgcaactgtgactgcaccaacttcctgctgcaggagtgtgggaagcagggcctgctgtctgaggcctctgtgaacaacctgatggccaagaggaaggctgaccgggagcacgccccccagcagaagtctggagaaaatgccaacatccagcccaacatccagctgatcctgcgggcagagcccaccgtgaccaacatcctgaagaccatggatgctgaccacagcaagagccctgagggcctgctgggcgtgctgggccacatgctgagcggcaagagcctggacctgctgctggccgctgctgctgccaccgggaagctgaagagctttgccaggaagttcatcaacctgaatgagttcaccacctacggcagcgaggagagcaccaagccagcctctgtgcgggccctgctgtttgacatctccttcctgatgctgtgccacgtggcccagacctacggcagcgaggtgatcctgtctgagagcaggactggagctgaggtgcccttctttgagacctggatgcagacctgcatgcctgaggagggcaagatcctgaacccagaccacccctgcttccggccagacagcaccaaggtggagagcctggtggccctgctgaacaacagcagcgagatgaagctggtgcagatgaagtggcatgaggcctgcctgagcatctctgctgccatcctggagatcctgaatgcctgggagaatggagtgctggcctttgagagcatccagaagatcacagacaacatcaagggcaaggtgtgcagcctggccgtgtgtgctgtggcctggctggtggcccacgtgaggatgctgggcctggatgagcgggagaagagcctgcagatgatccggcagctggccggccccctcttcagcgagaacaccctgcagttctacaatgaaagagtggtgatcatgaacagcatcctggagaggatgtgtgctgatgtgctgcagcagacagccacccagatcaagttccccagcactggagtggacaccatgccctactggaacctgctgccccccaagaggcccatcaaggaggtgctgacagacatctttgccaaggtgctggagaagggctgggtggacagccgcagcatccacatctttgacaccctgctgcacatgggcggcgtgtactggttctgcaacaacctgatcaaggagctgctgaaggagaccaggaaggagcacaccctgcgggctgtggagctgctgtacagcatcttctgcctggacatgcagcaggtgaccctggtgctgctgggccacatcctgcccggcctgctgacagacagcagcaagtggcacagcctgatggaccccccaggcacagccctggccaagctggccgtgtggtgtgccctgagcagctacagcagccacaagggccaggccagcacccggcagaagaagaggcaccgggaggacatcgaggactacatcagccccaaggtggtgctggccatcacagacctgagcctgcccctgggccggcaggtggccgccaaggccatcgccgccctgtag

SEQ ID NO: 159053 - DNA, 1026 bp, synthetic construct
  misc_feature 1..1026: note = Description of Artificial Sequence: Synthetic coding sequence
  source 1..1026: mol_type = other DNA
atgaagaagttcttccccaagggggccacctgggacatcctgaacctggctgatgccctgctggagcaggccatgattggccccagccccaaccccctcatcctgagctacctgaagtatgccatcagcagccagatggtgtcctacagctctgtgctgacagccatcagcaagtttgatgacttcagccgggacctgtgtgtgcaggccctgctggacatcatggacatgttctgtgaccggctgagctgccacggcaaggccgaggagtgcatcggcctgtgccgggccctgctgagcgccctgcactggctgctgcgctgcacagctgccagcgctgagcggctgcgggagggcctggaggccggcaccccagctgctggggagaagcagctggccatgtgcctgcagaggctggagaagaccctgagcagcaccaagaacagagccctgctgcacatcgccaagctggaggaggccagctcctggacagccatcgagcacagcctgctgaagctgggggagatcctggccaacctgagcaacccccagctgcggagccaggccgagcagtgtggcaccctcatccgcagcatccccaccatgctgtctgtgcatgctgagcagatgcacaagacaggcttccccaccgtgcacgccgtcatcctgctggagggcaccatgaacctgactggagagacccagagcctggtggagcagcagacagccacccagatcaagttccccagcactggagtggacaccatgccctactggaacctgctgccccccaagaggcccatcaaggaggtgctgacagacatctttgccaaggtgctggagaagggctgggtggacagccgcagcatccacatctttgacaccctgctgcacatgggcggcgtgtactggttctgcaacaacctgatcaaggagctgctgaaggagaccaggaaggagcacaccctgcgggctgtggagctgctgtacagcatcttctgcctggacatgcagcaggtgacctag

SEQ ID NO: 159054 - DNA, 2796 bp, synthetic construct
  misc_feature 1..2796: note = Description of Artificial Sequence: Synthetic coding sequence
  source 1..2796: mol_type = other DNA
atgaaggtggtgaacctgaagcaggccatcctgcaggcctggaaggagcgctggagcgactaccagtgggccatcaacatgaagaagttcttccccaagggggccacctgggacatcctgaacctggctgatgccctgctggagcaggccatgattggccccagccccaaccccctcatcctgagctacctgaagtatgccatcagcagccagatggtgtcctacagctctgtgctgacagccatcatgtgcctgcagaggctggagaagaccctgagcagcaccaagaacagagccctgctgcacatcgccaagctggaggaggccagcctgcacaccagccagggcctgggccagggcggcacccgggccaaccagcccacagcctcctggacagccatcgagcacagcctgctgaagctgggggagatcctggccaacctgagcaacccccagctgcggagccaggccgagcagtgtggcaccctcatccgcagcatccccaccatgctgtctgtgcatgctgagcagatgcacaagacaggcttccccaccgtgcacgccgtcatcctgctggagggcaccatgaacctgactggagagacccagagcctggtggagcagctgaccatggtgaagaggatgcagcacatccccacccccctgtttgtgctggagatctggaaggcctgctttgtgggcctcatcgagagccctgagggcacagaggagctgaagtggacagccttcaccttcctgaagatcccccaggtgctggtgaagctgaagaagtacagccatggagacaaggacttcacagaagatgtgaactgtgcctttgagttcctgctgaagctgacccccctgctggacaaggctgaccagcgctgcaactgtgactgcaccaacttcctgctgcaggagtgtgggaagcagggcctgctgtctgaggcctctgtgaacaacctgatggccaagaggaaggctgaccgggagcacgccccccagcagaagtctggagaaaatgccaacatccagcccaacatccagctgatcctgcgggcagagcccaccgtgaccaacatcctgaagaccatggatgctgaccacagcaagagccctgagggcctgctgggcgtgctgggccacatgctgagcggcaagagcctggacctgctgctggccgctgctgctgccaccgggaagctgaagagctttgccaggaagttcatcaacctgaatgagttcaccacctacggcagcgaggagagcaccaagccagcctctgtgcgggccctgctgtttgacatctccttcctgatgctgtgccacgtggcccagacctacggcagcgaggtgatcctgtctgagagcaggactggagctgaggtgcccttctttgagacctggatgcagacctgcatgcctgaggagggcaagatcctgaacccagaccacccctgcttccggccagacagcaccaaggtggagagcctggtggccctgctgaacaacagcagcgagatgaagctggtgcagatgaagtggcatgaggcctgcctgagcatctctgctgccatcctggagatcctgaatgcctgggagaatggagtgctggcctttgagagcatccagaagatcacagacaacatcaagggcaaggtgtgcagcctggccgtgtgtgctgtggcctggctggtggcccacgtgaggatgctgggcctggatgagcgggagaagagcctgcagatgatccggcagctggccggccccctcttcagcgagaacaccctgcagttctacaatgaaagagtggtgatcatgaacagcatcctggagaggatgtgtgctgatgtgctgcagcagacagccacccagatcaagttccccagcactggagtggacaccatgccctactggaacctgctgccccccaagaggcccatcaaggaggtgctgacagacatctttgccaaggtgctggagaagggctgggtggacagccgcagcatccacatctttgacaccctgctgcacatgggcggcgtgtactggttctgcaacaacctgatcaaggagctgctgaaggagaccaggaaggagcacaccctgcgggctgtggagctgctgtacagcatcttctgcctggacatgcagcaggtgaccctggtgctgctgggccacatcctgcccggcctgctgacagacagcagcaagtggcacagcctgatggaccccccaggcacagccctggccaagctggccgtgtggtgtgccctgagcagctacagcagccacaagggccaggccagcacccggcagaagaagaggcaccgggaggacatcgaggactacatcagcctcttccccctggatgatgtgcagcccagcaagctgatgaggctgctgagcagcaatgaagatgatgccaacatcctgagcagccccacagaccgctccatgagcagcagcctgagcgccagccagctgcacacagtgaacatgagggaccccctgaacagagtgctggccaacctcttcctgctgatcagcagcatcctgggcagcaggacagctggcccccacacccagtttgtgcagtggttcatggaggagtgtgtggactgcctggagcagggcggccggggctctgtgctgcagttcatgcccttcaccaccgtgtctgagctggtgaaggtgtctgccatgagcagccccaaggtggtgctggccatcacagacctgagcctgcccctgggccggcaggtggccgccaaggccatcgccgccctgtag

SEQ ID NO: 159055 - DNA, 444 bp, synthetic construct
  misc_feature 1..444: note = Description of Artificial Sequence: Synthetic coding sequence
  source 1..444: mol_type = other DNA
atgaagaagttcttccccaagggggccacctgggacatcctgaacctggctgatgccctgctggagcaggccatgattggccccagccccaaccccctcatcctgagctacctgaagtatgccatcagcagccagatggtgtcctacagctctgtgctgacagccatcagcaagtttgatgacttcagccgggacctgtgtgtgcaggccctgctggacatcatggacatgttctgtgaccggctgagctgccacggcaaggccgaggagtgcatcggcctgtgccgggccctgctgagcgccctgcacttcatgcccttcaccaccgtgtctgagctggtgaaggtgtctgccatgagcagccccaaggtggtgctggccatcacagacctgagcctgcccctgggccggcaggtggccgccaaggccatcgccgccctgtag

SEQ ID NO: 159056 - DNA, 921 bp, synthetic construct
  misc_feature 1..921: note = Description of Artificial Sequence: Synthetic coding sequence
  source 1..921: mol_type = other DNA
atgaagaagttcttccccaagggggccacctgggacatcctgaacctggctgatgccctgctggagcaggccatgattggccccagccccaaccccctcatcctgagctacctgaagtatgccatcagcagccagatggtgtcctacagctctgtgctgacagccatcagcaagtttgatgacttcagccgggacctgtgtgtgcaggccctgctggacatcatggacatgttctgtgaccggctgagctgccacggcaaggccgaggagtgcatcggcctgtgccgggccctgctgagcgccctgcactggctgctgcgctgcacagctgccagcgctgagcggctgcgggagggcctggaggccggcaccccagctgctggggagaagcagctggccatgtgcctgcagaggctggagaagaccctgagcagcaccaagaacagagccctgctgcacatcgccaagctggaggaggccagctcctggacagccatcgagcacagcctgctgaagctgggggagatcctggccaacctgagcaacccccagctgcggagccaggccgagcagtgtggcaccctcatccgcagcatccccaccatgctgtctgtgcatgctgagcagatgcacaagacaggcttccccaccgtgcacgccgtcatcctgctggagggcaccatgaacctgactggagagacccagagcctggtggagcagctgaccatggtgaagaggatgcagcacatccccacccccctgtttggccggggctctgtgctgcagttcatgcccttcaccaccgtgtctgagctggtgaaggtgtctgccatgagcagccccaaggtggtgctggccatcacagacctgagcctgcccctgggccggcaggtggccgccaaggccatcgccgccctgtag

SEQ ID NO: 159057 - DNA, 2244 bp, synthetic construct
  misc_feature 1..2244: note = Description of Artificial Sequence: Synthetic coding sequence
  source 1..2244: mol_type = other DNA
atggtgcccggcagcgagggccctgcccgggccggctctgtggtggctgatgtggtgtttgtgattgagggcacagccaacctgggcccctactttgagggcctgaggaagcactacctgctgcctgccatcgagtacttcaacggcggccccccagctgagacagactttggaggagactatggaggcacccagtacagcctggtggtgttcaacacagtggactgtgcccctgagagctatgtgcagtgccacgcccccaccagcagcgcctatgaatttgtgacctggctggatggcatcaagttcatgggcggcggcggggagagctgcagcctgattgctgagggcctgagcacagccctgcagctgtttgatgacttcaagaagatgagggagcagatcggccagacccaccgggtgtgcctgctgatctgcaacagccccccctacctgctgcctgctgtggagagcaccacctacagcggctgcaccacagagaacctggtgcagcagattggagagcggggcatccacttcagcatcgtgagccccaggaagctgcctgccctgcggctgctgtttgagaaggccgcccccccagccctgctggagcccctgcagcccccaacagatgtgtcccaggaccccaggcacatggtgctggtgcggggcctggtgctgcctgtgggcggcggcagcgcccctggccccctgcagagcaagcagcctgtgcccctgcccccagctgcccccagcggggccaccctgtctgctgccccccagcagcccctgccccctgtgcccccccagtaccaggtgcccggcaacctgtctgctgcccaggtggccgcccagaatgctgtggaggccgccaagaaccagaaggccggcctgggcccccgcttcagccccatcacccccctgcagcaggccgcccctggggtgggcccccccttcagccaggccccagccccccagctgcccccaggccccccaggggcccccaagcccccaccagccagccagcccagcctggtgtccacagtggcccctggcagcggcctggcccccacagcccagcccggggcccccagcatggccggcaccgtggcccctggaggagtgtctggccccagccctgcccagctgggcgccccagccctgggcggccagcagagcgtgagcaacaagctgctggcctggagcggcgtgctggagtggcaggagaagcccaagccagcctctgtggatgccaacaccaagctgaccaggagcctgccctgccaggtgtatgtgaaccacggggagaacctgaagacagagcagtggccccagaagctgatcatgcagctgatcccccagcagctgctgaccaccctgggccccctcttcaggaacagcaggatggtgcagttccacttcaccaacaaggacctggagagcctgaagggcctgtaccgcatcatgggaaatggatttgctggctgtgtgcacttcccccacacagccccctgtgaggtgcgggtgctgatgctgctgtacagcagcaagaagaagatcttcatgggcctcatcccctatgaccagagcggctttgtgaatggcatccggcaggtgatcaccaaccacaagcaggtgcagcagcagaagctggagcagcagcagaggggcatgggcggccagcaggcccctcctggcctgggccccatcctggaggaccaggcccggcccagccagaacctgctgcagctgcggcccccccagccccagccccagggcaccgtgggcgccagcggggccaccggccagccccagccccagggcacagcccagcccccacctggggccccccagggccccccaggggccgccagcggccccccacctcctggccccatcctgcggccccagaaccctggggccaacccccagctgcggagcctgctgctgaaccccccaccaccccagacaggagtgcccccaccccaggccagcctgcaccacctgcagcccccaggggccccagccctgctgcccccaccccaccagggcctgggccagccccagctgggcccccccctgctgcaccccccaccagcccagagctggccagcccagctgcccccccgggcccccctgcccggccagatgctgctgagcggcggcccccggggccctgtgccccagcccggcctgcagcccagcgtgatggaggatgacatcctgatggacctgatctag

SEQ ID NO: 159058 - DNA, 2268 bp, synthetic construct
  misc_feature 1..2268: note = Description of Artificial Sequence: Synthetic coding sequence
  source 1..2268: mol_type = other DNA
atggtgcccggcagcgagggccctgcccgggccggctctgtggtggctgatgtggtgtttgtgattgagggcacagccaacctgggcccctactttgagggcctgaggaagcactacctgctgcctgccatcgagtacttcaacggcggccccccagctgagacagactttggaggagactatggaggcacccagtacagcctggtggtgttcaacacagtggactgtgcccctgagagctatgtgcagtgccacgcccccaccagcagcgcctatgaatttgtgacctggctggatggcatcaagttcatgggcggcggcggggagagctgcagcctgattgctgagggcctgagcacagccctgcagctgtttgatgacttcaagaagatgagggagcagatcggccagacccaccgggtgtgcctgctgatctgcaacagccccccctacctgctgcctgctgtggagagcaccacctacagcggctgcaccacagagaacctggtgcagcagattggagagcggggcatccacttcagcatcgtgagccccaggaagctgcctgccctgcggctgctgtttgagaaggccgcccccccagccctgctggagcccctgcagcccccaacagatgtgtcccaggaccccaggcacatggtgctggtgcggggcctggtgctgcctgtgggcggcggcagcgcccctggccccctgcagagcaagcagcctgtgcccctgcccccagctgcccccagcggggccaccctgtctgctgccccccagcagcccctgccccctgtgcccccccagtaccaggtgcccggcaacctgtctgctgcccaggtggccgcccagaatgctgtggaggccgccaagaaccagaaggccggcctgggcccccgcttcagccccatcacccccctgcagcaggccgcccctggggtgggcccccccttcagccaggccccagccccccagctgcccccaggccccccaggggcccccaagcccccaccagccagccagcccagcctggtgtccacagtggcccctggcagcggcctggcccccacagcccagcccggggcccccagcatggccggcaccgtggcccctggaggagtgtctggccccagccctgcccagctgggcgccccagccctgggcggccagcagagcgtgagcaacaagctgctggcctggagcggcgtgctggagtggcaggagaagcccaagccagcctctgtggatgccaacaccaagctgaccaggagcctgccctgccaggtgtatgtgaaccacggggagaacctgaagacagagcagtggccccagaagctgatcatgcagctgatcccccagcagctgctgaccaccctgggccccctcttcaggaacagcaggatggtgcagttccacttcaccaacaaggacctggagagcctgaagggcctgtaccgcatcatgggaaatggatttgctggctgtgtgcacttcccccacacagccccctgtgaggtgcgggtgctgatgctgctgtacagcagcaagaagaagatcttcatgggcctcatcccctatgaccagagcggctttgtgaatggcatccggcaggtgatcaccaaccacaagcaggtgcagcagcagaagctggagcagcagcagaggggcatgggcggccagcaggcccctcctggcctgggccccatcctggaggaccaggcccggcccagccagaacctgctgcagctgcggcccccccagccccagccccagggcaccgtgggcgccagcggggccaccggccagccccagccccagggcacagcccagcccccacctggggccccccagggccccccaggggccgccagcggccccccacctcctggccccatcctgcggccccagaaccctggggccaacccccagctgcggagcctgctgctgaaccccccaccaccccagacaggagtgcccccaccccaggccagcctgcaccaccacctgcccagccctggcccccacaacttccccctgggcctgcactgccaggtgcggggccctgggggcggccagaggagcggcctgtctgtgcctgctgcccctggcctggagcaccaggacagagtgctgctgggcagcaaggacatcggcagcaagaatgaaggcagccccatccgggcctgcagccctgcctcctggaggaccaccagctcctggatcagcagcgagagccccacccccaacaaggtgcccttctag

SEQ ID NO: 159059 - DNA, 2349 bp, synthetic construct
  misc_feature 1..2349: note = Description of Artificial Sequence: Synthetic coding sequence
  source 1..2349: mol_type = other DNA
atggtgcccggcagcgagggccctgcccgggccggctctgtggtggctgatgtggtgtttgtgattgagggcacagccaacctgggcccctactttgagggcctgaggaagcactacctgctgcctgccatcgagtacttcaacggcggccccccagctgagacagactttggaggagactatggaggcacccagtacagcctggtggtgttcaacacagtggactgtgcccctgagagctatgtgcagtgccacgcccccaccagcagcgcctatgaatttgtgacctggctggatggcatcaagttcatgggcggcggcggggagagctgcagcctgattgctgagggcctgagcacagccctgcagctgtttgatgacttcaagaagatgagggagcagatcggccagacccaccgggtgtgcctgctgatctgcaacagccccccctacctgctgcctgctgtggagagcaccacctacagcggctgcaccacagagaacctggtgcagcagattggagagcggggcatccacttcagcatcgtgagccccaggaagctgcctgccctgcggctgctgtttgagaaggccgcccccccagccctgctggagcccctgcagcccccaacagatgtgtcccaggaccccaggcacatggtgctggtgcggggcctggtgctgcctgtgggcggcggcagcgcccctggccccctgcagagcaagcagcctgtgcccctgcccccagctgcccccagcggggccaccctgtctgctgccccccagcagcccctgccccctgtgcccccccagtaccaggtgcccggcaacctgtctgctgcccaggtggccgcccagaatgctgtggaggccgccaagaaccagaaggccggcctgggcccccgcttcagccccatcacccccctgcagcaggccgcccctggggtgggcccccccttcagccaggccccagccccccagctgcccccaggccccccaggggcccccaagcccccaccagccagccagcccagcctggtgtccacagtggcccctggcagcggcctggcccccacagcccagcccggggcccccagcatggccggcaccgtggcccctggaggagtgtctggccccagccctgcccagctgggcgccccagccctgggcggccagcagagcgtgagcaacaagctgctggcctggagcggcgtgctggagtggcaggagaagcccaagccagcctctgtggatgccaacaccaagctgaccaggagcctgccctgccaggtgtatgtgaaccacggggagaacctgaagacagagcagtggccccagaagctgatcatgcagctgatcccccagcagctgctgaccaccctgggccccctcttcaggaacagcaggatggtgcagttccacttcaccaacaaggacctggagagcctgaagggcctgtaccgcatcatgggaaatggatttgctggctgtgtgcacttcccccacacagccccctgtgaggtgcgggtgctgatgctgctgtacagcagcaagaagaagatcttcatgggcctcatcccctatgaccagagcggctttgtgaatggcatccggcaggtgatcaccaaccacaagcaggtgcagcagcagaagctggagcagcagcagaggggcatgggcggccagcaggcccctcctggcctgggccccatcctggaggaccaggcccggcccagccagaacctgctgcagctgcggcccccccagccccagccccagggcaccgtgggcgccagcggggccaccggccagccccagccccagggcacagcccagcccccacctggggccccccagggccccccaggggccgccagcggccccccacctcctggccccatcctgcggccccagaaccctggggccaacccccagctgcggagcctgctgctgaaccccccaccaccccagacaggagtgcccccaccccaggccagcctgcaccacctgcagcccccaggggccccagccctgctgcccccaccccaccagggcctgggccagccccagctgggcccccccctgctgcaccccccaccagcccagagctggccagcccagctgcccccccgggcccccctgcctgctgccaagaggaagcgggagggggagggccgggtcttccgggagaagtgggagcgggcctacttctttgtggaggtgaagtccatgcccatgtgcctgatctgcaagcagatcgtgtctgtgctgaaggagtacaacctgaagaggcactatgagagcaagcacagcaagagctatgaccagtacacagagcagaccaggtag

SEQ ID NO: 159060 - DNA, 1449 bp, synthetic construct
  misc_feature 1..1449: note = Description of Artificial Sequence: Synthetic coding sequence
  source 1..1449: mol_type = other DNA
atggtgcccggcagcgagggccctgcccgggccggctctgtggtggctgatgtggtgtttgtgattgagggcacagccaacctgggcccctactttgagggcctgaggaagcactacctgctgcctgccatcgagtacttcaacggcggccccccagcccccttcagccaggccccagccccccagctgcccccaggccccccaggggcccccaagcccccaccagccagccagcccagcctggtgtccacagtggcccctggcagcggcctggcccccacagcccagcccggggcccccagcatggccggcaccgtggcccctgggggcgtgtctggccccagccctgcccagctgggcgccccagccctgggcggccagcagagcgtgagcaacaagctgctggcctggagcggcgtgctggagtggcaggagaagcccaagccagcctctgtggatgccaacaccaagctgaccaggagcctgccctgccaggtgtatgtgaaccacggggagaacctgaagacagagcagtggccccagaagctgatcatgcagctgatcccccagcagctgctgaccaccctgggccccctcttcaggaacagcaggatggtgcagttccacttcaccaacaaggacctggagagcctgaagggcctgtaccgcatcatgggaaatggatttgctggctgtgtgcacttcccccacacagccccctgtgaggtgcgggtgctgatgctgctgtacagcagcaagaagaagatcttcatgggcctcatcccctatgaccagagcggctttgtgaatggcatccggcaggtgatcaccaaccacaagcaggtgcagcagcagaagctggagcagcagcagaggggcatgggcggccagcaggcccctcctggcctgggccccatcctggaggaccaggcccggcccagccagaacctgctgcagctgcggcccccccagccccagccccagggcaccgtgggcgccagcggggccaccggccagccccagccccagggcacagcccagcccccacctggggccccccagggccccccaggagctgccagcggccccccacctcctggccccatcctgcggccccagaaccctggggccaacccccagctgcggagcctgctgctgaaccccccaccaccccagacaggagtgcccccaccccaggccagcctgcaccacctgcagcccccaggggccccagccctgctgcccccaccccaccagggcctgggccagccccagctgggcccccccctgctgcaccccccaccagcccagagctggccagcccagctgcccccccgggcccccctgcccggccagatgctgctgagcggcggcccccggggccctgtgccccagcccggcctgcagcccagcgtgatggaggatgacatcctgatggacctgatctag

SEQ ID NO: 159061 - DNA, 2385 bp, synthetic construct
  misc_feature 1..2385: note = Description of Artificial Sequence: Synthetic coding sequence
  source 1..2385: mol_type = other DNA
atggtgcccggcagcgagggccctgcccgggccggctctgtggtggctgatgtggtgtttgtgattgagggcacagccaacctgggcccctactttgagggcctgaggaagcactacctgctgcctgccatcgagtacttcaacggcggccccccagctgagacagactttggaggagactatggaggcacccagtacagcctggtggtgttcaacacagtggactgtgcccctgagagctatgtgcagtgccacgcccccaccagcagcgcctatgaatttgtgacctggctggatggcatcaagttcatgggcggcggcggggagagctgcagcctgattgctgagggcctgagcacagccctgcagctgtttgatgacttcaagaagatgagggagcagatcggccagacccaccgggtgtgcctgctgatctgcaacagccccccctacctgctgcctgctgtggagagcaccacctacagcggctgcaccacagagaacctggtgcagcagattggagagcggggcatccacttcagcatcgtgagccccaggaagctgcctgccctgcggctgctgtttgagaaggccgcccccccagccctgctggagcccctgcagcccccaacagatgtgtcccaggaccccaggcacatggtgctggtgcggggcctggtgctgcctgtgggcggcggcagcgcccctggccccctgcagagcaagcagcctgtgcccctgcccccagctgcccccagcggggccaccctgtctgctgccccccagcagcccctgccccctgtgcccccccagtaccaggtgcccggcaacctgtctgctgcccaggtggccgcccagaatgctgtggaggccgccaagaaccagaaggccggcctgggcccccgcttcagccccatcacccccctgcagcaggccgcccctggggtgggcccccccttcagccaggccccagccccccagctgcccccaggccccccaggggcccccaagcccccaccagccagccagcccagcctggtgtccacagtggcccctggcagcggcctggcccccacagcccagcccggggcccccagcatggccggcaccgtggcccctggaggagtgtctggccccagccctgcccagctgggcgccccagccctgggcggccagcagagcgtgagcaacaagctgctggcctggagcggcgtgctggagtggcaggagaagcccaagccagcctctgtggatgccaacaccaagctgaccaggagcctgccctgccaggtgtatgtgaaccacggggagaacctgaagacagagcagtggccccagaagctgatcatgcagctgatcccccagcagctgctgaccaccctgggccccctcttcaggaacagcaggatggtgcagttccacttcaccaacaaggacctggagagcctgaagggcctgtaccgcatcatgggaaatggatttgctggctgtgtgcacttcccccacacagccccctgtgaggtgcgggtgctgatgctgctgtacagcagcaagaagaagatcttcatgggcctcatcccctatgaccagagcggctttgtgaatggcatccggcaggtgatcaccaaccacaagcaggtgcagcagcagaagctggagcagcagcagaggggcatgggcggccagcaggcccctcctggcctgggccccatcctggaggaccaggcccggcccagccagaacctgctgcagctgcggcccccccagccccagccccagggcaccgtgggcgccagcggggccaccggccagccccagccccagggcacagcccagcccccacctggggccccccagggccccccaggggccgccagcggccccccacctcctggccccatcctgcggccccagaaccctggggccaacccccagctgcggagcctgctgctgaaccccccaccaccccagacaggagtgcccccaccccaggccagcctgcaccacctgcagcccccaggggccccagccctgctgcccccaccccaccagggcctgggccagccccagctgggcccccccctgctgcaccccccaccagatggagcccggcggagtgatgctgctgagcggggcagccctggccctggccgcagcccccagagcccccccctgcccctgggcttccctgtgcggcagagggtgacagccttccacgtgtccatcaccagcggcaagaccaaggagaggagaagaggcccctgtgtgtccaggaagatgggcgccagcctcttcctgtgtggcagcgaggagcacgcctacgtgttcaacatgcagaccaacagagtgtgtgtggagcgcatccagcctgagacccccctgtag

SEQ ID NO: 159062 - DNA, 2175 bp, synthetic construct
  misc_feature 1..2175: note = Description of Artificial Sequence: Synthetic coding sequence
  source 1..2175: mol_type = other DNA
atggtgcccggcagcgagggccctgcccgggccggctctgtggtggctgatgtggtgtttgtgattgagggcacagccaacctgggcccctactttgagggcctgaggaagcactacctgctgcctgccatcgagtacttcaacggcggccccccagctgagacagactttggaggagactatggaggcacccagtacagcctggtggtgttcaacacagtggactgtgcccctgagagctatgtgcagtgccacgcccccaccagcagcgcctatgaatttgtgacctggctggatggcatcaagttcatgggcggcggcggggagagctgcagcctgattgctgagggcctgagcacagccctgcagctgtttgatgacttcaagaagatgagggagcagatcggccagacccaccgggtgtgcctgctgatctgcaacagccccccctacctgctgcctgctgtggagagcaccacctacagcggctgcaccacagagaacctggtgcagcagattggagagcggggcatccacttcagcatcgtgagccccaggaagctgcctgccctgcggctgctgtttgagaaggccgcccccccagccctgctggagcccctgcagcccccaacagatgtgtcccaggaccccaggcacatggtgctggtgcggggcctggtgctgcctgtgggcggcggcagcgcccctggccccctgcagagcaagcagcctgtgcccctgcccccagctgcccccagcggggccaccctgtctgctgccccccagcagcccctgccccctgtgcccccccagtaccaggtgcccggcaacctgtctgctgcccaggtggccgcccagaatgctgtggaggccgccaagaaccagaaggccggcctgggcccccgcttcagccccatcacccccctgcagcaggccgcccctggggtgggcccccccttcagccaggccccagccccccagctgcccccaggccccccaggggcccccaagcccccaccagccagccagcccagcctggtgtccacagtggcccctggcagcggcctggcccccacagcccagcccggggcccccagcatggccggcaccgtggcccctggaggagtgtctggccccagccctgcccagctgggcgccccagccctgggcggccagcagagcgtgagcaacaagctgctggcctggagcggcgtgctggagtggcaggagaagcccaagccagcctctgtggatgccaacaccaagctgaccaggagcctgccctgccaggtgtatgtgaaccacggggagaacctgaagacagagcagtggccccagaagctgatcatgcagctgatcccccagcagctgctgaccaccctgggccccctcttcaggaacagcaggatggtgcagttccacttcaccaacaaggacctggagagcctgaagggcctgtaccgcatcatgggaaatggatttgctggctgtgtgcacttcccccacacagccccctgtgaggtgcgggtgctgatgctgctgtacagcagcaagaagaagatcttcatgggcctcatcccctatgaccagagcggctttgtgaatggcatccggcaggtgatcaccaaccacaagcaggtgcagcagcagaagctggagcagcagcagaggggcatgggcggccagcaggcccctcctggcctgggccccatcctggaggaccaggcccggcccagccagaacctgctgcagctgcggcccccccagccccagcccccacctggggccccccagggccccccaggagctgccagcggccccccacctcctggccccatcctgcggccccagaaccctggggccaacccccagctgcggagcctgctgctgaaccccccaccaccccagacaggagtgcccccaccccaggccagcctgcaccacctgcagcccccaggggccccagccctgctgcccccaccccaccagggcctgggccagccccagctgggcccccccctgctgcaccccccaccagcccagagctggccagcccagctgcccccccgggcccccctgcccgggaagggcacccggggccgggcagaggtgtggacagaatgtcccagcagctcctgggcccgggccccccggcccagcgcccctgggaagtag

SEQ ID NO: 159063 - DNA, 753 bp, synthetic construct
  misc_feature 1..753: note = Description of Artificial Sequence: Synthetic coding sequence
  source 1..753: mol_type = other DNA
atgctgctgtacagcagcaagaagaagatcttcatgggcctcatcccctatgaccagagcggctttgtgaatggcatccggcaggtgatcaccaaccacaagcaggtgcagcagcagaagctggagcagcagcagaggggcatgggcggccagcaggcccctcctggcctgggccccatcctggaggaccaggcccggcccagccagaacctgctgcagctgcggcccccccagccccagccccagggcaccgtgggcgccagcggggccaccggccagccccagccccagggcacagcccagcccccacctggggccccccagggccccccaggagctgccagcggccccccacctcctggccccatcttcggccccaggaccctgggccccaccctgagctgtgaggccagcagcagcacccaccacagaagaaggctgggctgcccccacccccggccccccagcaccaccagcagccaccagggcctgctgcgctgctgcctgcggcggcagggcctgggccagccccagctgggcccccacagctgcatccaccacctgcccagccctggcccccacaacttccccctgggcctgcactgccaggtgcggggccctgggggcggccagaggagcggcctgtctgtgcctgctgcccctggcctggagcaccaggacagagtgctgctgggcagcaaggacatcggcagcaagaatgaaggcagccccatggcctttgctgagctgtag

SEQ ID NO: 159064 - DNA, 1605 bp, synthetic construct
  misc_feature 1..1605: note = Description of Artificial Sequence: Synthetic coding sequence
  source 1..1605: mol_type = other DNA
atggtgcccggcagcgagggccctgcccgggccggctctgtggtggctgatgtggtgtttgtgattgagggcacagccaacctgggcccctactttgagggcctgaggaagcactacctgctgcctgccatcgagtacttcaacggcggccccccagctgagacagactttggaggagatgtgcccggcaacctgtctgctgcccaggtggccgcccagaatgctgtggaggccgccaagaaccagaaggccggcctgggcccccgcttcagccccatcacccccctgcagcaggccgcccctggggtgggcccccccttcagccaggccccagccccccagctgcccccaggccccccaggggcccccaagcccccaccagccagccagcccagcctggtgtccacagtggcccctggcagcggcctggcccccacagcccagcccggggcccccagcatggccggcaccgtggcccctgggggcgtgtctggccccagccctgcccagctgggcgccccagccctgggcggccagcagagcgtgagcaacaagctgctggcctggagcggcgtgctggagtggcaggagaagcccaagccagcctctgtggatgccaacaccaagctgaccaggagcctgccctgccaggtgtatgtgaaccacggggagaacctgaagacagagcagtggccccagaagctgatcatgcagctgatcccccagcagctgctgaccaccctgggccccctcttcaggaacagcaggatggtgcagttccacttcaccaacaaggacctggagagcctgaagggcctgtaccgcatcatgggaaatggatttgctggctgtgtgcacttcccccacacagccccctgtgaggtgcgggtgctgatgctgctgtacagcagcaagaagaagatcttcatgggcctcatcccctatgaccagagcggctttgtgaatggcatccggcaggtgatcaccaaccacaagcaggtgcagcagcagaagctggagcagcagcagaggggcatgggcggccagcaggcccctcctggcctgggccccatcctggaggaccaggcccggcccagccagaacctgctgcagctgcggcccccccagccccagccccagggcaccgtgggcgccagcggggccaccggccagccccagccccagggcacagcccagcccccacctggggccccccagggccccccaggagctgccagcggccccccacctcctggccccatcctgcggccccagaaccctggggccaacccccagctgcggagcctgctgctgaaccccccaccaccccagacaggagtgcccccaccccaggccagcctgcaccacctgcagcccccaggggccccagccctgctgcccccaccccaccagggcctgggccagccccagctgggcccccccctgctgcaccccccaccagcccagagctggccagcccagctgcccccccgggcccccctgcccggccagatgctgctgagcggcggcccccggggccctgtgccccagcccggcctgcagcccagcgtgatggaggatgacatcctgatggacctgatctag

SEQ ID NO: 159065 - DNA, 1194 bp, synthetic construct
  misc_feature 1..1194: note = Description of Artificial Sequence: Synthetic coding sequence
  source 1..1194: mol_type = other DNA
atggtgcccggcagcgagggccctgcccgggccggctctgtggtggctgatgtggtgtttgtgattgagggcacagccaacctgggcccctactttgagggcctgaggaagcactacctgctgcctgccatcgagtacttcaacggcggccccccagctgagacagactttggaggagactatggaggcacccagtacagcctggtggtgttcaacacagtggactgtgcccctgagagctatgtgcagtgccacgcccccaccagcagcgcctatgaatttgtgacctggctggatggcatcaagttcatgggcggcggcggggagagctgcagcctgattgctgagggcctgagcacagccctgcagctgtttgatgacttcaagaagatgagggagcagatcggccagacccaccgggtgtgcctgctgatctgcaacagccccccctacctgctgcctgctgtggagagcaccacctacagcggctgcaccacagagaacctggtgcagcagattggagagcggggcatccacttcagcatcgtgagccccaggaagctgcctgccctgcggctgctgtttgagaaggccgcccccccagccctgctggagcccctgcagcccccaacagatgtgtcccaggaccccaggcacatggtgctggtgcggggcctggtgctgcctgtgggcggcggcagcgcccctggccccctgcagagcaagcagcctgtgcccctgcccccagctgcccccagcggggccaccctgtctgctgccccccagcagcccctgccccctgtgcccccccagtaccaggtgcccggcaacctgtctgctgcccaggtggccgcccagaatgctgtggaggccgccaagaaccagaaggccggcctgggcccccgcttcagccccatcacccccctgcagcaggccgcccctggggtgggcccccccttcagccaggccccagccccagccctgctgcccccaccccaccagggcctgggccagccccagctgggcccccccctgctgcaccccccaccagcccagagctggccagcccagctgcccccccgggcccccctgcccggccagatgctgctgagcggcggcccccggggccctgtgccccagcccggcctgcagcccagcgtgatggaggatgacatcctgatggacctgatctag

SEQ ID NO: 159066 - DNA, 780 bp, synthetic construct
  misc_feature 1..780: note = Description of Artificial Sequence: Synthetic coding sequence
  source 1..780: mol_type = other DNA
atggtgcccggcagcgagggccctgcccgggccggctctgtggtggctgatgtggtgtttgtgattgagggcacagccaacctgggcccctactttgagggcctgaggaagcactacctgctgcctgccatcgagtacttcaacggcggccccccagctgagacagactttggaggagactatggaggcacccagtacagcctggtggtgttcaacacagtggactgtgcccctgagagctatgtgcagtgccacgcccccaccagcagcgcctatgaatttgtgacctggctggatggcatcaagttcatgggcggcggcggggagagctgcagcctgattgctgagggcctgagcacagccctgcagctgtttgatgacttcaagaagatgagggagcagatcggccagacccaccgggtgtgcctgctgatctgcaacagccccccctacctgctgcctgctgtggagagcaccacctacagcggctgcaccacagagaacctggtgcagcagattggagagcggggcatccacttcagcatcgtgagccccaggaagctgcctgccctgcggctgctgtttgagaaggccgcccctggcctggccggggctgctgctgccagtgacagatgtgagcccggccctgaggcccatggagctggcagcggcaccagggctgcctgctggggctggctgagccccaggcctcctcctgtgaaggccgccagccccccagccagcaggaggaccctgcgctgccaggtgcgctgctgctag

SEQ ID NO: 159067 - DNA, 1803 bp, synthetic construct
  misc_feature 1..1803: note = Description of Artificial Sequence: Synthetic coding sequence
  source 1..1803: mol_type = other DNA
atgacagctgccccagccagcccccagcagatccgggaccggctgctgcaggccatcgacccccagagcaacatccggaacatggtggccgtgctggaggtgatcagcagcctggagaagtaccccatcaccaaggaggccctggaggagacccggctgggcaagctgatcaatgatgtgaggaagaagaccaagaatgaggagctggccaagagggccaagaagctgctgcgctcctggcagaagctgattgagcccgcccaccagcacgaggccgccctgcggggcctggccggggccactggaagtgccaatggaggagcccacaactgcaggcctgaggtgggcgccgccggcccccccaggagcatccatgacctgaagagcagaaatgacctgcagaggctgcccggccagaggctggaccggctgggcagcaggaagagaagaggagaccagagggacctgggccaccctggccccccacccaaggtgtccaaggccagccatgaccccctggtgcccaacagcagccccctgcccaccaacggcatcagcggcagccctgagagctttgccagcagcctggatggcagcggccacgccggccctgagggcagccggctggagagagatgaaaatgacaagcacagcggcaagatccctgtgaatgctgtgcggccccacaccagcagccctggcctgggcaagcccccaggcccctgcctgcagcccaaggcctctgtgctgcagcagctggacagagtggatgagaccccaggccccccccaccccaagggccccccacgctgcagcttcagccccaggaacagcagacatgagggcagctttgcccggcagcagagcctgtatgcccccaagggctctgtgcccagccccagcccccggccccaggccctggatgccacccaggtgcccagccccctgcccctggcccagcccagcaccccacctgtgcggcggctggagctgctgcccagcgctgagagccctgtgtgctggctggagcagcctgagagccaccagaggctggccggccctggctgcaaggccggcctgagccctgctgagcccctgctgagccgggccggcttctccccagacagcagcaaggctgacagtgatgctgccagcagcggcggcagtgacagcaagaagaagaagcgctaccggccccgggactacacagtgaacctggatggccaggtggccgaggccggcgtgaagcctgtgcggctgaaggagaggaagctgacctttgaccccatgacccggcagatcaagcccctgacccagaaggagcctgtgcgggctgacagccctgtgcacatggagcagcagagcaggacagagctggacaagcaggaggccaaggccagcctgcagagcccctttgagcagaccaactggaaggagctgagcagaaatgagatcatccagagctacctgagccggcagagcagcctgctgagcagcagcggggcccagacccctggggcccaccacttcatgtctgagtacctgaagcaggaggagagcacccggcagggcgcccggcagctgcacgtgctggtgccccagagccccccaacagacctgcccggcctgacccgggaggtgacccaggatgacctggaccgcatccaggccagccagtggccaggagtgaatggctgccaggacacccagggcaactggtatgactggacccagtgcatcagcctggacccccatggagatgatggccgcctgaacatcctgccctacgtgtgcctggactag

SEQ ID NO: 159068 - DNA, 282 bp, synthetic construct
  misc_feature 1..282: note = Description of Artificial Sequence: Synthetic coding sequence
  source 1..282: mol_type = other DNA
atgacagctgccccagccagcccccagcagatccgggaccggctgctgcaggccatcgacccccagagcaacatccggaacatggtggccgtgctggaggtgatcagcagcctggagaagtaccccatcaccaaggaggccctggaggagacccggctgggcaagctgatcaatgatgtgaggaagaagaccaagaatgaggagctggccaagagggccaagaagctgctgcccggctggcagtgggcctgccggccccggggccagcccccaggggcctag

SEQ ID NO: 159069 - DNA, 936 bp, synthetic construct
  misc_feature 1..936: note = Description of Artificial Sequence: Synthetic coding sequence
  source 1..936: mol_type = other DNA
atggctgatgtgatcaacgtgtctgtgaacctggaggccttcagccaggccatcagcgccatccaggccctgcggagctctgtgtcccgggtgtttgactgcctgaaggatggcatgaggaacaaggagaccctggagggccgggagaaggccttcatcgcccacttccaggacaacctgcacagcgtgaacagagacctgaatgagctggagcggctgagcaacctggtgggcaagcccagcgagaaccaccccctgcacaacagcggcctgctgagcctggaccctgtgcaggacaagacccccctgtacagccagctgctgcaggcctacaagtggagcaacaagctgcagtaccacgccggcctggccagcggcctgctgaaccagcagagcctgaagaggtctgccaaccagatgggcgtgtctgccaagaggcggcccaaggcccagcccaccaccctggtgctgcccccccagtatgtggatgatgtgatcagcagaattgacaggatgtttcctgagatgagcatccacctgagccggcccaacggcaccagcgccatgctgctggtgaccctgggcaaggtgctgaaggtgattgtggtgatgaggagcctcttcatcgacaggaccatcgtgaagggctacaatgaaaatgtgtacacagaagatggcaagctggacatctggagcaagagcaactaccaggtgttccagaaggtgacagaccacgccaccacagccctgctgcactaccagctgccccagatgccagatgtggtggtgcgctccttcatgacctggctgcggagctacatcaagctgttccaggccccctgccagagatgtgggaagttcctgcaggacggcctgccccccacctggagggacttccgcaccctggaggccttccatgacacctgccggcagtag

SEQ ID NO: 159070 - DNA, 714 bp, synthetic construct
  misc_feature 1..714: note = Description of Artificial Sequence: Synthetic coding sequence
  source 1..714: mol_type = other DNA
atgaggaacaaggagaccctggagggccgggagaaggccttcatcgcccacttccaggacaacctgcacagcgtgaacagagacctgaatgagctggagcggctgagcaacctggtgggcaagcccagcgagaaccaccccctgcacaacagcggcctgctgagcctggaccctgtgcaggacaagacccccctgtacagccagctgctgcaggcctacaagtggagcaacaagctgcagtaccacgccggcctggccagcggcctgctgaaccagcagagcctgaagaggtctgccaaccagatgggcgtgtctgccaagaggcggcccaaggcccagcccaccaccctggtgctgcccccccagtatgtggatgatgtgatcagcagaattgacaggatgtttcctgagatgagcatccacctgagccggcccaacggcaccagcgccatgctgctgctggacatctggagcaagagcaactaccaggtgttccagaaggtgacagaccacgccaccacagccctgctgcactaccagctgccccagatgccagatgtggtggtgcgctccttcatgacctggctgcggagctacatcaagctgttccaggccccctgccagagatgtgggaagttcctgcaggacggcctgccccccacctggagggacttccgcaccctggaggccttccatgacacctgccggcagtag

SEQ ID NO: 159071 - DNA, 828 bp, synthetic construct
  misc_feature 1..828: note = Description of Artificial Sequence: Synthetic coding sequence
  source 1..828: mol_type = other DNA
atggctgatgtgatcaacgtgtctgtgaacctggaggccttcagccaggccatcagcgccatccaggccctgcggagctctgtgtcccgggtgtttgactgcctgaaggatggcatgaggaacaaggagaccctggagggccgggagaaggccttcatcgcccacttccaggacaacctgcacagcgtgaacagagacctgaatgagctggagcggctgagcaacctggtgggcaagcccagcgagaaccaccccctgcacaacagcggcctgctgagcctggaccctgtgcaggacaagacccccctgtacagccagctgctgcaggcctacaagtggagcaacaagctgcagtaccacgccggcctggccagcggcctgctgaaccagcagagcctgaagaggtctgccaaccagatgggcgtgtctgccaagaggcggcccaaggcccagcccaccaccctggtgctgcccccccagtatgtggatgatgtgatcagcagaattgacaggatgtttcctgagatgagcatccacctgagccggcccaacggcaccagcgccatgctgctgctggacatctggagcaagagcaactaccaggtgttccagaaggtgacagaccacgccaccacagccctgctgcactaccagctgccccagatgccagatgtggtggtgcgctccttcatgacctggctgcggagctacatcaagctgttccaggccccctgccagagatgtgggaagttcctgcaggacggcctgccccccacctggagggacttccgcaccctggaggccttccatgacacctgccggcagtag

SEQ ID NO: 159072 - DNA, 666 bp, synthetic construct
  misc_feature 1..666: note = Description of Artificial Sequence: Synthetic coding sequence
  source 1..666: mol_type = other DNA
atgctgaagagcaatggagagcggcgcagcagaaatgccctgcctgctgtgtatgccaggaagatggccgccagccagcagcaggccagcgctgccagcagcgctgctggggtgtctggccccagcagcgctgggggccctggcccccagcagcagccccagcccccagcccagctggtgggccctgcccagagcggcctgctgcagcagcagcagcaggactttgatcctgtgcagcgctacaagatgctgatcccccagctgaaggagagcctgcagaccctgatgaaggtggccgcccagaacctgatccagaacaccaacatcgacaatggccagaagagcagtgatggccccatccagagatttgacaagtgcctggaggagttctacgccctgtgtgaccagctggagctgtgcctgcggctggcccacgagtgcctgagccagagctgtgacagcgccaagcacagccccaccctggtgcccacagccaccaagccagatgctgtgcagcctgacagcctgccctacccccagtacctggccgtcatcaaggcccagatcagctgtgccaaggacatccacacagccctgctggactgtgccaacaaggtgacaggcaagaccccagcccctcctgctggccctgggggcaccctgtag

SEQ ID NO: 159073 - DNA, 420 bp, synthetic construct
  misc_feature 1..420: note = Description of Artificial Sequence: Synthetic coding sequence
  source 1..420: mol_type = other DNA
atgctgatcccccagctgaaggagagcctgcagaccctgatgaaggtggccgcccagaacctgatccagaacaccaacatcgacaatggccagaagagcagtgatggccccatccagagatttgacaagtgcctggaggagttctacgccctgtgtgaccagctggagctgtgcctgcggctggcccacgagtgcctgagccagagctgtgacagcgccaagcacagccccaccctggtgcccacagccaccaagccagatgctgtgcagcctgacagcctgccctacccccagtacctggccgtcatcaaggcccagatcagctgtgccaaggacatccacacagccctgctggactgtgccaacaaggtgacaggcaagaccccagcccctcctgctggccctgggggcaccctgtag

SEQ ID NO: 159074 - DNA, 537 bp, synthetic construct
  misc_feature 1..537: note = Description of Artificial Sequence: Synthetic coding sequence
  source 1..537: mol_type = other DNA
atgagcaccccacccctggccgccagcggcatggcccctggcccctttgctggcccccaggcccagcaggccgcccgggaggtgaacacagccagcctgtgccgcatcggccaggagaccgtgcaggacatcgtgtaccgcaccatggagatcttccagctgctgaggaacatgcagctgcccaacggggtgacctaccacacaggcacctaccaggaccggctgaccaagctgcaggacaacctgcggcagctgtctgtgctcttcaggaagctgcggctggtgtatgacaagtgcaatgaaaactgtggcggcatggaccccatccctgtggagcagctgatcccctacgtggaggaggatggcagcaagaatgatgacagagctggccccccaagatttgccagcgaggagcggcgggagattgctgaggtgaacaagaagctgaagcagaagaaccagcagctgaagcagatcatggaccagctgaggaacctgatctgggacatcaatgccatgctggccatgagaaattag

SEQ ID NO: 159075 - DNA, 813 bp, synthetic construct
  misc_feature 1..813: note = Description of Artificial Sequence: Synthetic coding sequence
  source 1..813: mol_type = other DNA
atggccgccagcagcagcggggagaaggagaaggagcggctgggcggcggcctgggcgtggccggcggcaacagcacccgggagcggctgctgagcgccctggaggacctggaggtgctgagccgggagctgattgagatgctggccatcagcaggaaccagaagctgctgcaggccggggaggagaaccaggtgctggagctgctgatccacagagatggagagttccaggagctgatgaagctggccctgaaccagggcaagatccaccacgagatgcaggtgctggagaaggaggtggagaagagggacagcgacatccagcagctgcagaagcagctgaaggaggccgagcagatcctggccacagctgtgtaccaggccaaggagaagctgaagagcattgagaaggccaggaagggggccatcagcagcgaggagatcatcaagtatgcccaccgcatcagcgccagcaatgctgtgtgtgcccccctgacctgggtgcctggggacccccggcggccctaccccacagacctggagatgaggagcggcctgctgggccagatgaacaaccccagcaccaacggggtgaatggccacctgcctggagatgccctggccgccggccgcctgcctgatgtgctggccccccagtacccctggcagagcaatgacatgtccatgaacatgctgccccccaaccacagcagtgacttcctgctggagcccccaggccacaacaaggaaaatgaagatgatgtggagatcatgagcacagacagcagcagcagcagcagcgagagtgactag

SEQ ID NO: 159076 - DNA, 675 bp, synthetic construct
  misc_feature 1..675: note = Description of Artificial Sequence: Synthetic coding sequence
  source 1..675: mol_type = other DNA
atgctggccatcagcaggaaccagaagctgctgcaggccggggaggagaaccaggtgctggagctgctgatccacagagatggagagttccaggagctgatgaagctggccctgaaccagggcaagatccaccacgagatgcaggtgctggagaaggaggtggagaagagggacagcgacatccagcagctgcagaagcagctgaaggaggccgagcagatcctggccacagctgtgtaccaggccaaggagaagctgaagagcattgagaaggccaggaagggggccatcagcagcgaggagatcatcaagtatgcccaccgcatcagcgccagcaatgctgtgtgtgcccccctgacctgggtgcctggggacccccggcggccctaccccacagacctggagatgaggagcggcctgctgggccagatgaacaaccccagcaccaacggggtgaatggccacctgcctggagatgccctggccgccggccgcctgcctgatgtgctggccccccagtacccctggcagagcaatgacatgtccatgaacatgctgccccccaaccacagcagtgacttcctgctggagcccccaggccacaacaaggaaaatgaagatgatgtggagatcatgagcacagacagcagcagcagcagcagcgagagtgactag

SEQ ID NO: 159077 - DNA, 747 bp, synthetic construct
  misc_feature 1..747: note = Description of Artificial Sequence: Synthetic coding sequence
  source 1..747: mol_type = other DNA
atgaagctgctgtggtggtgtgactggctgcctgagaggagccacgtgttcacccagcgggagctgattgagatgctggccatcagcaggaaccagaagctgctgcaggccggggaggagaaccaggtgctggagctgctgatccacagagatggagagttccaggagctgatgaagctggccctgaaccagggcaagatccaccacgagatgcaggtgctggagaaggaggtggagaagagggacagcgacatccagcagctgcagaagcagctgaaggaggccgagcagatcctggccacagctgtgtaccaggccaaggagaagctgaagagcattgagaaggccaggaagggggccatcagcagcgaggagatcatcaagtatgcccaccgcatcagcgccagcaatgctgtgtgtgcccccctgacctgggtgcctggggacccccggcggccctaccccacagacctggagatgaggagcggcctgctgggccagatgaacaaccccagcaccaacggggtgaatggccacctgcctggagatgccctggccgccggccgcctgcctgatgtgctggccccccagtacccctggcagagcaatgacatgtccatgaacatgctgccccccaaccacagcagtgacttcctgctggagcccccaggccacaacaaggaaaatgaagatgatgtggagatcatgagcacagacagcagcagcagcagcagcgagagtgactag

SEQ ID NO: 159078 - DNA, 717 bp, synthetic construct
  misc_feature 1..717: note = Description of Artificial Sequence: Synthetic coding sequence
  source 1..717: mol_type = other DNA
atgaagctgctgtggtggtgtgactggctgcctgagaggagccacgtgttcacccagcgggagctgattgagatgctggccatcagcaggaaccagaagctgctgcaggccggggaggagaaccaggtgctggagctgctgatccacagagatggagagttccaggagctgatgaagctggccctgaaccagggcaagatccaccacgagatgcaggtgctggagaaggaggtggagaagagggacagcgacatccagcagctgcagaagcagctgaaggaggccgagcagatcctggccacagctgtgtaccaggccaaggagaagctgaagagcattgagaaggccaggaagggggccatcagcagcgaggagatcatcaagtatgcccaccgcatcagcgccagcaatgctgtgtgtgcccccctgacctgggtgcctggggacccccggcggccctaccccacagacctggagatgaggagcggcctgctgggccagatgaacaaccccagcaccaacggggtgaatggccacctgcctggagatgccctggccgccggccgcctgcctgatgtgctggccccccagtacccctggcagagcaatgacatgtccatgaacatgctgccccccaaccacagcagtgacttcctgctggagcccccaggccacaacaaggaaaatgaagatgatgtggagatcatgagcacctag

SEQ ID NO: 159079 - DNA, 702 bp, synthetic construct
  misc_feature 1..702: note = Description of Artificial Sequence: Synthetic coding sequence
  source 1..702: mol_type = other DNA
atgggagagccccagcaggtgtctgccctgcccccaccacccatgcagtacatcaaggagtacacagatgagaacatccaggagggcctggcccccaagcccccaccacccatcaaggacagctacatgatgtttggaaaccagttccagtgtgatgacctgatcatccggcccctggagagccagggcatcgagcggctgcaccccatgcagtttgaccacaagaaggagctgaggaagctgaacatgagcatcctgatcaacttcctggacctgctggacatcctgatccgcagccctggcagcatcaagcgggaggagaagctggaggacctgaagctgctgtttgtgcacgtgcaccacctgatcaatgagtaccggccccaccaggcccgggagaccctgcgggtgatgatggaggtgcagaagaggcagaggctggagacagctgagcgcttccagaagcacctggagcgggtgattgagatgatccagaactgcctggccagcctgcctgatgacctgccccacagcgaggccggcatgagggtgaagacagagcccatggatgctgatgacagcaacaactgcaccggccagaatgagcaccagcgggagaacagcggccacagaagagaccagatcatcgagaaggatgctgccctgtgtgtgctgattgatgagatgaatgaaagaccctag

SEQ ID NO: 159080 - DNA, 702 bp, synthetic construct; identical to SEQ ID NO: 159079
  misc_feature 1..702: note = Description of Artificial Sequence: Synthetic coding sequence
  source 1..702: mol_type = other DNA

SEQ ID NO: 159081 - DNA, 588 bp, synthetic construct
  misc_feature 1..588: note = Description of Artificial Sequence: Synthetic coding sequence
  source 1..588: mol_type = other DNA
atgggagagccccagcaggtgtctgccctgcccccaccacccatgcagtacatcaaggagtacacagatgagaacatccaggagggcctggcccccaagcccccaccacccatcaaggacagctacatgatgtttggaaaccagttccagtgtgatgacctgatcatccggcccctggagagccagggcatcgagcggctgcaccccatgcagtttgaccacaagaaggagctgaggaagctgaacatgagcatcctgatcaacttcctggacctgctggacatcctgatccgcagccctggcagcatcaagcgggaggagaagctggaggacctgaagctgctgtttgtgcacgtgcaccacctgatcaatgagtaccggccccaccaggcccgggagaccctgcgggtgatgatggaggtgcagaagaggcagaggctggagacagctgagcgcttccagaagcacctggagcgggtgattgagatgatccagaactgcctggccagcctgcctgatgacctgccccacagcgaggccggcatgagggtgaagacagagcccatggatgctgatgacagcaactag

SEQ ID NO: 159082 - DNA, 441 bp, synthetic construct
  misc_feature 1..441: note = Description of Artificial Sequence: Synthetic coding sequence
  source 1..441: mol_type = other DNA
atggccagcgctggggtggccgccggccggcaggctgaagatgtgctgccccccaccagtgaccagcccctgcctgacaccaagcccctgcccccaccccagcccccacctgtgcctgccccccagccccagcagagccctgccccccggccccagagccctgcccgggcccgggaggaggagaactacagcttcctgcccctggtgcacaacatcatcaagtgcatggacaaggacagccctgaggtgcaccaggacctgaatgccctgaagagcaagttccaggagatgaggaagctgatcagcaccatgcctggcatccacctgagccctgagcagcagcagcagcagctgcagagcctgcgggagcaggtgaggaccaagaatgagctgctgcagaagtacaagagcctgtgcatgtttgagatccccaaggagtag

SEQ ID NO: 159083 - DNA, 894 bp, synthetic construct
  misc_feature 1..894: note = Description of Artificial Sequence: Synthetic coding sequence
  source 1..894: mol_type = other DNA
atgagcaacagagtggtgtgccgggaggccagccatgctggctcctggtacacagccagcggcccccagctgaatgcccagctggagggctggctgagccaggtgcagagcaccaagaggcctgcccgggccatcatcgcccctcatgctggctacacctactgcggcagctgtgccgcccacgcctacaagcaggtggaccccagcatcacccggcgcatcttcatcctgggccccagccaccacgtgcccctgagccgctgtgccctgagctctgtggacatctaccgcacccccctgtatgacctgagaattgaccagaagatctacggggagctgtggaagacaggcatgtttgagaggatgagcctgcagacagatgaagatgagcacagcattgagatgcacctgccctacacagccaaggccatggagagccacaaggatgagttcaccatcatccctgtgctggtgggcgccctgtctgagagcaaggagcaggagtttgggaagctgttcagcaagtacctggccgaccccagcaacctgtttgtggtgtccagtgacttctgccactggggccagcgcttccgctacagctactatgatgagagccagggcgagatctaccgcagcattgagcacctggacaagatgggcatgagcatcatcgagcagctggaccctgtgtccttcagcaactacctgaagaagtaccacaacaccatctgtggccgccaccccatcggcgtgctgctgaatgccatcacagagctgcagaagaatggcatgaacatgtccttctccttcctgaactatgcccagagcagccagtgcaggaactggcaggacagctctgtgtcctatgctgctggggccctgactgtgcactag

SEQ ID NO: 159084 - DNA, 903 bp, synthetic construct
  misc_feature 1..903: note = Description of Artificial Sequence: Synthetic coding sequence
  source 1..903: mol_type = other DNA
atgcccctgtggagggctgacaagtgccaggatgtgcagagcgcctcctggaggccccggcgggcagatggcccccagctgaatgcccagctggagggctggctgagccaggtgcagagcaccaagaggcctgcccgggccatcatcgcccctcatgctggctacacctactgcggcagctgtgccgcccacgcctacaagcaggtggaccccagcatcacccggcgcatcttcatcctgggccccagccaccacgtgcccctgagccgctgtgccctgagctctgtggacatctaccgcacccccctgtatgacctgagaattgaccagaagatctatggagagctgtggaagacaggcatgtttgagaggatgagcctgcagacagatgaagatgagcacagcattgagatgcacctgccctacacagccaaggccatggagagccacaaggatgagttcaccatcatccctgtgctggtgggcgccctgtctgagagcaaggagcaggagtttgggaagctgttcagcaagtacctggccgaccccagcaacctgtttgtggtgtccagtgacttctgccactggggccagcgcttccgctacagctactatgatgagagccagggcgagatctaccgcagcattgagcacctggacaagatgggcatgagcatcatcgagcagctggaccctgtgtccttcagcaactacctgaagaagtaccacaacaccatctgtggccgccaccccatcggcgtgctgctgaatgccatcacagagctgcagaagaatggcatgaacatgtccttctccttcctgaactatgcccagagcagccagtgcaggaactggcaggacagctctgtgtcctatgctgctggggccctgactgtgcactag

SEQ ID NO: 159085 - DNA, 894 bp, synthetic construct; identical to SEQ ID NO: 159083
  misc_feature 1..894: note = Description of Artificial Sequence: Synthetic coding sequence
  source 1..894: mol_type = other DNA

SEQ ID NO: 159086 - DNA, 825 bp, synthetic construct
  misc_feature 1..825: note = Description of Artificial Sequence: Synthetic coding sequence
  source 1..825: mol_type = other DNA
atgagcaacagagtggtgtgccgggaggccagccatgctggctcctggtacacagccagcggcccccagctgaatgcccagctggagggctggctgagccaggtgcagagcaccaagaggcctgcccgggccatcatcgccccccggcgcatcttcatcctgggccccagccaccacgtgcccctgagccgctgtgccctgagctctgtggacatctaccgcacccccctgtatgacctgagaattgaccagaagatctatggagagctgtggaagacaggcatgtttgagaggatgagcctgcagacagatgaagatgagcacagcattgagatgcacctgccctacacagccaaggccatggagagccacaaggatgagttcaccatcatccctgtgctggtgggcgccctgtctgagagcaaggagcaggagtttgggaagctgttcagcaagtacctggccgaccccagcaacctgtttgtggtgtccagtgacttctgccactggggccagcgcttccgctacagctactatgatgagagccagggcgagatctaccgcagcattgagcacctggacaagatgggcatgagcatcatcgagcagctggaccctgtgtccttcagcaactacctgaagaagtaccacaacaccatctgtggccgccaccccatcggcgtgctgctgaatgccatcacagagctgcagaagaatggcatgaacatgtccttctccttcctgaactatgcccagagcagccagtgcaggaactggcaggacagctctgtgtcctatgctgctggggccctgactgtgcactag

SEQ ID NO: 159087 - DNA, 63 bp, synthetic construct
  misc_feature 1..63: note = Description of Artificial Sequence: Synthetic coding sequence
  source 1..63: mol_type = other DNA
atgagcaacagagtggtgtgccgggaggccagccatgctggctcctggtacacagccagctag

SEQ ID NO: 159088 - DNA, 5478 bp, synthetic construct
  misc_feature 1..5478: note = Description of Artificial Sequence: Synthetic coding sequence
  source 1..5478: mol_type = other DNA
atggaggacacccaggccatcgactgggatgtggaggaggaggaggagacagagcagagcagcgagagcctgcgctgcaatgtggagcctgtgggccgcctgcacatcttcagcggggcccacggccctgagaaggacttccccctgcacctgggcaagaatgtggtgggccgcatgccagactgcagcgtggccctgcccttccccagcatcagcaagcagcacgccgagattgagatcctggcctgggacaaggcccccatcctgcgggactgtggcagcctgaatggcacccagatcctgcggccccccaaggtgctgagccctggggtgagccaccggctgcgggaccaggagctgatcctgtttgctgacctgctgtgccagtaccaccggctggatgtgtccctgccctttgtgtcccggggccccctgactgtggaggagaccccccgggtgcagggcgagacccagccccagaggctgctgctggccgaggacagcgaggaggaggtggacttcctgtctgagaggaggatggtgaagaagagcaggaccaccagcagcagcgtcatcgtgcctgagagtgatgaggagggccacagccctgtgctgggcggcctgggccccccatttgccttcaacctgaacagcgacacagatgtggaggagggccagcagcctgccacagaggaggccagcagcgctgcccggcggggggccaccgtggaggccaagcagagcgaggccgaggtggtgacagagatccagctggagaaggaccagcccctggtgaaggagcgggacaatgacaccaaggtgaagagaggagctggaaatggagtggtgcctgctggggtcatcctggagaggagccagcccccaggagaagattctgacacagatgtggatgatgacagcaggcctcctggccggcctgctgaggtgcacctggagcgggcccagcccttcggcttcatcgacagcgacacagatgctgaggaggagcgcatcccagccacccctgtggtgatccccatgaagaagaggaagatcttccacggcgtgggcacccggggccctggggcccctggcctggcccacctgcaggagagccaggccggcagtgacacagatgtggaggagggcaaggccccccaggccgtgcccctggagaagagccaggcctccatggtgatcaacagcgacacagatgatgaggaggaggtgtctgctgccctgaccctggcccacctgaaggagagccagcctgccatctggaacagagatgctgaggaggacatgccccagagggtggtgctgctgcagaggagccagaccaccacagagcgggacagcgacacagatgtggaggaggaggagctgcctgtggagaaccgggaggccgtgctgaaggaccacaccaagatccgggccctggtgcgggcccacagcgagaaggaccagcccccatttggagacagtgatgacagcgtggaggccgacaagagcagccctggcatccacctggagaggagccaggccagcaccaccgtggacatcaacacccaggtggagaaggaggtgcccccaggcagcgccatcatccacatcaagaagcaccaggtgtctgtggagggcaccaaccagacagatgtgaaggctgtgggcggccctgccaagctgctggtggtgtccctggaggaggcctggcccctgcacggggactgtgaaacagatgctgaggagggcaccagcctgacagcctctgtggtggctgatgtgaggaagagccagctgcctgcagaaggagatgctggagctgagtgggccgctgctgtgctgaagcaggagcgggcccacgaggtgggcgcccagggcggcccccctgtggcccaggtggagcaggacctgcccatcagccgggagaacctgacagacctggtggtggacacagacaccctgggggagagcacccagccccagcgggagggcgcccaggtgcccaccggccgggagcgggagcagcacgtgggcggcaccaaggacagcgaggacaactacggggacagcgaggacctggacctgcaggccacccagtgcttcctggagaaccagggcctggaggccgtgcagagcatggaggatgagcccacccaggccttcatgctgaccccaccccaggagctgggccccagccactgcagcttccagaccaccggcctgctgaactgcaagatgcccccagctgagaaggccagccgcatccgggctgctgagaaggtgtccagaggagaccaggagagcccagatgcctgcctgcccccaacagtgcctgaggccccagccccaccccagaagcccctgaacagccagagccagaagcacctggcccccccacccctgctgagccccctgctgcccagcatcaagcccaccgtgaggaagacccggcaggacggcagccaggaggcccctgaggcccccctgagcagcgagctggagcccttccaccccaagcccaagatccgcaccaggaagagcagcaggatgacccccttccctgccaccagcgctgcccctgagccccaccccagcaccagcacagcccagcctgtgacccccaagcccaccagccaggccaccaggagcaggaccaacagaagctctgtgaagaccccagagcctgtggtgcccacagcccctgagctgcagcccagcaccagcacagaccagcctgtgaccagcgagcccaccagccaggtgacccggggcaggaagagccgcagctctgtgaagaccccagagaccgtggtgcccacagccctggagctgcagcccagcaccagcacagacaggcctgtgaccagcgagcccaccagccaggccacccggggcaggaagaacagaagctctgtgaagaccccagagcctgtggtgcccacagcccctgagctgcagcccagcaccagcacagaccagcctgtgaccagcgagcccacctaccaggccacccggggcaggaagaacagaagctctgtgaagaccccagagcctgtggtgcccacagcccctgagctgcggcccagcaccagcacagacaggcctgtgacccccaagcccaccagcaggaccaccaggagcaggaccaacatgagctctgtgaagaccccagagaccgtggtgcccacagcccctgagctgcagatcagcaccagcacagaccagcctgtgacccccaagcccaccagcaggaccaccaggagcaggaccaacatgagctctgtgaagaaccctgagagcacagtgcccatcgcccctgagctgccccccagcaccagcacagagcagcctgtgaccccagagcccaccagccgggccacccggggcaggaagaacagaagcagcggcaagaccccagagaccctggtgcccacagcccccaagctggagcccagcaccagcacagaccagcctgtgaccccagagcccaccagccaggccacccggggccgcaccaacagaagctctgtgaagaccccagagaccgtggtgcccacagcccctgagctgcagcccagcaccagcacagaccagcctgtgaccccagagcccaccagccaggccacccggggccgcacagacaggagctctgtgaagaccccagagaccgtggtgcccacagcccctgagctgcaggccagcgccagcacagaccagcctgtgaccagcgagcccaccagcaggaccacccggggcaggaagaacagaagctctgtgaagaccccagagaccgtggtgcctgctgcccctgagctgcagcccagcaccagcacagaccagcctgtgaccccagagcccaccagccgggccacccggggccgcaccaacagaagctctgtgaagaccccagagagcatcgtgcccatcgcccctgagctgcagcccagcaccagcaggaaccagctggtgaccccagagcccaccagccgggccacccgctgcaggaccaacagaagctctgtgaagaccccagagcctgtggtgcccacagcccctgagccccaccccaccaccagcacagaccagcctgtgacccccaagctgaccagccgggccaccaggaggaagaccaacagaagctctgtgaagacccccaagcctgtggagcctgctgccagtgacctggagcccttcacccccacagaccagagcgtgaccccagaggccatcgcccagggcggccagagcaagaccctgcggagcagcacagtgcgggccatgcctgtgcccaccaccccagagttccagagccctgtgaccacagaccagcccatcagccctgagcccatcacccagcccagctgcatcaagaggcagagagctgctggcaaccctggcagcctggccgcccccatcgaccacaagccctgcagcgcccccctggagcccaagagccaggccagcaggaaccagcgctggggcgctgtgcgggctgctgagagcctgacagccatccctgagcccgccagcccccagctgctggagacccccatccacgccagccagatccagaaggtggagcccgccggccgcagccgcttcaccccagagctgcagcccaaggccagccagagcaggaagaggagcctggccaccatggacagccccccccaccagaagcagccccagagaggagaggtgtcccagaagacagtcatcatcaaggaggaggaggaggacacagctgagaagccaggcaaggaggaggatgtggtgacccccaagccaggcaagaggaagagggaccaggccgaggaggagcccaaccgcatccccagccgcagcctgcggaggaccaagctgaaccaggagagcacagcccccaaggtgctcttcaccggggtggtggatgcccggggggagagagctgtgctggccctgggcggcagcctggccggcagcgctgctgaggccagccacctggtgacagaccgcatccggaggacagtgaagttcctgtgtgccctgggccggggcatccccatcctgagcctggactggctgcaccagagcaggaaggccggcttcttcctgcccccagatgaatatgtggtgacagatcctgagcaggagaagaactttggcttcagcctgcaggatgccctgagccgggcccgggagcggcggctgctggagggctatgagatctacgtgaccccaggagtgcagcccccaccaccccagatgggagagatcatcagctgctgcggcggcacctacctgcccagcatgcccaggagctacaagccccagagggtggtgatcacctgcccccaggacttcccccactgcagcatccccctgcgggtgggcctgcccctgctgagccctgagttcctgctgactggagtgctgaagcaggaggccaagccagaggcctttgtgctgagccccctggagatgagcagcacctag

SEQ ID NO: 159089 - DNA, 6270 bp, synthetic construct
  misc_feature 1..6270: note = Description of Artificial Sequence: Synthetic coding sequence
  source 1..6270: mol_type = other DNA
atggaggacacccaggccatcgactgggatgtggaggaggaggaggagacagagcagagcagcgagagcctgcgctgcaatgtggagcctgtgggccgcctgcacatcttcagcggggcccacggccctgagaaggacttccccctgcacctgggcaagaatgtggtgggccgcatgccagactgcagcgtggccctgcccttccccagcatcagcaagcagcacgccgagattgagatcctggcctgggacaaggcccccatcctgcgggactgtggcagcctgaatggcacccagatcctgcggccccccaaggtgctgagccctggggtgagccaccggctgcgggaccaggagctgatcctgtttgctgacctgctgtgccagtaccaccggctggatgtgtccctgccctttgtgtcccggggccccctgactgtggaggagaccccccgggtgcagggcgagacccagccccagaggctgctgctggccgaggacagcgaggaggaggtggacttcctgtctgagaggaggatggtgaagaagagcaggaccaccagcagcagcgtcatcgtgcctgagagtgatgaggagggccacagccctgtgctgggcggcctgggccccccatttgccttcaacctgaacagcgacacagatgtggaggagggccagcagcctgccacagaggaggccagcagcgctgcccggcggggggccaccgtggaggccaagcagagcgaggccgaggtggtgacagagatccagctggagaaggaccagcccctggtgaaggagcgggacaatgacaccaaggtgaagagaggagctggaaatggagtggtgcctgctggggtcatcctggagaggagccagcccccaggagaagattctgacacagatgtggatgatgacagcaggcctcctggccggcctgctgaggtgcacctggagcgggcccagcccttcggcttcatcgacagcgacacagatgctgaggaggagcgcatcccagccacccctgtggtgatccccatgaagaagaggaagatcttccacggcgtgggcacccggggccctggggcccctggcctggcccacctgcaggagagccaggccggcagtgacacagatgtggaggagggcaaggccccccaggccgtgcccctggagaagagccaggcctccatggtgatcaacagcgacacagatgatgaggaggaggtgtctgctgccctgaccctggcccacctgaaggagagccagcctgccatctggaacagagatgctgaggaggacatgccccagagggtggtgctgctgcagaggagccagaccaccacagagcgggacagcgacacagatgtggaggaggaggagctgcctgtggagaaccgggaggccgtgctgaaggaccacaccaagatccgggccctggtgcgggcccacagcgagaaggaccagcccccatttggagacagtgatgacagcgtggaggccgacaagagcagccctggcatccacctggagaggagccaggccagcaccaccgtggacatcaacacccaggtggagaaggaggtgcccccaggcagcgccatcatccacatcaagaagcaccaggtgtctgtggagggcaccaaccagacagatgtgaaggctgtgggcggccctgccaagctgctggtggtgtccctggaggaggcctggcccctgcacggggactgtgaaacagatgctgaggagggcaccagcctgacagcctctgtggtggctgatgtgaggaagagccagctgcctgcagaaggagatgctggagctgagtgggccgctgctgtgctgaagcaggagcgggcccacgaggtgggcgcccagggcggcccccctgtggcccaggtggagcaggacctgcccatcagccgggagaacctgacagacctggtggtggacacagacaccctgggggagagcacccagccccagcgggagggcgcccaggtgcccaccggccgggagcgggagcagcacgtgggcggcaccaaggacagcgaggacaactacggggacagcgaggacctggacctgcaggccacccagtgcttcctggagaaccagggcctggaggccgtgcagagcatggaggatgagcccacccaggccttcatgctgaccccaccccaggagctgggccccagccactgcagcttccagaccaccggcaccctggatgagccctgggaggtgctggccacccagcccttctgcctgcgggagagtgaagattctgagacccagccctttgacacccacctggaggcctacggcccctgcctgagccccccccgggccatccctggggaccagcaccctgagagccctgtgcacacagagcccatgggcatccagggccggggccggcagacagtggacaaggtgatgggcatccccaaggagacagctgagcgggtgggccctgagcggggccccctggagcgggagacagagaagctgctgcctgagcggcagacagatgtgactggagaggaggagctgaccaagggcaagcaggaccgggagcagaagcagctgctggcccgggacacccagaggcaggagagtgacaagaatggagagagcgccagccctgagcgggaccgggagagcctgaaggtggagattgagaccagcgaggagatccaggagaagcaggtgcagaagcagaccctgcccagcaaggcctttgagcgggaggtggagaggcctgtggccaacagagaatgtgaccctgctgagctggaggagaaggtgcccaaggtgatcctggagcgggacacccagagaggagagcctgagggcggcagccaggaccagaagggccaggccagcagccccaccccagagcccggggtgggcgctggggacctgcccggccccaccagcgcccctgtgcccagcggcagccagagcggcggccggggcagccctgtgagcccccggcggcaccagaagggcctgctgaactgcaagatgcccccagctgagaaggccagccgcatccgggctgctgagaaggtgtccagaggagaccaggagagcccagatgcctgcctgcccccaacagtgcctgaggccccagccccaccccagaagcccctgaacagccagagccagaagcacctggcccccccacccctgctgagccccctgctgcccagcatcaagcccaccgtgaggaagacccggcaggacggcagccaggaggcccctgaggcccccctgagcagcgagctggagcccttccaccccaagcccaagatccgcaccaggaagagcagcaggatgacccccttccctgccaccagcgctgcccctgagccccaccccagcaccagcacagcccagcctgtgacccccaagcccaccagccaggccaccaggagcaggaccaacagaagctctgtgaagaccccagagcctgtggtgcccacagcccctgagctgcagcccagcaccagcacagaccagcctgtgaccagcgagcccaccagccaggtgacccggggcaggaagagccgcagctctgtgaagaccccagagaccgtggtgcccacagccctggagctgcagcccagcaccagcacagacaggcctgtgaccagcgagcccaccagccaggccacccggggcaggaagaacagaagctctgtgaagaccccagagcctgtggtgcccacagcccctgagctgcagcccagcaccagcacagaccagcctgtgaccagcgagcccacctaccaggccacccggggcaggaagaacagaagctctgtgaagaccccagagcctgtggtgcccacagcccctgagctgcggcccagcaccagcacagacaggcctgtgacccccaagcccaccagcaggaccaccaggagcaggaccaacatgagctctgtgaagaccccagagaccgtggtgcccacagcccctgagctgcagatcagcaccagcacagaccagcctgtgacccccaagcccaccagcaggaccaccaggagcaggaccaacatgagctctgtgaagaaccctgagagcacagtgcccatcgcccctgagctgccccccagcaccagcacagagcagcctgtgaccccagagcccaccagccgggccacccggggcaggaagaacagaagcagcggcaagaccccagagaccctggtgcccacagcccccaagctggagcccagcaccagcacagaccagcctgtgaccccagagcccaccagccaggccacccggggccgcaccaacagaagctctgtgaagaccccagagaccgtggtgcccacagcccctgagctgcagcccagcaccagcacagaccagcctgtgaccccagagcccaccagccaggccacccggggccgcacagacaggagctctgtgaagaccccagagaccgtggtgcccacagcccctgagctgcaggccagcgccagcacagaccagcctgtgaccagcgagcccaccagcaggaccacccggggcaggaagaacagaagctctgtgaagaccccagagaccgtggtgcctgctgcccctgagctgcagcccagcaccagcacagaccagcctgtgaccccagagcccaccagccgggccacccggggccgcaccaacagaagctctgtgaagaccccagagagcatcgtgcccatcgcccctgagctgcagcccagcaccagcaggaaccagctggtgaccccagagcccaccagccgggccacccgctgcaggaccaacagaagctctgtgaagaccccagagcctgtggtgcccacagcccctgagccccaccccaccaccagcacagaccagcctgtgacccccaagctgaccagccgggccaccaggaggaagaccaacagaagctctgtgaagacccccaagcctgtggagcctgctgccagtgacctggagcccttcacccccacagaccagagcgtgaccccagaggccatcgcccagggcggccagagcaagaccctgcggagcagcacagtgcgggccatgcctgtgcccaccaccccagagttccagagccctgtgaccacagaccagcccatcagccctgagcccatcacccagcccagctgcatcaagaggcagagagctgctggcaaccctggcagcctggccgcccccatcgaccacaagccctgcagcgcccccctggagcccaagagccaggccagcaggaaccagcgctggggcgctgtgcgggctgctgagagcctgacagccatccctgagcccgccagcccccagctgctggagacccccatccacgccagccagatccagaaggtggagcccgccggccgcagccgcttcaccccagagctgcagcccaaggccagccagagcaggaagaggagcctggccaccatggacagccccccccaccagaagcagccccagagaggagaggtgtcccagaagacagtcatcatcaaggaggaggaggaggacacagctgagaagccaggcaaggaggaggatgtggtgacccccaagccaggcaagaggaagagggaccaggccgaggaggagcccaaccgcatccccagccgcagcctgcggaggaccaagctgaaccaggagagcacagcccccaaggtgctcttcaccggggtggtggatgcccggggggagagagctgtgctggccctgggcggcagcctggccggcagcgctgctgaggccagccacctggtgacagaccgcatccggaggacagtgaagttcctgtgtgccctgggccggggcatccccatcctgagcctggactggctgcaccagagcaggaaggccggcttcttcctgcccccagatgaatatgtggtgacagatcctgagcaggagaagaactttggcttcagcctgcaggatgccctgagccgggcccgggagcggcggctgctggagggctatgagatctacgtgaccccaggagtgcagcccccaccaccccagatgggagagatcatcagctgctgcggcggcacctacctgcccagcatgcccaggagctacaagccccagagggtggtgatcacctgcccccaggacttcccccactgcagcatccccctgcgggtgggcctgcccctgctgagccctgagttcctgctgactggagtgctgaagcaggaggccaagccagaggcctttgtgctgagccccctggagatgagcagcacctag

SEQ ID NO: 159090 - DNA, 489 bp, synthetic construct
  misc_feature 1..489: note = Description of Artificial Sequence: Synthetic coding sequence
  source 1..489: mol_type = other DNA
atggaggacacccaggccatcgactgggatgtggaggaggaggaggagacagagcagagcagcgagagcctgcgctgcaatgtggagcctgtgggccgcctgcacatcttcagcggggcccacggccctgagaaggacttccccctgcacctgggcaagaatgtggtgggccgcatgccagactgcagcgtggccctgcccttccccagcatcagcaagcagcacgccgagattgagatcctggcctgggacaaggcccccatcctgcgggactgtggcagcctgaatggcacccagatcctgcggccccccaaggtgctgagccctggggtgagccaccggctgcgggaccaggagctgatcctgtttgctgacctgctgtgccagtaccaccggctggatgtgtccctgccctttgtgtcccggggccccctgactgtggaggagaccccccgggtgcagggcgagacccagccccagaggctgtag

SEQ ID NO: 159091 - DNA, 342 bp, synthetic construct
  misc_feature 1..342: note = Description of Artificial Sequence: Synthetic coding sequence
  source 1..342: mol_type = other DNA
atggaggacacccaggccatcgactgggatgtggaggaggaggaggagacagagcagagcagcgagagcctgcgctgcaatgtggagcctgtgggccgcctgcacatcttcagcggggcccacggccctgagaaggacttccccctgcacctgggcaagaatgtggtgggccgcatgccagactgcagcgtggccctgcccttccccagcatcagcaagcagcacgccgagattgagatcctggcctgggacaaggcccccatcctgcgggactgtggcagcctgaatggcacccagatcctgcggccccccaaggtgctgagccctggggtgagccactag

SEQ ID NO: 159092 - DNA, 384 bp, synthetic construct
  misc_feature 1..384: note = Description of Artificial Sequence: Synthetic coding sequence
  source 1..384: mol_type = other DNA
atggaggacacccaggccatcgactgggatgtggaggaggaggaggagacagagcagagcagcgagagcctgcgctgcaatgtggagcctgtgggccgcctgcacatcttcagcggggcccacggccctgagaaggacttccccctgcacctgggcaagaatgtggtgggccgcatgccagactgcagcgtggccctgcccttccccagcatcagcaagcagcacgccgagattgagatcctggcctgggacaaggcccccatcctgcgggactgtggcagcctgaatggcacccagatcctgcggccccccaaggtgctgagccctggggtgagccaccggctgcgggaccaggagctgatcctgtttgctgacctgctgtag

SEQ ID NO: 159093 - DNA, 489 bp, synthetic construct; identical to SEQ ID NO: 159090
  misc_feature 1..489: note = Description of Artificial Sequence: Synthetic coding sequence
  source 1..489: mol_type = other DNA

SEQ ID NO: 159094 - DNA, 921 bp, synthetic construct
  misc_feature 1..921: note = Description of Artificial Sequence: Synthetic coding sequence
  source 1..921: mol_type = other DNA
tgacatgtgggcggcaccaaggacagcgaggacaactatggagacagcgaggacctggacctgcaggccacccagtgcttcctggagaaccagggcctggaggccgtgcagagcatggaggatgagcccacccaggccttcatgctgaccccaccccaggagctgggccccagccactgcagcttccagaccaccggcctgctgaactgcaagatgcctcctgctgagaaggccagccgcatccgggctgctgagaaggtgtccagaggagaccaggagagcccagatgcctgcctgccccccaccgtgcctgaggccccagccccaccccagaagcccctgaacagccagagccagaagcacctggcccccccacccctgctgagccccctgctgcccagcatcaagcccaccgtgaggaagacccggcaggacggcagccaggaggcccctgaggcccccctgagcagcgagctggagcccttccaccccaagcccaagatccgcaccaggaagagcagcaggatgacccccttccctgccaccagcgctgcccctgagccccaccccagcaccagcacagcccagcctgtgacccccaagcccaccagccaggccaccaggagcaggaccaacagaagctctgtgaagaccccagagcctgtggtgcccacagcccctgagctgcagcccagcaccagcacagaccagcctgtgaccagcgagcccaccagccaggtgacccggggcaggaagagccgcagctctgtgaagaccccagagaccgtggtgcccacagccctggagctgcagcccagcaccagcacagacaggcctgtgaccagcgagcccaccagccaggccacccggggcaggaagaacagaagctctgtgaagaccccagagcctgtggtgccctag

SEQ ID NO: 159095 - DNA, 384 bp, synthetic construct; identical to SEQ ID NO: 159092
  misc_feature 1..384: note = Description of Artificial Sequence: Synthetic coding sequence
  source 1..384: mol_type = other DNA

SEQ ID NO: 159096 - DNA, 921 bp, synthetic construct; identical to SEQ ID NO: 159094
  misc_feature 1..921: note = Description of Artificial Sequence: Synthetic coding sequence
  source 1..921: mol_type = other DNA

SEQ ID NO: 159097 - DNA, 921 bp, synthetic construct; identical to SEQ ID NO: 159094
  misc_feature 1..921: note = Description of Artificial Sequence: Synthetic coding sequence
  source 1..921: mol_type = other DNA

SEQ ID NO: 159098 - DNA, 6270 bp, synthetic construct; identical to SEQ ID NO: 159089
  misc_feature 1..6270: note = Description of Artificial Sequence: Synthetic coding sequence
  source 1..6270: mol_type = other DNA

SEQ ID NO: 159099 - DNA, 6270 bp, synthetic construct; identical to SEQ ID NO: 159089
  misc_feature 1..6270: note = Description of Artificial Sequence: Synthetic coding sequence
  source 1..6270: mol_type = other DNA

SEQ ID NO: 159100 - DNA, 4968 bp, synthetic construct
  misc_feature 1..4968: note = Description of Artificial Sequence: Synthetic coding sequence
  source 1..4968: mol_type = other DNA
atgtaccaccggctggatgtgtccctgccctttgtgtcccggggccccctgactgtggaggagaccccccgggtgcagggcgagacccagccccagaggctgctgctggccgaggacagcgaggaggaggtggacttcctgtctgagaggaggatggtgaagaagagcaggaccaccagcagcagcgtcatcgtgcctgagagtgatgaggagggccacagccctgtgctgggcggcctgggccccccatttgccttcaacctgaacagcgacacagatgtggaggagggccagcagcctgccacagaggaggccagcagcgctgcccggcggggggccaccgtggaggccaagcagagcgaggccgaggtggtgacagagatccagctggagaaggaccagcccctggtgaaggagcgggacaatgacaccaaggtgaagagaggagctggaaatggagtggtgcctgctggggtcatcctggagaggagccagcccccaggagaagattctgacacagatgtggatgatgacagcaggcctcctggccggcctgctgaggtgcacctggagcgggcccagcccttcggcttcatcgacagcgacacagatgctgaggaggagcgcatcccagccacccctgtggtgatccccatgaagaagaggaagatcttccacggcgtgggcacccggggccctggggcccctggcctggcccacctgcaggagagccaggccggcagtgacacagatgtggaggagggcaaggccccccaggccgtgcccctggagaagagccaggcctccatggtgatcaacagcgacacagatgatgaggaggaggtgtctgctgccctgaccctggcccacctgaaggagagccagcctgccatctggaacagagatgctgaggaggacatgccccagagggtggtgctgctgcagaggagccagaccaccacagagcgggacagcgacacagatgtggaggaggaggagctgcctgtggagaaccgggaggccgtgctgaaggaccacaccaagatccgggccctggtgcgggcccacagcgagaaggaccagcccccatttggagacagtgatgacagcgtggaggccgacaagagcagccctggcatccacctggagaggagccaggccagcaccaccgtggacatcaacacccaggtggagaaggaggtgcccccaggcagcgccatcatccacatcaagaagcaccaggtgtctgtggagggcaccaaccagacagatgtgaaggctgtgggcggccctgccaagctgctggtggtgtccctggaggaggcctggcccctgcacggggactgtgaaacagatgctgaggagggcaccagcctgacagcctctgtggtggctgatgtgaggaagagccagctgcctgcagaaggagatgctggagctgagtgggccgctgctgtgctgaagcaggagcgggcccacgaggtgggcgcccagggcggcccccctgtggcccaggtggagcaggacctgcccatcagccgggagaacctgacagacctggtggtggacacagacaccctgggggagagcacccagccccagcgggagggcgcccaggtgcccaccggccgggagcgggagcagcacgtgggcggcaccaaggacagcgaggacaactacggggacagcgaggacctggacctgcaggccacccagtgcttcctggagaaccagggcctggaggtgcagagcatggaggatgagcccacccaggccttcatgctgaccccaccccaggagctgggccccagccactgcagcttccagaccaccggcctgctgaactgcaagatgcctcctgctgagaaggccagccgcatccgggctgctgagaaggtgtccagaggagaccaggagagcccagatgcctgcctgccccccaccgtgcctgaggccccagccccaccccagaagcccctgaacagccagagccagaagcacctggcccccccacccctgctgagccccctgctgcccagcatcaagcccaccgtgaggaagacccggcaggacggcagccaggaggcccctgaggcccccctgagcagcgagctggagcccttccaccccaagcccaagatccgcaccaggaagagcagcaggatgacccccttccctgccaccagcgctgcccctgagccccaccccagcaccagcacagcccagcctgtgacccccaagcccaccagccaggccaccaggagcaggaccaacagaagctctgtgaagaccccagagcctgtggtgcccacagcccctgagctgcagcccagcaccagcacagaccagcctgtgaccagcgagcccaccagccaggtgacccggggcaggaagagccgcagctctgtgaagaccccagagaccgtggtgcccacagccctggagctgcagcccagcaccagcacagacaggcctgtgaccagcgagcccaccagccaggccacccggggcaggaagaacagaagctctgtgaagaccccagagcctgtggtgcccacagcccctgagctgcagcccagcaccagcacagaccagcctgtgaccagcgagcccacctaccaggccacccggggcaggaagaacagaagctctgtgaagaccccagagcctgtggtgcccacagcccctgagctgcggcccagcaccagcacagacaggcctgtgacccccaagcccaccagcaggaccaccaggagcaggaccaacatgagctctgtgaagaaccctgagagcacagtgcccatcgcccctgagctgccccccagcaccagcacagagcagcctgtgaccccagagcccaccagccgggccacccggggcaggaagaacagaagcagcggcaagaccccagagaccctggtgcccacagcccccaagctggagcccagcaccagcacagaccagcctgtgaccccagagcccaccagccaggccacccggggccgcaccaacagaagctctgtgaagaccccagagaccgtggtgcccacagcccctgagctgcagcccagcaccagcacagaccagcctgtgaccccagagcccaccagccaggccacccggggccgcacagacaggagctctgtgaagaccccagagaccgtggtgcccacagcccctgagctgcaggccagcgccagcacagaccagcctgtgaccagcgagcccaccagcaggaccacccggggcaggaagaacagaagctctgtgaagaccccagagaccgtggtgcctgctgcccctgagctgcagcccagcaccagcacagaccagcctgtgaccccagagcccaccagccgggccacccggggccgcaccaacagaagctctgtgaagaccccagagagcatcgtgcccatcgcccctgagctgcagcccagcaccagcaggaaccagctggtgaccccagagcccaccagccgggccacccgctgcaggaccaacagaagctctgtgaagaccccagagcctgtggtgcccacagcccctgagccccaccccaccaccagcacagaccagcctgtgacccccaagctgaccagccgggccaccaggaggaagaccaacagaagctctgtgaagacccccaagcctgtggagcctgctgccagtgacctggagcccttcacccccacagaccagagcgtgaccccagaggccatcgcccagggcggccagagcaagaccctgcggagcagcacagtgcgggccatgcctgtgcccaccaccccagagttccagagccctgtgaccacagaccagcccatcagccctgagcccatcacccagcccagctgcatcaagaggcagagagctgctggcaaccctggcagcctggccgcccccatcgaccacaagccctgcagcgcccccctggagcccaagagccaggccagcaggaaccagcgctggggcgctgtgcgggctgctgagagcctgacagccatccctgagcccgccagcccccagctgctggagacccccatccacgccagccagatccagaaggtggagcccgccggccgcagccgcttcaccccagagctgcagcccaaggccagccagagcaggaagaggagcctggccaccatggacagccccccccaccagaagcagccccagagaggagaggtgtcccagaagacagtcatcatcaaggaggaggaggaggacacagctgagaagccaggcaaggaggaggatgtggtgacccccaagccaggcaagaggaagagggaccaggccgaggaggagcccaaccgcatccccagccgcagcctgcggaggaccaagctgaaccaggagagcacagcccccaaggtgctcttcaccggggtggtggatgcccggggggagagagctgtgctggccctgggcggcagcctggccggcagcgctgctgaggccagccacctggtgacagaccgcatccggaggacagtgaagttcctgtgtgccctgggccggggcatccccatcctgagcctggactggctgcaccagagcaggaaggccggcttcttcctgcccccagatgaatatgtggtgacagatcctgagcaggagaagaactttggcttcagcctgcaggatgccctgagccgggcccgggagcggcggctgctggagggctatgagatctacgtgaccccaggagtgcagcccccaccaccccagatgggagagatcatcagctgctgcggcggcacctacctgcccagcatgcccaggagctacaagccccagagggtggtgatcacctgcccccaggacttcccccactgcagcatccccctgcgggtgggcctgcccctgctgagccctgagttcctgctgactggagtgctgaagcaggaggccaagccagaggcctttgtgctgagccccctggagatgagcagcacctag

SEQ ID NO: 159101 - DNA, 489 bp, synthetic construct; identical to SEQ ID NO: 159090
  misc_feature 1..489: note = Description of Artificial Sequence: Synthetic coding sequence
  source 1..489: mol_type = other DNA

SEQ ID NO: 159102 - DNA, 342 bp, synthetic construct; identical to SEQ ID NO: 159091
  misc_feature 1..342: note = Description of Artificial Sequence: Synthetic coding sequence
  source 1..342: mol_type = other DNA

SEQ ID NO: 159103 - DNA, 342 bp, synthetic construct; identical to SEQ ID NO: 159091
  misc_feature 1..342: note = Description of Artificial Sequence: Synthetic coding sequence
  source 1..342: mol_type = other DNA

SEQ ID NO: 159104 - DNA, 384 bp, synthetic construct; identical to SEQ ID NO: 159092
  misc_feature 1..384: note = Description of Artificial Sequence: Synthetic coding sequence
  source 1..384: mol_type = other DNA

SEQ ID NO: 159105 - DNA, 489 bp, synthetic construct; identical to SEQ ID NO: 159090
  misc_feature 1..489: note = Description of Artificial Sequence: Synthetic coding sequence
  source 1..489: mol_type = other DNA

SEQ ID NO: 159106 - DNA, 342 bp, synthetic construct; identical to SEQ ID NO: 159091
  misc_feature 1..342: note = Description of Artificial Sequence: Synthetic coding sequence
  source 1..342: mol_type = other DNA

SEQ ID NO: 159107 - DNA, 489 bp, synthetic construct; identical to SEQ ID NO: 159090
  misc_feature 1..489: note = Description of Artificial Sequence: Synthetic coding sequence
  source 1..489: mol_type = other DNA

SEQ ID NO: 159108 - DNA, 384 bp, synthetic construct; identical to SEQ ID NO: 159092
  misc_feature 1..384: note = Description of Artificial Sequence: Synthetic coding sequence
  source 1..384: mol_type = other DNA

SEQ ID NO: 159109 - DNA, 921 bp, synthetic construct; identical to SEQ ID NO: 159094
  misc_feature 1..921: note = Description of Artificial Sequence: Synthetic coding sequence
  source 1..921: mol_type = other DNA

SEQ ID NO: 159110 - DNA, 6270 bp, synthetic construct; identical to SEQ ID NO: 159089
  misc_feature 1..6270: note = Description of Artificial Sequence: Synthetic coding sequence
  source 1..6270: mol_type = other DNA

SEQ ID NO: 159111 - DNA, 5409 bp, synthetic construct
  misc_feature 1..5409: note = Description of Artificial Sequence: Synthetic coding sequence
  source 1..5409: mol_type = other DNA
atggaggacacccaggccatcgactgggatgtggaggaggaggaggagacagagcagagcagcgagagcctgcgctgcaatgtggagcctgtgggccgcctgcacatcttcagcggggcccacggccctgagaaggacttccccctgcacctgggcaagaatgtggtgggccgcatgccagactgcagcgtggccctgcccttccccagcatcagcaagcagcacgccgagattgagatcctggcctgggacaaggcccccatcctgcgggactgtggcagcctgaatggcacccagatcctgcggccccccaaggtgctgagccctggggtgagccaccggctgcgggaccaggagctgatcctgtttgctgacctgctgtgccagtaccaccggctggatgtgtccctgccctttgtgtcccggggccccctgactgtggaggagaccccccgggtgcagggcgagacccagccccagaggctgctgctggccgaggacagcgaggaggaggtggacttcctgtctgagaggaggatggtgaagaagagcaggaccaccagcagcagcgtcatcgtgcctgagagtgatgaggagggccacagccctgtgctgggcggcctgggccccccatttgccttcaacctgaacagcgacacagatgtggaggagggccagcagcctgccacagaggaggccagcagcgctgcccggcggggggccaccgtggaggccaagcagagcgaggccgaggtggtgacagagatccagctggagaaggaccagcccctggtgaaggagcgggacaatgacaccaaggtgaagagaggagctggaaatggagtggtgcctgctggggtcatcctggagaggagccagcccccaggagaagattctgacacagatgtggatgatgacagcaggcctcctggccggcctgctgaggtgcacctggagcgggcccagcccttcggcttcatcgacagcgacacagatgctgaggaggagcgcatcccagccacccctgtggtgatccccatgaagaagaggaagatcttccacggcgtgggcacccggggccctggggcccctggcctggcccacctgcaggagagccaggccggcagtgacacagatgtggaggagggcaaggccccccaggccgtgcccctggagaagagccaggcctccatggtgatcaacagcgacacagatgatgaggaggaggtgtctgctgccctgaccctggcccacctgaaggagagccagcctgccatctggaacagagatgctgaggaggacatgccccagagggtggtgctgctgcagaggagccagaccaccacagagcgggacagcgacacagatgtggaggaggaggagctgcctgtggagaaccgggaggccgtgctgaaggaccacaccaagatccgggccctggtgcgggcccacagcgagaaggaccagcccccatttggagacagtgatgacagcgtggaggccgacaagagcagccctggcatccacctggagaggagccaggccagcaccaccgtggacatcaacacccaggtggagaaggaggtgcccccaggcagcgccatcatccacatcaagaagcaccaggtgtctgtggagggcaccaaccagacagatgtgaaggctgtgggcggccctgccaagctgctggtggtgtccctggaggaggcctggcccctgcacggggactgtgaaacagatgctgaggagggcaccagcctgacagcctctgtggtggctgatgtgaggaagagccagctgcctgcagaaggagatgctggagctgagtgggccgctgctgtgctgaagcaggagcgggcccacgaggtgggcgcccagggcggcccccctgtggcccaggtggagcaggacctgcccatcagccgggagaacctgacagacctggtggtggacacagacaccctgggggagagcacccagccccagcgggagggcgcccaggtgcccaccggccgggagcgggagcagcacgtgggcggcaccaaggacagcgaggacaactacggggacagcgaggacctggacctgcaggccacccagtgcttcctggagaaccagggcctggaggccgtgcagagcatggaggatgagcccacccaggccttcatgctgaccccaccccaggagctgggccccagccactgcagcttccagaccaccggcaccctggatgagccctgggaggtgctggccacccagcccttctgcctgcgggagagtgaagattctgagacccagccctttgacacccacctggaggcctacggcccctgcctgagccccccccgggccatccctggggaccagcaccctgagagccctgtgcacacagagcccatgggcatccagggccggggccggcagacagtggacaaggtgatgggcatccccaaggagacagctgagcgggtgggccctgagcggggccccctggagcgggagacagagaagctgctgcctgagcggcagacagatgtgactggagaggaggagctgaccaagggcaagcaggaccgggagcagaagcagctgctggcccgggacacccagaggcaggagagtgacaagaatggagagagcgccagccctgagcgggaccgggagagcctgaaggtggagattgagaccagcgaggagatccaggagaagcaggtgcagaagcagaccctgcccagcaaggcctttgagcgggaggtggagaggcctgtggccaacagagaatgtgaccctgctgagctggaggagaaggtgcccaaggtgatcctggagcgggacacccagagaggagagcctgagggcggcagccaggaccagaagggccaggccagcagccccaccccagagcccggggtgggcgctggggacctgcccggccccaccagcgcccctgtgcccagcggcagccagagcggcggccggggcagccctgtgagcccccggcggcaccagaagggcctgctgaactgcaagatgcccccagctgagaaggccagccgcatccgggctgctgagaaggtgtccagaggagaccaggagagcccagatgcctgcctgcccccaacagtgcctgaggccccagccccaccccagaagcccctgaacagccagagccagaagcacctggcccccccacccctgctgagccccctgctgcccagcatcaagcccaccgtgaggaagacccggcaggacggcagccaggaggcccctgaggcccccctgagcagcgagctggagcccttccaccccaagcccaagatccgcaccaggaagagcagcaggatgacccccttccctgccaccagcgctgcccccaagctggagcccagcaccagcacagaccagcctgtgaccccagagcccaccagccaggccacccggggccgcaccaacagaagctctgtgaagaccccagagaccgtggtgcccacagcccctgagctgcagcccagcaccagcacagaccagcctgtgaccccagagcccaccagccaggccacccggggccgcacagacaggagctctgtgaagaccccagagaccgtggtgcccacagcccctgagctgcaggccagcgccagcacagaccagcctgtgaccagcgagcccaccagcaggaccacccggggcaggaagaacagaagctctgtgaagaccccagagaccgtggtgcctgctgcccctgagctgcagcccagcaccagcacagaccagcctgtgaccccagagcccaccagccgggccacccggggccgcaccaacagaagctctgtgaagaccccagagagcatcgtgcccatcgcccctgagctgcagcccagcaccagcaggaaccagctggtgaccccagagcccaccagccgggccacccgctgcaggaccaacagaagctctgtgaagaccccagagcctgtggtgcccacagcccctgagccccaccccaccaccagcacagaccagcctgtgacccccaagctgaccagccgggccaccaggaggaagaccaacagaagctctgtgaagacccccaagcctgtggagcctgctgccagtgacctggagcccttcacccccacagaccagagcgtgaccccagaggccatcgcccagggcggccagagcaagaccctgcggagcagcacagtgcgggccatgcctgtgcccaccaccccagagttccagagccctgtgaccacagaccagcccatcagccctgagcccatcacccagcccagctgcatcaagaggcagagagctgctggcaaccctggcagcctggccgcccccatcgaccacaagccctgcagcgcccccctggagcccaagagccaggccagcaggaaccagcgctggggcgctgtgcgggctgctgagagcctgacagccatccctgagcccgccagcccccagctgctggagacccccatccacgccagccagatccagaaggtggagcctgctggccgcagccgcttcaccccagagctgcagcccaaggccagccagagcaggaagaggagcctggccaccatggacagccccccccaccagaagcagccccagagaggagaggtgtcccagaagacagtcatcatcaaggaggaggaggaggacacagctgagaagccaggcaaggaggaggatgtggtgacccccaagccaggcaagaggaagagggaccaggccgaggaggagcccaaccgcatccccagccgcagcctgcggaggaccaagctgaaccaggagagcacagcccccaaggtgctcttcaccggggtggtggatgcccggggggagagagctgtgctggccctgggcggcagcctggccggcagcgctgctgaggccagccacctggtgacagaccgcatcagaagaacagtgaagttcctgtgtgccctgggccggggcatccccatcctgagcctggactggctgcaccagagcaggaaggccggcttcttcctgcccccagatgaatatgtggtgacagatcctgagcaggagaagaactttggcttcagcctgcaggatgccctgagccgggcccgggagcggcggctgctggagggctatgagatctacgtgaccccaggagtgcagcccccaccaccccagatgggagagatcatcagctgctgcggcggcacctacctgcccagcatgcccaggagctacaagccccagagggtggtgatcacctgcccccaggacttcccccactgcagcatccccctgcgggtgggcctgcccctgctgagccctgagttcctgctgactggagtgctgaagcaggaggccaagccagaggcctttgtgctgagccccctggagatgagcagcacctag

SEQ ID NO: 159112 - DNA, 342 bp, synthetic construct; identical to SEQ ID NO: 159091
  misc_feature 1..342: note = Description of Artificial Sequence: Synthetic coding sequence
  source 1..342: mol_type = other DNA

SEQ ID NO: 159113 - DNA, 6270 bp, synthetic construct
  misc_feature 1..6270: note = Description of Artificial Sequence: Synthetic coding sequence
  source 1..6270: mol_type = other DNA
atggaggacacccaggccatcgactgggatgtggaggaggaggaggagacagagcagagcagcgagagcctgcgctgcaatgtggagcctgtgggccgcctgcacatcttcagcggggcccacggccctgagaaggacttccccctgcacctgggcaagaatgtggtgggccgcatgccagactgcagcgtggccctgcccttccccagcatcagcaagcagcacgccgagattgagatcctggcctgggacaaggcccccatcctgcgggactgtggcagcctgaatggcacccagatcctgcggccccccaaggtgctgagccctggggtgagccaccggctgcgggaccaggagctgatcctgtttgctgacctgctgtgccagtaccaccggctggatgtgtccctgccctttgtgtcccggggccccctgactgtggaggagaccccccgggtgcagggcgagacccagccccagaggctgctgctggccgaggacagcgaggaggaggtggacttcctgtctgagaggaggatggtgaagaagagcaggaccaccagcagcagcgtcatcgtgcctgagagtgatgaggagggccacagccctgtgctgggcggcctgggccccccatttgccttcaacctgaacagcgacacagatgtggaggagggccagcagcctgccacagaggaggccagcagcgctgcccggcggggggccaccgtggaggccaagcagagcgaggccgaggtggtgacagagatccagctggagaaggaccagcccctggtgaaggagcgggacaatgacaccaaggtgaagagaggagctggaaatggagtggtgcctgctggggtcatcctggagaggagccagcccccaggagaagattctgacacagatgtggatgatgacagcaggcctcctggccggcctgctgaggtgcacctggagcgggcccagcccttcggcttcatcgacagcgacacagatgctgaggaggagcgcatcccagccacccctgtggtgatccccatgaagaagaggaagatcttccacggcgtgggcacccggggccctggggcccctggcctggcccacctgcaggagagccaggccggcagtgacacagatgtggaggagggcaaggccccccaggccgtgcccctggagaagagccaggcctccatggtgatcaacagcgacacagatgatgaggaggaggtgtctgctgccctgaccctggcccacctgaaggagagccagcctgccatctggaacagagatgctgaggaggacatgccccagagggtggtgctgctgcagaggagccagaccaccacagagcgggacagcgacacagatgtggaggaggaggagctgcctgtggagaaccgggaggccgtgctgaaggaccacaccaagatccgggccctggtgcgggcccacagcgagaaggaccagcccccatttggagacagtgatgacagcgtggaggccgacaagagcagccctggcatccacctggagaggagccaggccagcaccaccgtggacatcaacacccaggtggagaaggaggtgcccccaggcagcgccatcatccacatcaagaagcaccaggtgtctgtggagggcaccaaccagacagatgtgaaggctgtgggcggccctgccaagctgctggtggtgtccctggaggaggcctggcccctgcacggggactgtgaaacagatgctgaggagggcaccagcctgacagcctctgtggtggctgatgtgaggaagagccagctgcctgcagaaggagatgctggagctgagtgggccgctgctgtgctgaagcaggagcgggcccacgaggtgggcgcccagggcggcccccctgtggcccaggtggagcaggacctgcccatcagccgggagaacctgacagacctggtggtggacacagacaccctgggggagagcacccagccccagcgggagggcgcccaggtgcccaccggccgggagcgggagcagcacgtgggcggcaccaaggacagcgaggacaactacggggacagcgaggacctggacctgcaggccacccagtgcttcctggagaaccagggcctggaggccgtgcagagcatggaggatgagcccacccaggccttcatgctgaccccaccccaggagctgggccccagccactgcagcttccagaccaccggcaccctggatgagccctgggaggtgctggccacccagcccttctgcctgcgggagagtgaagattctgagacccagccctttgacacccacctggaggcctacggcccctgcctgagccccccccgggccatccctggggaccagcaccctgagagccctgtgcacacagagcccatgggcatccagggccggggccggcagacagtggacaaggtgatgggcatccccaaggagacagctgagcgggtgggccctgagcggggccccctggagcgggagacagagaagctgctgcctgagcggcagacagatgtgactggagaggaggagctgaccaagggcaagcaggaccgggagcagaagcagctgctggcccgggacacccagaggcaggagagtgacaagaatggagagagcgccagccctgagcgggaccgggagagcctgaaggtggagattgagaccagcgaggagatccaggagaagcaggtgcagaagcagaccctgcccagcaaggcctttgagcgggaggtggagaggcctgtggccaacagagaatgtgaccctgctgagctggaggagaaggtgcccaaggtgatcctggagcgggacacccagagaggagagcctgagggcggcagccaggaccagaagggccaggccagcagccccaccccagagcccggggtgggcgctggggacctgcccggccccaccagcgcccctgtgcccagcggcagccagagcggcggccggggcagccctgtgagcccccggcggcaccagaagggcctgctgaactgcaagatgcccccagctgagaaggccagccgcatccgggctgctgagaaggtgtccagaggagaccaggagagcccagatgcctgcctgcccccaacagtgcctgaggccccagccccaccccagaagcccctgaacagccagagccagaagcacctggcccccccacccctgctgagccccctgctgcccagcatcaagcccaccgtgaggaagacccggcaggacggcagccaggaggcccctgaggcccccctgagcagcgagctggagcccttccaccccaagcccaagatccgcaccaggaagagcagcaggatgacccccttccctgccaccagcgctgcccctgagccccaccccagcaccagcacagcccagcctgtgacccccaagcccaccagccaggccaccaggagcaggaccaacagaagctctgtgaagaccccagagcctgtggtgcccacagcccctgagctgcagcccagcaccagcacagaccagcctgtgaccagcgagcccaccagccaggtgacccggggcaggaagagccgcagctctgtgaagaccccagagaccgtggtgcccacagccctggagctgcagcccagcaccagcacagacaggcctgtgaccagcgagcccaccagccaggccacccggggcaggaagaacagaagctctgtgaagaccccagagcctgtggtgcccacagcccctgagctgcagcccagcaccagcacagaccagcctgtgaccagcgagcccacctaccaggccacccggggcaggaagaacagaagctctgtgaagaccccagagcctgtggtgcccacagcccctgagctgcggcccagcaccagcacagacaggcctgtgacccccaagcccaccagcaggaccaccaggagcaggaccaacatgagctctgtgaagaccccagagaccgtggtgcccacagcccctgagctgcagatcagcaccagcacagaccagcctgtgacccccaagcccaccagcaggaccaccaggagcaggaccaacatgagctctgtgaagaaccctgagagcacagtgcccatcgcccctgagctgccccccagcaccagcacagagcagcctgtgaccccagagcccaccagccgggccacccggggcaggaagaacagaagcagcggcaagaccccagagaccctggtgcccacagcccccaagctggagcccagcaccagcacagaccagcctgtgaccccagagcccaccagccaggccacccggggccgcaccaacagaagctctgtgaagaccccagagaccgtggtgcccacagcccctgagctgcagcccagcaccagcacagaccagcctgtgaccccagagcccaccagccaggccacccggggccgcacagacaggagctctgtgaagaccccagagaccgtggtgcccacagcccctgagctgcaggccagcgccagcacagaccagcctgtgaccagcgagcccaccagcaggaccacccggggcaggaagaacagaagctctgtgaagaccccagagaccgtggtgcctgctgccccagccctgcagcccagcaccagcacagaccagcctgtgaccccagagcccaccagccgggccacccggggccgcaccaacagaagctctgtgaagaccccagagagcatcgtgcccatcgcccctgagctgcagcccagcaccagcaggaaccagctggtgaccccagagcccaccagccgggccacccgctgcaggaccaacagaagctctgtgaagaccccagagcctgtggtgcccacagcccctgagccccaccccaccaccagcacagaccagcctgtgacccccaagctgaccagccgggccaccaggaggaagaccaacagaagctctgtgaagacccccaagcctgtggagcctgctgccagtgacctggagcccttcacccccacagaccagagcgtgaccccagaggccatcgcccagggcggccagagcaagaccctgcggagcagcacagtgcgggccatgcctgtgcccaccaccccagagttccagagccctgtgaccacagaccagcccatcagccctgagcccatcacccagcccagctgcatcaagaggcagagagctgctggcaaccctggcagcctggccgcccccatcgaccacaagccctgcagcgcccccctggagcccaagagccaggccagcaggaaccagcgctggggcgctgtgcgggctgctgagagcctgacagccatccctgagcccgccagcccccagctgctggagacccccatccacgccagccagatccagaaggtggagcccgccggccgcagccgcttcaccccagagctgcagcccaaggccagccagagcaggaagaggagcctggccaccatggacagccccccccaccagaagcagccccagagaggagaggtgtcccagaagacagtcatcatcaaggaggaggaggaggacacagctgagaagccaggcaaggaggaggatgtggtgacccccaagccaggcaagaggaagagggaccaggccgaggaggagcccaaccgcatccccagccgcagcctgcggaggaccaagctgaaccaggagagcacagcccccaaggtgctcttcaccggggtggtggatgcccggggggagagagctgtgctggccctgggcggcagcctggccggcagcgctgctgaggccagccacctggtgacagaccgcatccggaggacagtgaagttcctgtgtgccctgggccggggcatccccatcctgagcctggactggctgcaccagagcaggaaggccggcttcttcctgcccccagatgaatatgtggtgacagatcctgagcaggagaagaactttggcttcagcctgcaggatgccctgagccgggcccgggagcggcggctgctggagggctatgagatctacgtgaccccaggagtgcagcccccaccaccccagatgggagagatcatcagctgctgcggcggcacctacctgcccagcatgcccaggagctacaagccccagagggtggtgatcacctgcccccaggacttcccccactgcagcatccccctgcgggtgggcctgcccctgctgagccctgagttcctgctgactggagtgctgaagcaggaggccaagccagaggcctttgtgctgagccccctggagatgagcagcacctag

SEQ ID NO: 159114 - DNA, 738 bp, synthetic construct
  misc_feature 1..738: note = Description of Artificial Sequence: Synthetic coding sequence
  source 1..738: mol_type = other DNA
atggaggacacccaggccatcgactgggatgtggaggaggaggaggagacagagcagagcagcgagagcctgcgctgcaatgtggagcctgtgggccgcctgcacatcttcagcggggcccacggccctgagaaggacttccccctgcacctgggcaagaatgtggtgggccgcatgccagactgcagcgtggccctgcccttccccagcatcagcaagcagcacgccgagattgagatcctggcctgggacaaggcccccatcctgcgggactgtggcagcctgaatggcacccagatcctgcggccccccaaggtgctgagccctggggtgagccaccggctgcgggaccaggagctgatcctgtttgctgacctgctgtgccagtaccaccggctggatgtgtccctgccctttgtgtcccggggccccctgactgtggaggagaccccccgggtgcagggcgagacccagccccagaggctgctgctggccgaggacagcgaggaggaggtggacttcctgtctgagaggaggatggtgaagaagagcaggaccaccagcagcagcgtcatcgtgcctgagagtgatgaggagggccacagccctgtgctgggcggcctgggccccccatttgccttcaacctgaacagcgacacagatgtggaggagggccagcagcctgccacagaggaggccagcagcgctgcccggcggggggccaccgtggaggcctag

SEQ ID NO: 159115 - DNA, 342 bp, synthetic construct; identical to SEQ ID NO: 159091
  misc_feature 1..342: note = Description of Artificial Sequence: Synthetic coding sequence
  source 1..342: mol_type = other DNA

SEQ ID NO: 159116 - DNA, 384 bp, synthetic construct; identical to SEQ ID NO: 159092
  misc_feature 1..384: note = Description of Artificial Sequence: Synthetic coding sequence
  source 1..384: mol_type = other DNA

SEQ ID NO: 159117 - DNA, 6270 bp, synthetic construct; identical to SEQ ID NO: 159089
  misc_feature 1..6270: note = Description of Artificial Sequence: Synthetic coding sequence
  source 1..6270: mol_type = other DNA

SEQ ID NO: 159118 - DNA, 489 bp, synthetic construct; identical to SEQ ID NO: 159090
  misc_feature 1..489: note = Description of Artificial Sequence: Synthetic coding sequence
  source 1..489: mol_type = other DNA

SEQ ID NO: 159119 - DNA, 921 bp, synthetic construct; identical to SEQ ID NO: 159094
  misc_feature 1..921: note = Description of Artificial Sequence: Synthetic coding sequence
  source 1..921: mol_type = other DNA

SEQ ID NO: 159120 - DNA, 921 bp, synthetic construct; identical to SEQ ID NO: 159094
  misc_feature 1..921: note = Description of Artificial Sequence: Synthetic coding sequence
  source 1..921: mol_type = other DNA

SEQ ID NO: 159121 - DNA, 384 bp, synthetic construct; identical to SEQ ID NO: 159092
  misc_feature 1..384: note = Description of Artificial Sequence: Synthetic coding sequence
  source 1..384: mol_type = other DNA

SEQ ID NO: 159122 - DNA, 921 bp, synthetic construct; identical to SEQ ID NO: 159094
  misc_feature 1..921: note = Description of Artificial Sequence: Synthetic coding sequence
  source 1..921: mol_type = other DNA

SEQ ID NO: 159123 - DNA, 489 bp, synthetic construct; identical to SEQ ID NO: 159090
  misc_feature 1..489: note = Description of Artificial Sequence: Synthetic coding sequence
  source 1..489: mol_type = other DNA

SEQ ID NO: 159124 - DNA, 6270 bp, synthetic construct; identical to SEQ ID NO: 159089
  misc_feature 1..6270: note = Description of Artificial Sequence: Synthetic coding sequence
  source 1..6270: mol_type = other DNA

SEQ ID NO: 159125 - DNA, 735 bp, synthetic construct
  misc_feature 1..735: note = Description of Artificial Sequence: Synthetic coding sequence
  source 1..735: mol_type = other DNA
atggaggacacccaggccatcgactgggatgtggaggaggaggaggagacagagcagagcagcgagagcctgcgctgcaatgtggagcctgtgggccgcctgcacatcttcagcggggcccacggccctgagaaggacttccccctgcacctgggcaagaatgtggtgggccgcatgccagactgcagcgtggccctgcccttccccagcatcagcaagcagcacgccgagattgagatcctggcctgggacaaggcccccatcctgcgggactgtggcagcctgaatggcacccagatcctgcggccccccaaggtgctgagccctggggtgagccaccggctgcgggaccaggagctgatcctgtttgctgacctgctgtgccagtaccaccggctggatgtgtccctgccctttgtgtcccggggccccctgactgtggaggagaccccccgggtgcagggcgagacccagccccagaggctgctgctggccgaggacagcgaggaggaggtggacttcctgtctgagaggaggatggtgaagaagagcaggaccaccagcagcagcgtcatcgtgcctgagagtgatgaggagggccacagccctgtgctgggcggcctgggccccccatttgccttcaacctgaacagcgacacagatgtggaggagggccagcagccccacagaggaggcctgctgagctgccagaagcgctgccactgccggggctag

SEQ ID NO: 159126 - DNA, 384 bp, synthetic construct; identical to SEQ ID NO: 159092
  misc_feature 1..384: note = Description of Artificial Sequence: Synthetic coding sequence
  source 1..384: mol_type = other DNA

SEQ ID NO: 159127 - DNA, 342 bp, synthetic construct; identical to SEQ ID NO: 159091
  misc_feature 1..342: note = Description of Artificial Sequence: Synthetic coding sequence
  source 1..342: mol_type = other DNA

SEQ ID NO: 159128 - DNA, 5409 bp, synthetic construct; identical to SEQ ID NO: 159111
  misc_feature 1..5409: note = Description of Artificial Sequence: Synthetic coding sequence
  source 1..5409: mol_type = other DNA

SEQ ID NO: 159129 - DNA, 735 bp, synthetic construct; identical to SEQ ID NO: 159125
  misc_feature 1..735: note = Description of Artificial Sequence: Synthetic coding sequence
  source 1..735: mol_type = other DNA

SEQ ID NO: 159130 - DNA, 5409 bp, synthetic construct; identical to SEQ ID NO: 159111
  misc_feature 1..5409: note = Description of Artificial Sequence: Synthetic coding sequence
  source 1..5409: mol_type = other DNA

SEQ ID NO: 159131 - DNA, 735 bp, synthetic construct; identical to SEQ ID NO: 159125
  misc_feature 1..735: note = Description of Artificial Sequence: Synthetic coding sequence
  source 1..735: mol_type = other DNA

SEQ ID NO: 159132 - DNA, 735 bp, synthetic construct; identical to SEQ ID NO: 159125
  misc_feature 1..735: note = Description of Artificial Sequence: Synthetic coding sequence
  source 1..735: mol_type = other DNA

SEQ ID NO: 159133 - DNA, 738 bp, synthetic construct; identical to SEQ ID NO: 159114
  misc_feature 1..738: note = Description of Artificial Sequence: Synthetic coding sequence
  source 1..738: mol_type = other DNA

SEQ ID NO: 159134 - DNA, 5478 bp, synthetic construct; identical to SEQ ID NO: 159088
  misc_feature 1..5478: note = Description of Artificial Sequence: Synthetic coding sequence
  source 1..5478: mol_type = other DNA

SEQ ID NO: 159135 - DNA, 738 bp, synthetic construct; identical to SEQ ID NO: 159114
  misc_feature 1..738: note = Description of Artificial Sequence: Synthetic coding sequence
  source 1..738: mol_type = other DNA

SEQ ID NO: 159136 - DNA, 5409 bp, synthetic construct; identical to SEQ ID NO: 159111
  misc_feature 1..5409: note = Description of Artificial Sequence: Synthetic coding sequence
  source 1..5409: mol_type = other DNA

SEQ ID NO: 159137 - DNA, 738 bp, synthetic construct; identical to SEQ ID NO: 159114
  misc_feature 1..738: note = Description of Artificial Sequence: Synthetic coding sequence
  source 1..738: mol_type = other DNA

SEQ ID NO: 159138 - DNA, 5409 bp, synthetic construct
  misc_feature 1..5409: note = Description of Artificial Sequence: Synthetic coding sequence
  source 1..5409: mol_type = other DNA
atggaggacacccaggccatcgactgggatgtggaggaggaggaggagacagagcagagcagcgagagcctgcgctgcaatgtggagcctgtgggccgcctgcacatcttcagcggggcccacggccctgagaaggacttccccctgcacctgggcaagaatgtggtgggccgcatgccagactgcagcgtggccctgcccttccccagcatcagcaagcagcacgccgagattgagatcctggcctgggacaaggcccccatcctgcgggactgtggcagcctgaatggcacccagatcctgcggccccccaaggtgctgagccctggggtgagccaccggctgcgggaccaggagctgatcctgtttgctgacctgctgtgccagtaccaccggctggatgtgtccctgccctttgtgtcccggggccccctgactgtggaggagaccccccgggtgcagggcgagacccagccccagaggctgctgctggccgaggacagcgaggaggaggtggacttcctgtctgagaggaggatggtgaagaagagcaggaccaccagcagcagcgtcatcgtgcctgagagtgatgaggagggccacagccctgtgctgggcggcctgggccccccatttgccttcaacctgaacagcgacacagatgtggaggagggccagcagcctgccacagaggaggccagcagcgctgcccggcggggggccaccgtggaggccaagcagagcgaggccgaggtggtgacagagatccagctggagaaggaccagcccctggtgaaggagcgggacaatgacaccaaggtgaagagaggagctggaaatggagtggtgcctgctggggtcatcctggagaggagccagcccccaggagaagattctgacacagatgtggatgatgacagcaggcctcctggccggcctgctgaggtgcacctggagcgggcccagcccttcggcttcatcgacagcgacacagatgctgaggaggagcgcatcccagccacccctgtggtgatccccatgaagaagaggaagatcttccacggcgtgggcacccggggccctggggcccctggcctggcccacctgcaggagagccaggccggcagtgacacagatgtggaggagggcaaggccccccaggccgtgcccctggagaagagccaggcctccatggtgatcaacagcgacacagatgatgaggaggaggtgtctgctgccctgaccctggcccacctgaaggagagccagcctgccatctggaacagagatgctgaggaggacatgccccagagggtggtgctgctgcagaggagccagaccaccacagagcgggacagcgacacagatgtggaggaggaggagctgcctgtggagaaccgggaggccgtgctgaaggaccacaccaagatccgggccctggtgcgggcccacagcgagaaggaccagcccccatttggagacagtgatgacagcgtggaggccgacaagagcagccctggcatccacctggagaggagccaggccagcaccaccgtggacatcaacacccaggtggagaaggaggtgcccccaggcagcgccatcatccacatcaagaagcaccaggtgtctgtggagggcaccaaccagacagatgtgaaggctgtgggcggccctgccaagctgctggtggtgtccctggaggaggcctggcccctgcacggggactgtgaaacagatgctgaggagggcaccagcctgacagcctctgtggtggctgatgtgaggaagagccagctgcctgcagaaggagatgctggagctgagtgggccgctgctgtgctgaagcaggagcgggcccacgaggtgggcgcccagggcggcccccctgtggcccaggtggagcaggacctgcccatcagccgggagaacctgacagacctggtggtggacacagacaccctgggggagagcacccagccccagcgggagggcgcccaggtgcccaccggccgggagcgggagcagcacgtgggcggcaccaaggacagcgaggacaactacggggacagcgaggacctggacctgcaggccacccagtgcttcctggagaaccagggcctggaggccgtgcagagcatggaggatgagcccacccaggccttcatgctgaccccaccccaggagctgggccccagccactgcagcttccagaccaccggcaccctggatgagccctgggaggtgctggccacccagcccttctgcctgcgggagagtgaagattctgagacccagccctttgacacccacctggaggcctacggcccctgcctgagccccccccgggccatccctggggaccagcaccctgagagccctgtgcacacagagcccatgggcatccagggccggggccggcagacagtggacaaggtgatgggcatccccaaggagacagctgagcgggtgggccctgagcggggccccctggagcgggagacagagaagctgctgcctgagcggcagacagatgtgactggagaggaggagctgaccaagggcaagcaggaccgggagcagaagcagctgctggcccgggacacccagaggcaggagagtgacaagaatggagagagcgccagccctgagcgggaccgggagagcctgaaggtggagattgagaccagcgaggagatccaggagaagcaggtgcagaagcagaccctgcccagcaaggcctttgagcgggaggtggagaggcctgtggccaacagagaatgtgaccctgctgagctggaggagaaggtgcccaaggtgatcctggagcgggacacccagagaggagagcctgagggcggcagccaggaccagaagggccaggccagcagccccaccccagagcccggggtgggcgctggggacctgcccggccccaccagcgcccctgtgcccagcggcagccagagcggcggccggggcagccctgtgagcccccggcggcaccagaagggcctgctgaactgcaagatgcccccagctgagaaggccagccgcatccgggctgctgagaaggtgtccagaggagaccaggagagcccagatgcctgcctgcccccaacagtgcctgaggccccagccccaccccagaagcccctgaacagccagagccagaagcacctggcccccccacccctgctgagccccctgctgcccagcatcaagcccaccgtgaggaagacccggcaggacggcagccaggaggcccctgaggcccccctgagcagcgagctggagcccttccaccccaagcccaagatccgcaccaggaagagcagcaggatgacccccttccctgccaccagcgctgcccccaagctggagcccagcaccagcacagaccagcctgtgaccccagagcccaccagccaggccacccggggccgcaccaacagaagctctgtgaagaccccagagaccgtggtgcccacagcccctgagctgcagcccagcaccagcacagaccagcctgtgaccccagagcccaccagccaggccacccggggccgcacagacaggagctctgtgaagaccccagagaccgtggtgcccacagcccctgagctgcaggccagcgccagcacagaccagcctgtgaccagcgagcccaccagcaggaccacccggggcaggaagaacagaagctctgtgaagaccccagagaccgtggtgcctgctgccccagccctgcagcccagcaccagcacagaccagcctgtgaccccagagcccaccagccgggccacccggggccgcaccaacagaagctctgtgaagaccccagagagcatcgtgcccatcgcccctgagctgcagcccagcaccagcaggaaccagctggtgaccccagagcccaccagccgggccacccgctgcaggaccaacagaagctctgtgaagaccccagagcctgtggtgcccacagcccctgagccccaccccaccaccagcacagaccagcctgtgacccccaagctgaccagccgggccaccaggaggaagaccaacagaagctctgtgaagacccccaagcctgtggagcctgctgccagtgacctggagcccttcacccccacagaccagagcgtgaccccagaggccatcgcccagggcggccagagcaagaccctgcggagcagcacagtgcgggccatgcctgtgcccaccaccccagagttccagagccctgtgaccacagaccagcccatcagccctgagcccatcacccagcccagctgcatcaagaggcagagagctgctggcaaccctggcagcctggccgcccccatcgaccacaagccctgcagcgcccccctggagcccaagagccaggccagcaggaaccagcgctggggcgctgtgcgggctgctgagagcctgacagccatccctgagcccgccagcccccagctgctggagacccccatccacgccagccagatccagaaggtggagcctgctggccgcagccgcttcaccccagagctgcagcccaaggccagccagagcaggaagaggagcctggccaccatggacagccccccccaccagaagcagccccagagaggagaggtgtcccagaagacagtcatcatcaaggaggaggaggaggacacagctgagaagccaggcaaggaggaggatgtggtgacccccaagccaggcaagaggaagagggaccaggccgaggaggagcccaaccgcatccccagccgcagcctgcggaggaccaagctgaaccaggagagcacagcccccaaggtgctcttcaccggggtggtggatgcccggggggagagagctgtgctggccctgggcggcagcctggccggcagcgctgctgaggccagccacctggtgacagaccgcatcagaagaacagtgaagttcctgtgtgccctgggccggggcatccccatcctgagcctggactggctgcaccagagcaggaaggccggcttcttcctgcccccagatgaatatgtggtgacagatcctgagcaggagaagaactttggcttcagcctgcaggatgccctgagccgggcccgggagcggcggctgctggagggctatgagatctacgtgaccccaggagtgcagcccccaccaccccagatgggagagatcatcagctgctgcggcggcacctacctgcccagcatgcccaggagctacaagccccagagggtggtgatcacctgcccccaggacttcccccactgcagcatccccctgcgggtgggcctgcccctgctgagccctgagttcctgctgactggagtgctgaagcaggaggccaagccagaggcctttgtgctgagccccctggagatgagcagcacctag

SEQ ID NO: 159139 - DNA, 5478 bp, synthetic construct; identical to SEQ ID NO: 159088
  misc_feature 1..5478: note = Description of Artificial Sequence: Synthetic coding sequence
  source 1..5478: mol_type = other DNA

SEQ ID NO: 159140 - DNA, 4968 bp, synthetic construct; identical to SEQ ID NO: 159100
  misc_feature 1..4968: note = Description of Artificial Sequence: Synthetic coding sequence
  source 1..4968: mol_type = other DNA

SEQ ID NO: 159141 - DNA, 4968 bp, synthetic construct
  misc_feature 1..4968: note = Description of Artificial Sequence: Synthetic coding sequence
  source 1..4968: mol_type = other DNA
atgtaccaccggctggatgtgtccctgccctttgtgtcccggggccccctgactgtggaggagaccccccgggtgcagggcgagacccagccccagaggctgctgctggccgaggacagcgaggaggaggtggacttcctgtctgagaggaggatggtgaagaagagcaggaccaccagcagcagcgtcatcgtgcctgagagtgatgaggagggccacagccctgtgctgggcggcctgggccccccatttgccttcaacctgaacagcgacacagatgtggaggagggccagcagcctgccacagaggaggccagcagcgctgcccggcggggggccaccgtggaggccaagcagagcgaggccgaggtggtgacagagatccagctggagaaggaccagcccctggtgaaggagcgggacaatgacaccaaggtgaagagaggagctggaaatggagtggtgcctgctggggtcatcctggagaggagccagcccccaggagaagattctgacacagatgtggatgatgacagcaggcctcctggccggcctgctgaggtgcacctggagcgggcccagcccttcggcttcatcgacagcgacacagatgctgaggaggagcgcatcccagccacccctgtggtgatccccatgaagaagaggaagatcttccacggcgtgggcacccggggccctggggcccctggcctggcccacctgcaggagagccaggccggcagtgacacagatgtggaggagggcaaggccccccaggccgtgcccctggagaagagccaggcctccatggtgatcaacagcgacacagatgatgaggaggaggtgtctgctgccctgaccctggcccacctgaaggagagccagcctgccatctggaacagagatgctgaggaggacatgccccagagggtggtgctgctgcagaggagccagaccaccacagagcgggacagcgacacagatgtggaggaggaggagctgcctgtggagaaccgggaggccgtgctgaaggaccacaccaagatccgggccctggtgcgggcccacagcgagaaggaccagcccccatttggagacagtgatgacagcgtggaggccgacaagagcagccctggcatccacctggagaggagccaggccagcaccaccgtggacatcaacacccaggtggagaaggaggtgcccccaggcagcgccatcatccacatcaagaagcaccaggtgtctgtggagggcaccaaccagacagatgtgaaggctgtgggcggccctgccaagctgctggtggtgtccctggaggaggcctggcccctgcacggggactgtgaaacagatgctgaggagggcaccagcctgacagcctctgtggtggctgatgtgaggaagagccagctgcctgcagaaggagatgctggagctgagtgggccgctgctgtgctgaagcaggagcgggcccacgaggtgggcgcccagggcggcccccctgtggcccaggtggagcaggacctgcccatcagccgggagaacctgacagacctggtggtggacacagacaccctgggggagagcacccagccccagcgggagggcgcccaggtgcccaccggccgggagcgggagcagcacgtgggcggcaccaaggacagcgaggacaactacggggacagcgaggacctggacctgcaggccacccagtgcttcctggagaaccagggcctggaggtgcagagcatggaggatgagcccacccaggccttcatgctgaccccaccccaggagctgggccccagccactgcagcttccagaccaccggcctgctgaactgcaagatgcctcctgctgagaaggccagccgcatccgggctgctgagaaggtgtccagaggagaccaggagagcccagatgcctgcctgccccccaccgtgcctgaggccccagccccaccccagaagcccctgaacagccagagccagaagcacctggcccccccacccctgctgagccccctgctgcccagcatcaagcccaccgtgaggaagacccggcaggacggcagccaggaggcccctgaggcccccctgagcagcgagctggagcccttccaccccaagcccaagatccgcaccaggaagagcagcaggatgacccccttccctgccaccagcgctgcccctgagccccaccccagcaccagcacagcccagcctgtgacccccaagcccaccagccaggccaccaggagcaggaccaacagaagctctgtgaagaccccagagcctgtggtgcccacagcccctgagctgcagcccagcaccagcacagaccagcctgtgaccagcgagcccaccagccaggtgacccggggcaggaagagccgcagctctgtgaagaccccagagaccgtggtgcccacagccctggagctgcagcccagcaccagcacagacaggcctgtgaccagcgagcccaccagccaggccacccggggcaggaagaacagaagctctgtgaagaccccagagcctgtggtgcccacagcccctgagctgcagcccagcaccagcacagaccagcctgtgaccagcgagcccacctaccaggccacccggggcaggaagaacagaagctctgtgaagaccccagagcctgtggtgcccacagcccctgagctgcggcccagcaccagcacagacaggcctgtgacccccaagcccaccagcaggaccaccaggagcaggaccaacatgagctctgtgaagaaccctgagagcacagtgcccatcgcccctgagctgccccccagcaccagcacagagcagcctgtgaccccagagcccaccagccgggccacccggggcaggaagaacagaagcagcggcaagaccccagagaccctggtgcccacagcccccaagctggagcccagcaccagcacagaccagcctgtgaccccagagcccaccagccaggccacccggggccgcaccaacagaagctctgtgaagaccccagagaccgtggtgcccacagcccctgagctgcagcccagcaccagcacagaccagcctgtgaccccagagcccaccagccaggccacccggggccgcacagacaggagctctgtgaagaccccagagaccgtggtgcccacagcccctgagctgcaggccagcgccagcacagaccagcctgtgaccagcgagcccaccagcaggaccacccggggcaggaagaacagaagctctgtgaagaccccagagaccgtggtgcctgctgccccagccctgcagcccagcaccagcacagaccagcctgtgaccccagagcccaccagccgggccacccggggccgcaccaacagaagctctgtgaagaccccagagagcatcgtgcccatcgcccctgagctgcagcccagcaccagcaggaaccagctggtgaccccagagcccaccagccgggccacccgctgcaggaccaacagaagctctgtgaagaccccagagcctgtggtgcccacagcccctgagccccaccccaccaccagcacagaccagcctgtgacccccaagctgaccagccgggccaccaggaggaagaccaacagaagctctgtgaagacccccaagcctgtggagcctgctgccagtgacctggagcccttcacccccacagaccagagcgtgaccccagaggccatcgcccagggcggccagagcaagaccctgcggagcagcacagtgcgggccatgcctgtgcccaccaccccagagttccagagccctgtgaccacagaccagcccatcagccctgagcccatcacccagcccagctgcatcaagaggcagagagctgctggcaaccctggcagcctggccgcccccatcgaccacaagccctgcagcgcccccctggagcccaagagccaggccagcaggaaccagcgctggggcgctgtgcgggctgctgagagcctgacagccatccctgagcccgccagcccccagctgctggagacccccatccacgccagccagatccagaaggtggagcccgccggccgcagccgcttcaccccagagctgcagcccaaggccagccagagcaggaagaggagcctggccaccatggacagccccccccaccagaagcagccccagagaggagaggtgtcccagaagacagtcatcatcaaggaggaggaggaggacacagctgagaagccaggcaaggaggaggatgtggtgacccccaagccaggcaagaggaagagggaccaggccgaggaggagcccaaccgcatccccagccgcagcctgcggaggaccaagctgaaccaggagagcacagcccccaaggtgctcttcaccggggtggtggatgcccggggggagagagctgtgctggccctgggcggcagcctggccggcagcgctgctgaggccagccacctggtgacagaccgcatccggaggacagtgaagttcctgtgtgccctgggccggggcatccccatcctgagcctggactggctgcaccagagcaggaaggccggcttcttcctgcccccagatgaatatgtggtgacagatcctgagcaggagaagaactttggcttcagcctgcaggatgccctgagccgggcccgggagcggcggctgctggagggctatgagatctacgtgaccccaggagtgcagcccccaccaccccagatgggagagatcatcagctgctgcggcggcacctacctgcccagcatgcccaggagctacaagccccagagggtggtgatcacctgcccccaggacttcccccactgcagcatccccctgcgggtgggcctgcccctgctgagccctgagttcctgctgactggagtgctgaagcaggaggccaagccagaggcctttgtgctgagccccctggagatgagcagcacctag

SEQ ID NO: 159142 - DNA, 666 bp, synthetic construct
  misc_feature 1..666: note = Description of Artificial Sequence: Synthetic coding sequence
  source 1..666: mol_type = other DNA
atggaggacacccaggccatcgactgggatgtggaggaggaggaggagacagagcagagcagcgagagcctgcgctgcaatgtggagcctgtgggccgcctgcacatcttcagcggggcccacggccctgagaaggacttccccctgcacctgggcaagaatgtggtgggccgcatgccagactgcagcgtggccctgcccttccccagcatcagcaagcagcacgccgagattgagatcctggcctgggacaaggcccccatcctgcgggactgtggcagcctgaatggcacccagatcctgagcagcagcctgcccccaccccagaccagcctgctgcccctgagcctgcggctgcggctgctgggggaggagcagattgaccccctgagccggctgctgaagcagctgagcccccagcccctgagctaccgcctgcccccaccccagaccagcctgagccccctgagcccccacctgggccccctgggggaggagaagattggccccctgagccggcccctgaagcagctgtgcccccagcccctgagcagcagcctgcccccaccccagaccaacctgagccccctgagcccccacctgggccccctgggcgccggccagatcggccccctgagccggcccctgaaccagctgagcctgtag

SEQ ID NO: 159143 - DNA, 666 bp, synthetic construct; identical to SEQ ID NO: 159142
  misc_feature 1..666: note = Description of Artificial Sequence: Synthetic coding sequence
  source 1..666: mol_type = other DNA

SEQ ID NO: 159144 - DNA, 738 bp, synthetic construct; identical to SEQ ID NO: 159114
  misc_feature 1..738: note = Description of Artificial Sequence: Synthetic coding sequence
  source 1..738: mol_type = other DNA

SEQ ID NO: 159145 - DNA, 4968 bp, synthetic construct; identical to SEQ ID NO: 159100
  misc_feature 1..4968: note = Description of Artificial Sequence: Synthetic coding sequence
  source 1..4968: mol_type = other DNA

SEQ ID NO: 159146 - DNA, 5478 bp, synthetic construct; identical to SEQ ID NO: 159088
  misc_feature 1..5478: note = Description of Artificial Sequence: Synthetic coding sequence
  source 1..5478: mol_type = other DNA

SEQ ID NO: 159147 - DNA, 4968 bp, synthetic construct; identical to SEQ ID NO: 159100
  misc_feature 1..4968: note = Description of Artificial Sequence: Synthetic coding sequence
  source 1..4968: mol_type = other DNA

SEQ ID NO: 159148 - DNA, 4968 bp, synthetic construct; identical to SEQ ID NO: 159100
  misc_feature 1..4968: note = Description of Artificial Sequence: Synthetic coding sequence
  source 1..4968: mol_type = other DNA

SEQ ID NO: 159149 - DNA, 735 bp, synthetic construct; identical to SEQ ID NO: 159125
  misc_feature 1..735: note = Description of Artificial Sequence: Synthetic coding sequence
  source 1..735: mol_type = other DNA

SEQ ID NO: 159150 - DNA, 5409 bp, synthetic construct; identical to SEQ ID NO: 159111
  misc_feature 1..5409: note = Description of Artificial Sequence: Synthetic coding sequence
  source 1..5409: mol_type = other DNA

SEQ ID NO: 159151 - DNA, 4968 bp, synthetic construct; identical to SEQ ID NO: 159100
  misc_feature 1..4968: note = Description of Artificial Sequence: Synthetic coding sequence
  source 1..4968: mol_type = other DNA

SEQ ID NO: 159152 - DNA, 5409 bp, synthetic construct; identical to SEQ ID NO: 159111
  misc_feature 1..5409: note = Description of Artificial Sequence: Synthetic coding sequence
  source 1..5409: mol_type = other DNA

SEQ ID NO: 159153 - DNA, 666 bp, synthetic construct
  misc_feature 1..666: note = Description of Artificial Sequence: Synthetic coding sequence
  source 1..666: mol_type = other DNA
atggaggacacccaggccatcgactgggatgtggaggaggaggaggagacagagcagagcagcgagagcctgcgctgcaatgtggagcctgtgggccgcctgcacatcttcagcggggcccacggccctgagaaggacttccccctgcacctgggcaagaatgtggtgggccgcatgccagactgcagcgtggccctgcccttccccagcatcagcaagcagcacgccgagattgagatcctggcctgggacaaggcccccatcctgcgggactgtggcagcctgaatggcacccagatcctgagcagcagcctgcccccaccccagaccagcctgctgcccctgagcctgcggctgcggctgctgggggaggagcagattgaccccctgagccggctgctgaagcagctgagcccccagcccctgagctaccgcctgcccccaccccagaccagcctgagccccctgagcccccacctgggccccctgggggaggagaagattggccccctgagccggcccctgaagcagctgtgcccccagcccctgcggagcagcctgcccccaccccagaccaacctgagccccctgagcccccacctgggccccctgggcgccggccagatcggccccctgagccggcccctgaaccagctgagcctgtag

SEQ ID NO: 159154 - DNA, 666 bp, synthetic construct; identical to SEQ ID NO: 159142
  misc_feature 1..666: note = Description of Artificial Sequence: Synthetic coding sequence
  source 1..666: mol_type = other DNA

SEQ ID NO: 159155 - DNA, 738 bp, synthetic construct; identical to SEQ ID NO: 159114
  misc_feature 1..738: note = Description of Artificial Sequence: Synthetic coding sequence
  source 1..738: mol_type = other DNA

SEQ ID NO: 159156 - DNA, 5478 bp, synthetic construct; identical to SEQ ID NO: 159088
  misc_feature 1..5478: note = Description of Artificial Sequence: Synthetic coding sequence
  source 1..5478: mol_type = other DNA

SEQ ID NO: 159157 - DNA, 735 bp, synthetic construct; identical to SEQ ID NO: 159125
  misc_feature 1..735: note = Description of Artificial Sequence: Synthetic coding sequence
  source 1..735: mol_type = other DNA

SEQ ID NO: 159158 - DNA, 735 bp, synthetic construct; identical to SEQ ID NO: 159125
  misc_feature 1..735: note = Description of Artificial Sequence: Synthetic coding sequence
  source 1..735: mol_type = other DNA

SEQ ID NO: 159159 - DNA, 666 bp, synthetic construct; identical to SEQ ID NO: 159142
  misc_feature 1..666: note = Description of Artificial Sequence: Synthetic coding sequence
  source 1..666: mol_type = other DNA

SEQ ID NO: 159160 - DNA, 666 bp, synthetic construct; identical to SEQ ID NO: 159142
  misc_feature 1..666: note = Description of Artificial Sequence: Synthetic coding sequence
  source 1..666: mol_type = other DNA

SEQ ID NO: 159161 - DNA, 5478 bp, synthetic construct; identical to SEQ ID NO: 159088
  misc_feature 1..5478: note = Description of Artificial Sequence: Synthetic coding sequence
  source 1..5478: mol_type = other DNA

SEQ ID NO: 159162 - DNA, 738 bp, synthetic construct; identical to SEQ ID NO: 159114
  misc_feature 1..738: note = Description of Artificial Sequence: Synthetic coding sequence
  source 1..738: mol_type = other DNA

SEQ ID NO: 159163 - DNA, 2238 bp, synthetic construct
  misc_feature 1..2238: note = Description of Artificial Sequence: Synthetic coding sequence
  source 1..2238: mol_type = other DNA
atggcctgccggcagagaggaggctcctggagccccagcggctggttcaatgccggctggagcacctaccgcagcatcagcctcttctttgccctggtgaccagcggcaacagcattgatgtgtcccagctggtgaacccagccttccctggcaccgtgacctgtgatgagcgggagatcaccgtggagttccccagcagccctggcaccaagaagtggcacgcctctgtggtggaccccctgggcctggacatgcccaactgcacctacatcctggaccctgagaagctgaccctgcgggccacctatgacaactgcacccggcgggtgcatggaggccaccagatgaccatccgggtgatgaacaacagcgctgccctgcggcatggagctgtgatgtaccagttcttctgcccagccatgcaggtggaggagacccagggcctgagcgccagcaccatctgccagaaggacttcatgtccttcagcctgcccagggtcttcagcggcctggctgatgacagcaagggcaccaaggtgcagatgggctggagcattgaggtgggagatggagcccgggccaagaccctgaccctgcctgaggccatgaaggagggcttcagcctgctgattgacaaccacaggatgaccttccacgtgcccttcaatgccactggagtgacccactacgtgcagggcaacagccacctgtacatggtgtccctgaagctgaccttcatcagccctggccagaaggtgatcttcagcagccaggccatctgtgccccagaccctgtgacctgcaatgccacccacatgaccctgaccatccctgagttccctgggaagctgaagtctgtgtcctttgagaaccagaacattgatgtgtcccagctgcatgacaatggcatcgacctggaggccaccaacggcatgaagctgcacttcagcaagaccctgctgaagaccaagctgtctgagaagtgcctgctgcaccagttctacctggccagcctgaagctgaccttcctgctgcggcctgagaccgtgtccatggtgatctacccagaatgtctgtgtgagagccctgtgtccatcgtgactggagagctgtgcacccaggacggcttcatggatgtggaggtgtacagctaccagacccagcctgccctggacctgggcaccctgcgggtgggcaacagcagctgccagcctgtgtttgaggcccagagccagggcctggtgcgcttccacatccccctgaatggctgcggcacccgctacaagtttgaagatgacaaggtggtgtatgaaaatgagatccacgccctgtggacagacttcccccccagcaagatcagccgggacagcgagttcaggatgacagtgaagtgcagctacagcagaaatgacatgctgctgaacatcaacgtggagagcctgaccccacctgtggcctctgtgaagctgggccccttcaccctcatcctgcagagctacccagacaacagctaccagcagccctatggagaaaatgagtaccccctggtgcgcttcctgcggcagcccatctacatggaggtgcgggtgctgaacagagatgaccccaacatcaagctggtgctggatgactgctgggccaccagcaccatggaccctgacagcttcccccagtggaatgtggtggtggatggctgtgcctatgacctggacaactaccagaccaccttccaccctgtgggcagctctgtgacccacccagaccactaccagagatttgacatgaaggcctttgcctttgtgtctgaggcccacgtgctgagcagcctggtgtacttccactgcagcgccctgatctgcaaccggctgagcccagacagccccctgtgcagcgtgacctgccctgtgagcagccgccacagaagagccaccggggccacagaagctgagaagatgacagtgtccctgcccggccccatcctgctgctgagtgatgacagcagcttccggggcgtgggcagcagtgacctgaaggccagcggcagcagtggagagaagagccgctcagaaacaggagaggaggtgggcagcagaggagccatggacaccaagggccacaagacagctggagatgtgggcagcaaggctgtggccgctgtggccgcctttgctggggtggtggccaccctgggcttcatctactacctgtatgagaagaggacagtgagcaaccactag

SEQ ID NO: 159164 - DNA, 1806 bp, synthetic construct
  misc_feature 1..1806: note = Description of Artificial Sequence: Synthetic coding sequence
  source 1..1806: mol_type = other DNA
atggccaagacccccagcgaccacctgctgagcaccctggaggagctggtgccctatgactttgagaagttcaagttcaagctgcagaacacctctgtgcagaaggagcacagccgcatccccaggagccagatccagagggcccggcctgtgaagatggccaccctgctggtgacctactatggagaggagtatgctgtgcagctgaccctgcaggtgctgcgggccatcaaccagaggctgctggccgaggagctgcacagagctgccatccaggacatgggcagctgctacgtggcccaggtgggcctggagctgctgatcagcaacaacccccccatctttgccagcgagacagctggcatcaccggccggcccccagacacagctgccagcccccgctgccacgcccaggagggggaccctgtggatggcacctgtgtgcgggacagctgcagcttccctgaggccgtgtctggccacccccaggccagcggcagccgcagccctggctgcccccgctgccaggacagccatgagaggaagagccctggcagcctgagcccccagcccctgccccagtgcaagaggcacctgaagcaggtgcagctgctcttctgtgaggaccatgatgagcccatctgcctgatctgcagcctgagccaggagcaccagggccaccgggtgcggcccatcgaggaggtggccctggagcacaagaagaagatccagaagcagctggagcacctgaagaagctgaggaagagcggggaggagcagaggagctatggagaggagaaggctgtgtccttcctgaagcagacagaggccctgaagcagagggtgcagaggaagctggagcaggtgtactacttcctggagcagcaggagcacttctttgtggccagcctggaggatgtgggccagatggtgggccagatcaggaaggcctatgacaccagggtgtcccaggacatcgccctgctggatgccctgattggagagctggaggccaaggagtgccagagcgagtgggagctgctgcaggacattggagacatcctgcaccgggccaagacagtgcctgtgcctgagaagtggaccaccccccaggagatcaagcagaagatccagctgctgcaccagaagtcagaatttgtggagaagagcaccaagtacttcagcgagaccctgcggtctgagatggagatgttcaacgtgcctgagctgattggagcccaggcccatgctgtgaatgtcatcctggatgctgagacagcctaccccaacctgatcttcagtgatgacctgaagtctgtgcggctgggcaacaagtgggagcggctgcctgatggcccccagagatttgacagctgcatcatcgtgctgggcagccccagcttcctgagcggccgccgctactgggaggtggaggtgggggacaagacagcctggatcctgggcgcctgcaagaccagcatcagcaggaaaggaaacatgaccctgagcccagaaaatggctactgggtggtgatcatgatgaaggaaaatgagtaccaggccagctctgtgccccccacccggctgctgatcaaggagccccccaagagggtgggcatctttgtggactacagagtgggcagcatctccttctacaacgtgacagcccggagccacatctacacctttgccagctgcagcttcagcggccccctgcagcccatcttcagccctggcaccagagatggcggcaagaacacagcccccctgaccatctgccctgtgggcggccagggccctgactag

SEQ ID NO: 159165 - DNA, 1239 bp, synthetic construct
  misc_feature 1..1239: note = Description of Artificial Sequence: Synthetic coding sequence
  source 1..1239: mol_type = other DNA
atggccaagacccccagcgaccacctgctgagcaccctggaggagctggtgccctatgactttgagaagttcaagttcaagctgcagaacacctctgtgcagaaggagcacagccgcatccccaggagccagatccagagggcccggcctgtgaagatggccaccctgctggtgacctactatggagaggagtatgctgtgcagctgaccctgcaggtgctgcgggccatcaaccagaggctgctggccgaggagctgcacagagctgccatccagggccggcccccagacacagctgccagcccccgctgccacgcccaggagggggaccctgtggatggcacctgtgtgcgggacagctgcagcttccctgaggccgtgtctggccacccccaggccagcggcagccgcagccctggctgcccccgctgccaggacagccatgagaggaagagccctggcagcctgagcccccagcccctgccccagtgcaagaggcacctgaagcaggtgcagctgctcttctgtgaagatcatgatgagcccatctgcctgatctgcagcctgagccaggagcaccagggccaccgggtgcggcccatcgaggaggtggccctggagcacaagaagaagatccagaagcagctggagcacctgaagaagctgaggaagtctggagaggagcagaggagctatggagaggagaaggctgtgtccttcctgaagcagacagaggccctgaagcagagggtgcagaggaagctggagcaggtgtactacttcctggagcagcaggagcacttctttgtggccagcctggaggatgtgggccagatggtgggccagatcaggaaggcctatgacaccagggtgtcccaggacatcgccctgctggatgccctgattggagagctggaggccaaggagtgccagagcgagtgggagctgctgcaggacatcggggacatcctgcaccgggccaagacagtgcctgtgcctgagaagtggaccaccccccaggagatcaagcagaagatccagctgctgcaccagaagtcagaatttgtggagaagagcaccaagtacttcagcgagaccctgcggtctgagatggagatgtttaatgaccacagcccccagcacggcctgggctcctgggaggagcgggactacacccagcacagcatgcagggccccaagcagggcgtgccctgcttcctggtggtgaggacagtgtag

SEQ ID NO: 159166 - DNA, 1713 bp, synthetic construct
  misc_feature 1..1713: note = Description of Artificial Sequence: Synthetic coding sequence
  source 1..1713: mol_type = other DNA
atggccaagacccccagcgaccacctgctgagcaccctggaggagctggtgccctatgactttgagaagttcaagttcaagctgcagaacacctctgtgcagaaggagcacagccgcatccccaggagccagatccagagggcccggcctgtgaagatggccaccctgctggtgacctactatggagaggagtatgctgtgcagctgaccctgcaggtgctgcgggccatcaaccagaggctgctggccgaggagctgcacagagctgccatccagggccggcccccagacacagctgccagcccccgctgccacgcccaggagggggaccctgtggatggcacctgtgtgcgggacagctgcagcttccctgaggccgtgtctggccacccccaggccagcggcagccgcagccctggctgcccccgctgccaggacagccatgagaggaagagccctggcagcctgagcccccagcccctgccccagtgcaagaggcacctgaagcaggtgcagctgctcttctgtgaagatcatgatgagcccatctgcctgatctgcagcctgagccaggagcaccagggccaccgggtgcggcccatcgaggaggtggccctggagcacaagaagaagatccagaagcagctggagcacctgaagaagctgaggaagtctggagaggagcagaggagctatggagaggagaaggctgtgtccttcctgaagcagacagaggccctgaagcagagggtgcagaggaagctggagcaggtgtactacttcctggagcagcaggagcacttctttgtggccagcctggaggatgtgggccagatggtgggccagatcaggaaggcctatgacaccagggtgtcccaggacatcgccctgctggatgccctgattggagagctggaggccaaggagtgccagagcgagtgggagctgctgcaggacatcggggacatcctgcaccgggccaagacagtgcctgtgcctgagaagtggaccaccccccaggagatcaagcagaagatccagctgctgcaccagaagtcagaatttgtggagaagagcaccaagtacttcagcgagaccctgcggtctgagatggagatgtttaatgtgcctgagctgattggagcccaggcccatgctgtgaatgtcatcctggatgctgagacagcctaccccaacctgatcttcagtgatgacctgaagtctgtgcggctgggcaacaagtgggagcggctgcctgatggcccccagagatttgacagctgcatcatcgtgctgggcagccccagcttcctgtctggaagacgctactgggaggtggaggtgggggacaagacagcctggatcctgggcgcctgcaagaccagcatcagcaggaagggcaacatgaccctgagcccagaaaatggctactgggtggtgatcatgatgaaggaaaatgagtaccaggccagctctgtgccccccacccggctgctgatcaaggagccccccaagagggtgggcatctttgtggactacagagtgggcagcatctccttctacaacgtgacagcccggagccacatctacacctttgccagctgcagcttcagcggccccctgcagcccatcttcagccctggcaccagagatggcggcaagaacacagcccccctgaccatctgccctgtgggcggccagggccctgactag

SEQ ID NO: 159167 - DNA, 1209 bp, synthetic construct
  misc_feature 1..1209: note = Description of Artificial Sequence: Synthetic coding sequence
  source 1..1209: mol_type = other DNA
atggccaagacccccagcgaccacctgctgagcaccctggaggagctggtgccctatgactttgagaagttcaagttcaagctgcagaacacctctgtgcagaaggagcacagccgcatccccaggagccagatccagagggcccggcctgtgaagatggccaccctgctggtgacctactatggagaggagtatgctgtgcagctgaccctgcaggtgctgcgggccatcaaccagaggctgctggccgaggagctgcacagagctgccatccagggccggcccccagacacagctgccagcccccgctgccacgcccaggagggggaccctgtggatggcacctgtgtgcgggacagctgcagcttccctgaggccgtgtctggccacccccaggccagcggcagccgcagccctggctgcccccgctgccaggacagccatgagaggaagagccctggcagcctgagcccccagcccctgccccagtgcaagaggcacctgaagcaggtgcagctgctcttctgtgaagatcatgatgagcccatctgcctgatctgcagcctgagccaggagcaccagggccaccgggtgcggcccatcgaggaggtggccctggagcacaagaagaagatccagaagcagctggagcacctgaagaagctgaggaagtctggagaggagcagaggagctatggagaggagaaggctgtgtccttcctgaagcagacagaggccctgaagcagagggtgcagaggaagctggagcaggtgtactacttcctggagcagcaggagcacttctttgtggccagcctggaggatgtgggccagatggtgggccagatcaggaaggcctatgacaccagggtgtcccaggacatcgccctgctggatgccctgattggagagctggaggccaaggagtgccagagcgagtgggagctgctgcaggacatcggggacatcctgcaccgggccaagacagtgcctgtgcctgagaagtggaccaccccccaggagatcaagcagaagatccagctgctgcaccagaagtcagaatttgtggagaagagcaccaagtacttcagcgagaccctgcggtctgagatggagatgtttaatggagagagcagtggaaatggagtgtgctggccaggagtggtggccgtgttcccctgtgctgtggacctgcggggccccatctag

SEQ ID NO: 159168 - DNA, 1338 bp, synthetic construct
  misc_feature 1..1338: note = Description of Artificial Sequence: Synthetic coding sequence
  source 1..1338: mol_type = other DNA
atggccaagacccccagcgaccacctgctgagcaccctggaggagctggtgccctatgactttgagaagttcaagttcaagctgcagaacacctctgtgcagaaggagcacagccgcatccccaggagccagatccagagggcccggcctgtgaagatggccaccctgctggtgacctactatggagaggagtatgctgtgcagctgaccctgcaggtgctgcgggccatcaaccagaggctgctggccgaggagctgcacagagctgccatccagggccggcccccagacacagctgccagcccccgctgccacgcccaggagggggaccctgtggatggcacctgtgtgcgggacagctgcagcttccctgaggccgtgtctggccacccccaggccagcggcagccgcagccctggctgcccccgctgccaggacagccatgagaggaagagccctggcagcctgagcccccagcccctgccccagtgcaagaggcacctgaagcaggtgcagctgctcttctgtgaagatcatgatgagcccatctgcctgatctgcagcctgagccaggagcaccagggccaccgggtgcggcccatcgaggaggtggccctggagcacaagaagaagatccagaagcagctggagcacctgaagaagctgaggaagtctggagaggagcagaggagctatggagaggagaaggctgtgtccttcctgaagcagacagaggccctgaagcagagggtgcagaggaagctggagcaggtgtactacttcctggagcagcaggagcacttctttgtggccagcctggaggatgtgggccagatggtgggccagatcaggaaggcctatgacaccagggtgtcccaggacatcgccctgctggatgccctgattggagagctggaggccaaggagtgccagagcgagtgggagctgctgcaggacatcggggacatcctgcaccgggccaagacagtgcctgtgcctgagaagtggaccaccccccaggagatcaagcagaagatccagctgctgcaccagaagtcagaatttgtggagaagagcaccaagtacttcagcgagaccctgcggtctgagatggagatgtttaatgaccacagcccccagcacggcctgggctcctgggaggagcgggactacacccagcacagcatgcagggccccaagcagggcgtgccctgcctgagcctgctgagcggccagtgcaacctggcccccctgaatgccaatgcccaggacttcttcccctacctgatcttcctgcggagcagtggagctgactggaggagcggcacctgctgctag

SEQ ID NO: 159169 - DNA, 2067 bp, synthetic construct
  misc_feature 1..2067: note = Description of Artificial Sequence: Synthetic coding sequence
  source 1..2067: mol_type = other DNA
atggccaagacccccagcgaccacctgctgagcaccctggaggagctggtgccctatgactttgagaagttcaagttcaagctgcagaacacctctgtgcagaaggagcacagccgcatccccaggagccagatccagagggcccggcctgtgaagatggccaccctgctggtgacctactatggagaggagtatgctgtgcagctgaccctgcaggtgctgcgggccatcaaccagaggctgctggccgaggagctgcacagagctgccatccaggagtacagcacccaggagaatggaacagatgacagcgctgccagcagcagcctgggggagaacaagcccaggagcctgaagaccccagaccaccctgagggcaatgaaggaaatggcccccggccctatggaggaggagctgccagcctgcgctgcagccagcctgaggccggccggggcctgagcaggaagcccctgagcaagagaagagagaaggccagcgagggcctggatgcccagggcaagcccaggaccaggagccctgccctgcccggcggccgcagccctggcccctgccgggccctggagggcggccaggccgaggtgcggctgcggagaaatgccagcagcgctggccgcctgcagggcctggccggcggggcccctggccagaaggaatgtcggccctttgaggtgtacctgcccagcggcaagatgaggcccaggagcctggaggtgaccatcagcactggagagaaggccccagccaaccctgagatcctgctgaccctggaggagaagacagctgccaacctggacagcgccacagagccccgggcccggcccaccccagatggaggagccagcgctgacctgaaggagggccctggcaaccctgagcacagcgtgacaggccggcccccagacacagctgccagcccccgctgccacgcccaggagggggaccctgtggatggcacctgtgtgcgggacagctgcagcttccctgaggccgtgtctggccacccccaggccagcggcagccgcagccctggctgcccccgctgccaggacagccatgagaggaagagccctggcagcctgagcccccagcccctgccccagtgcaagaggcacctgaagcaggtgcagctgctcttctgtgaggaccatgatgagcccatctgcctgatctgcagcctgagccaggagcaccagggccaccgggtgcggcccatcgaggaggtggccctggagcacaagaagaagatccagaagcagctggagcacctgaagaagctgaggaagagcggggaggagcagaggagctatggagaggagaaggctgtgtccttcctgaagcagacagaggccctgaagcagagggtgcagaggaagctggagcaggtgtactacttcctggagcagcaggagcacttctttgtggccagcctggaggatgtgggccagatggtgggccagatcaggaaggcctatgacaccagggtgtcccaggacatcgccctgctggatgccctgattggagagctggaggccaaggagtgccagagcgagtgggagctgctgcaggacattggagacatcctgcaccgggccaagacagtgcctgtgcctgagaagtggaccaccccccaggagatcaagcagaagatccagctgctgcaccagaagtcagaatttgtggagaagagcaccaagtacttcagcgagaccctgcggtctgagatggagatgttcaacgtgcctgagctgattggagcccaggcccatgctgtgaatgtcatcctggatgctgagacagcctaccccaacctgatcttcagtgatgacctgaagtctgtgcggctgggcaacaagtgggagcggctgcctgatggcccccagagatttgacagctgcatcatcgtgctgggcagccccagcttcctgagcggccgccgctactgggaggtggaggtgggggacaagcgcttcagctgcctgagcctgcggagctcctgggactaccgccggcccccaccctgcccagccaacttcctgcacttctag

SEQ ID NO: 159170 - DNA, 2796 bp, synthetic construct
  misc_feature 1..2796: note = Description of Artificial Sequence: Synthetic coding sequence
  source 1..2796: mol_type = other DNA
atgccacccctgaagagccctgctgccttccacgagcagaggaggagcctggagcgggccaggacagaggactacctgaagaggaagatccgcagcaggcctgagaggtctgagctggtgaggatgcacatcctggaggagaccagcgctgagcccagcctgcaggccaagcagctgaagctgaagagggcccggctggctgatgacctgaatgagaagatcgcccagaggcctggccccatggagctggtggagaagaacatcctgcctgtggagagcagcctgaaggaggccatcatcgtgggccaggtgaactaccccaaggtggccgacagcagcagctttgatgaggacagcagtgatgccctgagccctgagcagcctgccagccatgagagccagggctctgtgcccagccccctggaggcccgggtgtctgagcccctgctgagcgccaccagcgccagccccacccaggtggtgtcccagctgcccatgggccgggacagccgggagatgctgttcctggccgagcagccccccctgcccccaccacccctgctgccccccagcctgaccaacggcaccaccatccccacagccaagagcacccccaccctcatcaagcagagccagcccaagagcgccagcgagaagagccagaggagcaagaaggccaaggagctgaagcccaaggtgaagaagctgaagtaccaccagtacatccccccagaccagaagcaggacagaggagccccacccatggacagcagctatgccaagatcctgcagcagcagcagctgttcctgcagctgcagatcctgaaccagcagcagcagcagcaccacaactaccaggccatcctgcctgccccacccaagtctgctggggaggccctgggcagcagcggcaccccacctgtgcgcagcctgagcaccaccaacagcagcagcagcagcggggcccctggcccctgtggcctggcccggcagaacagcaccagcctgaccgggaagccaggggccctgcctgccaacctggatgacatgaaggtggccgagctgaagcaggagctgaagctgcggagcctgcctgtgtctggcaccaagacagagctgattgaaaggctgcgggcctaccaggaccagatcagccctgtgcctggggcccccaaggccccagctgccaccagcatcctgcacaaggccggggaggtggtggtggccttccctgctgcccggctgagcactggacctgccctggtggccgccggcctggccccagctgaggtggtggtggccaccgtggccagcagtggagtggtgaagtttggcagcacaggcagcaccccacctgtgagccccacccccagcgagaggagcctgctgagcactggagatgagaacagcacccctggggacaccttcggggagatggtgaccagccccctgacccagctgaccctgcaggccagccccctgcagatcctggtgaaggaggagggccccagggctggcagctgctgcctgagccctgggggccgggcagagctggagggccgggacaaggaccagatgctgcaggagaaggacaagcagatcgaggccctgaccaggatgctgcggcagaagcagcagctggtggagcggctgaagctgcagctggagcaggagaagagggcccagcagcctgccccagccccagcccccctgggcacccctgtgaagcaggagaacagcttcagcagctgccagctgagccagcagcccctgggccctgcccaccccttcaaccccagcctggccgccccagccaccaaccacatcgacccctgtgctgtggcccctggcccccccagcgtggtggtgaagcaggaggccctgcagcctgagcctgagcctgtgcctgccccccagctgctgctgggcccccagggccccagcctcatcaagggcgtggccccacccaccctcatcacagacagcacaggcacccacctggtgctgactgtgaccaacaagaatgctgacagccctggcctgagcagcggcagcccccagcagcccagcagccagcccggcagccctgccccagcccccagcgcccagatggacctggagcaccccctgcagcccctgtttggcacccccaccagcctgctgaagaaggagcccccaggctatgaggaggccatgagccagcagcccaagcagcaggagaatggcagcagcagccagcagatggatgacctgtttgacatcctgatccagagcggggagatctctgctgacttcaaggagccccccagcctgcccgggaaggagaagcccagccccaagacagtgtgtggcagccccctggccgcccagcccagccccagcgctgagctgccccaggccgcccctcctcctcctggcagccccagcctgcccggccgcctggaggacttcctggagagcagcacaggcctgcccctgctgaccagcggccatgatggccctgagcccctgagcctgattgatgacctgcacagccagatgctgagcagcacagccatcctggaccacccccccagccccatggacaccagcgagctgcactttgtgcctgagcccagcagcaccatgggcctggacctggctgatggccacctggacagcatggactggctggagctgagcagcggcggccctgtgctgagcctggcccccctgagcaccacagcccccagcctcttcagcacagacttcctggatggccatgacctgcagctgcactgggacagctgcctgtag

SEQ ID NO: 159171 - DNA, 2397 bp, synthetic construct
  misc_feature 1..2397: note = Description of Artificial Sequence: Synthetic coding sequence
  source 1..2397: mol_type = other DNA
atgccacccctgaagagccctgctgccttccacgagcagaggaggagcctggagcgggccaggacagaggactacctgaagaggaagatccgcagcaggcctgagaggtctgagctggtgaggatgcacatcctggaggagaccagcgctgagcccagcctgcaggccaagcagctgaagctgaagagggcccggctggctgatgacctgaatgagaagatcgcccagaggcctggccccatggagctggtggagaagaacatcctgcctgtggagagcagcctgaaggaggccatcatcgtgggccaggtgaactaccccaaggtggccgacagcagcagctttgatgaggacagcagtgatgccctgagccctgagcagcctgccagccatgagagccagggctctgtgcccagccccctggaggcccgggtgtctgagcccctgctgagcgccaccagcgccagccccacccaggtggtgtcccagctgcccatgggccgggacagccgggagatgctgttcctggccgagcagccccccctgcccccaccacccctgctgccccccagcctgaccaacggcaccaccatccccacagccaagagcacccccaccctcatcaagcagagccagcccaagagcgccagcgagaagagccagaggagcaagaaggccaaggagctgaagcccaaggtgaagaagctgaagtaccaccagtacatccccccagaccagaagcaggacagaggagccccacccatggacagcagctatgccaagatcctgcagcagcagcagctgttcctgcagctgcagatcctgaaccagcagcagcagcagcaccacaactaccaggccatcctgcctgccccacccaagtctgctggggaggccctgggcagcagcggcaccccacctgtgcgcagcctgagcaccaccaacagcagcagcagcagcggggcccctggcccctgtggcctggcccggcagaacagcaccagcctgaccgggaagccaggggccctgcctgccaacctggatgacatgaaggtggccgagctgaagcaggagctgaagctgcggagcctgcctgtgtctggcaccaagacagagctgattgaaaggctgcgggcctaccaggaccagatcagccctgtgcctggggcccccaaggccccagctgccaccagcatcctgcacaaggccggggaggtggtggtggccttccctgctgcccggctgagcactggacctgccctggtggccgccggcctggccccagctgaggtggtggtggccaccgtggccagcagtggagtggtgaagtttggcagcacaggcagcaccccacctgtgagccccacccccagcgagaggagcctgctgagcactggagatgagaacagcacccctggggacaccttcggggagatggtgaccagccccctgacccagctgaccctgcaggccagccccctgcagatcctggtgaaggaggagggccccagggctggcagctgctgcctgagccctgggggccgggcagagctggagggccgggacaaggaccagatgctgcaggagaaggacaagcagatcgaggccctgaccaggatgctgcggcagaagcagcagctggtggagcggctgaagctgcagctggagcaggagaagagggcccagcagcctgccccagccccagcccccctgggcacccctgtgaagcaggagaacagcttcagcagctgccagctgagccagcagcccctgggccctgcccaccccttcaaccccagcctggccgccccagccaccaaccacatcgacccctgtgctgtggcccctggcccccccagcgtggtggtgaagcaggaggccctgcagcctgagcctgagcctgtgcctgccccccagctgctgctgggcccccagggccccagcctcatcaagggcgtggccccacccaccctcatcacagacagcacaggcacccacctggtgctgactgtgaccaacaagaatgctgacagccctggcctgagcagcggcagcccccagcagcccagcagccagcccggcagccctgccccagcccccagcgcccagatggacctggagcaccccctgcagcccctgtttggcacccccaccagcctgctgaagaaggagcccccaggctatgaggaggccatgagccagcagcccaagcagcaggagaatggcagcagcagccagcagatggatgacctgtttgacatcctgatccagagcggcggcaaccccaggaacttcagccgcttccagggcgccgccatcccagcccgggagggggaggccatccctgaggacagcctgtgggtgcccccaggcagcacagccatcaccttctgctag

SEQ ID NO: 159172 - DNA, 2646 bp, synthetic construct
  misc_feature 1..2646: note = Description of Artificial Sequence: Synthetic coding sequence
  source 1..2646: mol_type = other DNA
atgccacccctgaagagccctgctgccttccacgagcagaggaggagcctggagcgggccaggacagaggactacctgaagaggaagatccgcagcaggcctgagaggtctgagctggtgaggatgcacatcctggaggagaccagcgctgagcccagcctgcaggccaagcagctgaagctgaagagggcccggctggctgatgacctgaatgagaagatcgcccagaggcctggccccatggagctggtggagaagaacatcctgcctgtggagagcagcctgaaggaggccatcatcgtgggccaggtgaactaccccaaggtggccgacagcagcagctttgatgaggacagcagtgatgccctgagccctgagcagcctgccagccatgagagccagggctctgtgcccagccccctggaggcccgggtgtctgagcccctgctgagcgccaccagcgccagccccacccagcagagccagcccaagagcgccagcgagaagagccagaggagcaagaaggccaaggagctgaagcccaaggtgaagaagctgaagtaccaccagtacatccccccagaccagaagcaggacagaggagccccacccatggacagcagctatgccaagatcctgcagcagcagcagctgttcctgcagctgcagatcctgaaccagcagcagcagcagcaccacaactaccaggccatcctgcctgccccacccaagtctgctggggaggccctgggcagcagcggcaccccacctgtgcgcagcctgagcaccaccaacagcagcagcagcagcggggcccctggcccctgtggcctggcccggcagaacagcaccagcctgaccgggaagccaggggccctgcctgccaacctggatgacatgaaggtggccgagctgaagcaggagctgaagctgcggagcctgcctgtgtctggcaccaagacagagctgattgaaaggctgcgggcctaccaggaccagatcagccctgtgcctggggcccccaaggccccagctgccaccagcatcctgcacaaggccggggaggtggtggtggccttccctgctgcccggctgagcactggacctgccctggtggccgccggcctggccccagctgaggtggtggtggccaccgtggccagcagtggagtggtgaagtttggcagcacaggcagcaccccacctgtgagccccacccccagcgagaggagcctgctgagcactggagatgagaacagcacccctggggacaccttcggggagatggtgaccagccccctgacccagctgaccctgcaggccagccccctgcagatcctggtgaaggaggagggccccagggctggcagctgctgcctgagccctgggggccgggcagagctggagggccgggacaaggaccagatgctgcaggagaaggacaagcagatcgaggccctgaccaggatgctgcggcagaagcagcagctggtggagcggctgaagctgcagctggagcaggagaagagggcccagcagcctgccccagccccagcccccctgggcacccctgtgaagcaggagaacagcttcagcagctgccagctgagccagcagcccctgggccctgcccaccccttcaaccccagcctggccgccccagccaccaaccacatcgacccctgtgctgtggcccctggcccccccagcgtggtggtgaagcaggaggccctgcagcctgagcctgagcctgtgcctgccccccagctgctgctgggcccccagggccccagcctcatcaagggcgtggccccacccaccctcatcacagacagcacaggcacccacctggtgctgactgtgaccaacaagaatgctgacagccctggcctgagcagcggcagcccccagcagcccagcagccagcccggcagccctgccccagcccccagcgcccagatggacctggagcaccccctgcagcccctgtttggcacccccaccagcctgctgaagaaggagcccccaggctatgaggaggccatgagccagcagcccaagcagcaggagaatggcagcagcagccagcagatggatgacctgtttgacatcctgatccagagcggggagatctctgctgacttcaaggagccccccagcctgcccgggaaggagaagcccagccccaagacagtgtgtggcagccccctggccgcccagcccagccccagcgctgagctgccccaggccgcccctcctcctcctggcagccccagcctgcccggccgcctggaggacttcctggagagcagcacaggcctgcccctgctgaccagcggccatgatggccctgagcccctgagcctgattgatgacctgcacagccagatgctgagcagcacagccatcctggaccacccccccagccccatggacaccagcgagctgcactttgtgcctgagcccagcagcaccatgggcctggacctggctgatggccacctggacagcatggactggctggagctgagcagcggcggccctgtgctgagcctggcccccctgagcaccacagcccccagcctcttcagcacagacttcctggatggccatgacctgcagctgcactgggacagctgcctgtag

SEQ ID NO: 159173 - DNA, 2796 bp, synthetic construct; identical to SEQ ID NO: 159170
  misc_feature 1..2796: note = Description of Artificial Sequence: Synthetic coding sequence
  source 1..2796: mol_type = other DNA

SEQ ID NO: 159174 - DNA, 258 bp, synthetic construct
  misc_feature 1..258: note = Description of Artificial Sequence: Synthetic coding sequence
  source 1..258: mol_type = other DNA
atgctgagcagcacagccatcctggaccacccccccagccccatggacaccagcgagctgcactttgtgcctgagcccagcagcaccatgggcctggacctggctgatggccacctggacagcatggactggctggagctgagcagcggcggccctgtgctgagcctggcccccctgagcaccacagcccccagcctcttcagcacagacttcctggatggccatgacctgcagctgcactgggacagctgcctgtag

SEQ ID NO: 159175 - DNA, 1524 bp, synthetic construct
  misc_feature 1..1524: note = Description of Artificial Sequence: Synthetic coding sequence
  source 1..1524: mol_type = other DNA
atggccggccggggcagcctggtgtcctggagggccttccacggctgtgacagcgctgaggagctgccccgggtgagcccccgcttcctgcgggcctggcaccccccacctgtgtctgccaggatgcccacccggcgctgggcccctggcacccagtgcatcaccaagtgtgagcacacccggcccaagccaggagagctggccttcagaaaaggagatgtggtgaccatcctggaggcctgtgagaacaagtcctggtacagagtgaagcaccacaccagcggccaggagggcctgctggccgccggggccctgcgggagcgggaggccctgtctgctgaccccaagctgagcctgatgccctggttccacggcaagatcagcggccaggaggccgtgcagcagctgcagcccccagaagatggcctcttcctggtgcgggagagcgcccggcaccctggggactatgtgctgtgtgtgtcctttggaagagatgtgatccactacagagtgctgcacagagatggccacctgaccattgatgaagctgtgttcttctgcaacctgatggacatggtggagcactacagcaaggacaagggggccatctgcaccaagctggtgcggcccaagaggaagcacggcaccaagtctgctgaggaggagctggcccgggccggctggctgctgaacctgcagcacctgaccctgggcgcccagattggagagggggagtttggagctgtgctgcagggcgagtacctgggccagaaggtggccgtgaagaacatcaagtgtgatgtgacagcccaggccttcctggatgaaacagctgtgatgaccaagatgcagcacgagaacctggtgcggctgctgggcgtcatcctgcaccagggcctgtacatcgtgatggagcacgtgtccaaaggaaacctggtgaacttcctgcggacccggggccgggccctggtgaacacagcccagctgctgcagttcagcctgcacgtggccgagggcatggagtacctggagagcaagaagctggtgcaccgggacctggccgccaggaacatcctggtgtctgaggacctggtggccaaggtgtctgactttggcctggccaaggccgagaggaagggcctggacagcagccggctgcctgtgaagtggacagcccctgaggccctgaagcacggcaagttcaccagcaagagtgatgtgtggagctttggagtgctgctgtgggaggtgttctcctatggccgggccccctaccccaagatgagcctgaaggaggtgtctgaggccgtggagaagggctacaggatggagcccccagagggctgccccggccctgtgcacgtgctgatgagcagctgctgggaggccgagcccgcccggcggccccccttcaggaagctggccgagaagctggcccgggagctgcggtctgctggggccccagcctctgtgtctggccaggatgctgatggcagcaccagccccaggagccaggagccctag

SEQ ID NO: 159176 - DNA, 1401 bp, synthetic construct
  misc_feature 1..1401: note = Description of Artificial Sequence: Synthetic coding sequence
  source 1..1401: mol_type = other DNA
atgcccacccggcgctgggcccctggcacccagtgcatcaccaagtgtgagcacacccggcccaagccaggagagctggccttcagaaaaggagatgtggtgaccatcctggaggcctgtgagaacaagtcctggtacagagtgaagcaccacaccagcggccaggagggcctgctggccgccggggccctgcgggagcgggaggccctgtctgctgaccccaagctgagcctgatgccctggttccacggcaagatcagcggccaggaggccgtgcagcagctgcagcccccagaagatggcctcttcctggtgcgggagagcgcccggcaccctggggactatgtgctgtgtgtgtcctttggaagagatgtgatccactacagagtgctgcacagagatggccacctgaccattgatgaggccgtgttcttctgcaacctgatggacatggtggagcactacagcaaggacaagggggccatctgcaccaagctggtgcggcccaagaggaagcacggcaccaagtctgctgaggaggagctggcccgggccggctggctgctgaacctgcagcacctgaccctgggcgcccagatcggggagggggagtttggagctgtgctgcagggcgagtacctgggccagaaggtggccgtgaagaacatcaagtgtgatgtgacagcccaggccttcctggatgaaacagctgtgatgaccaagatgcagcacgagaacctggtgcggctgctgggcgtcatcctgcaccagggcctgtacatcgtgatggagcacgtgtccaagggcaacctggtgaacttcctgcggacccggggccgggccctggtgaacacagcccagctgctgcagttcagcctgcacgtggccgagggcatggagtacctggagagcaagaagctggtgcaccgggacctggccgccaggaacatcctggtgtctgaggacctggtggccaaggtgtctgactttggcctggccaaggccgagaggaagggcctggacagcagccggctgcctgtgaagtggacagcccctgaggccctgaagcacggcaagttcaccagcaagagtgatgtgtggagctttggagtgctgctgtgggaggtgttctcctatggccgggccccctaccccaagatgagcctgaaggaggtgtctgaggccgtggagaagggctacaggatggagcccccagagggctgccccggccctgtgcacgtgctgatgagcagctgctgggaggccgagcccgcccggcggccccccttcaggaagctggccgagaagctggcccgggagctgcggtctgctggggccccagcctctgtgtctggccaggatgctgatggcagcaccagccccaggagccaggagccctag

SEQ ID NO: 159177 - DNA, 1527 bp, synthetic construct
  misc_feature 1..1527: note = Description of Artificial Sequence: Synthetic coding sequence
  source 1..1527: mol_type = other DNA
atgcagggccacttccctgctgagcggcgggagggccggccccggcggggcacccggggccagcagcagctgctggtgagcccccgcttcctgcgggcctggcaccccccacctgtgtctgccaggatgcccacccggcgctgggcccctggcacccagtgcatcaccaagtgtgagcacacccggcccaagccaggagagctggccttcagaaaaggagatgtggtgaccatcctggaggcctgtgagaacaagtcctggtacagagtgaagcaccacaccagcggccaggagggcctgctggccgccggggccctgcgggagcgggaggccctgtctgctgaccccaagctgagcctgatgccctggttccacggcaagatcagcggccaggaggccgtgcagcagctgcagcccccagaagatggcctcttcctggtgcgggagagcgcccggcaccctggggactatgtgctgtgtgtgtcctttggaagagatgtgatccactacagagtgctgcacagagatggccacctgaccattgatgaggccgtgttcttctgcaacctgatggacatggtggagcactacagcaaggacaagggggccatctgcaccaagctggtgcggcccaagaggaagcacggcaccaagtctgctgaggaggagctggcccgggccggctggctgctgaacctgcagcacctgaccctgggcgcccagatcggggagggggagtttggagctgtgctgcagggcgagtacctgggccagaaggtggccgtgaagaacatcaagtgtgatgtgacagcccaggccttcctggatgaaacagctgtgatgaccaagatgcagcacgagaacctggtgcggctgctgggcgtcatcctgcaccagggcctgtacatcgtgatggagcacgtgtccaagggcaacctggtgaacttcctgcggacccggggccgggccctggtgaacacagcccagctgctgcagttcagcctgcacgtggccgagggcatggagtacctggagagcaagaagctggtgcaccgggacctggccgccaggaacatcctggtgtctgaggacctggtggccaaggtgtctgactttggcctggccaaggccgagaggaagggcctggacagcagccggctgcctgtgaagtggacagcccctgaggccctgaagcacggcaagttcaccagcaagagtgatgtgtggagctttggagtgctgctgtgggaggtgttctcctatggccgggccccctaccccaagatgagcctgaaggaggtgtctgaggccgtggagaagggctacaggatggagcccccagagggctgccccggccctgtgcacgtgctgatgagcagctgctgggaggccgagcccgcccggcggccccccttcaggaagctggccgagaagctggcccgggagctgcggtctgctggggccccagcctctgtgtctggccaggatgctgatggcagcaccagccccaggagccaggagccctag

SEQ ID NO: 159178 - DNA, 1134 bp, synthetic construct
  misc_feature 1..1134: note = Description of Artificial Sequence: Synthetic coding sequence
  source 1..1134: mol_type = other DNA
atgacccaggagcccttccgggaggagctggcctatgacaggatgcccaccctggagcggggccggcaggaccctgccagctatgccccagatgccaagcccagcgacctgcagctgagcaagaggctgcccccctgcttcagccacaagacctgggtgttttctgtgctgatgggcagctgcctgctggtgaccagcggcttcagcctgtacctgggcaatgtgtttcctgctgagatggactacctgcgctgtgccgccggcagctgcatccccagcgccatcgtgtccttcaccgtgtccagaagaaatgccaacgtcatccccaacttccagatcctgtttgtgtccacctttgctgtgaccaccacctgcctgatctggtttggctgcaagctggtgctgaaccccagcgccatcaacatcaacttcaacctgatcctgctgctgctgctggagctgctgatggccgccaccgtcatcatcgccgcccggagcagcgaggaggactgcaagaagaagaagggctccatgtctgattctgccaacatcctggatgaggtgcccttccctgcccgggtgctgaagagctacagcgtggtggaggtgattgctggcatctctgctgtgctgggcggcatcatcgccctgaatgtggatgacagcgtgtctggcccccacctgtctgtgaccttcttctggatcctggtggcctgcttccccagcgccatcgccagccacgtggccgcagaatgtcccagcaagtgcctggtggaggtgctgattgccatcagcagcctgaccagccccctgctcttcaccgccagcggctacctgtccttcagcatcatgagaattgtggagatgttcaaggactaccccccagccatcaagcccagctatgatgtgctgctgctgctgctgctgctggtgctgctgctgcaggccggcctgaacacaggaacagccatccagtgtgtgcgcttcaaggtgtctgcccggctgcagggcgcctcctgggacacccagaatggcccccaggagcggctggccggggaggtggcccggagccccctgaaggagtttgacaaggagaaggcctggagggctgtggtggtgcagatggcccagtag

SEQ ID NO: 159179 - DNA, 1134 bp, synthetic construct; identical to SEQ ID NO: 159178
  misc_feature 1..1134: note = Description of Artificial Sequence: Synthetic coding sequence
  source 1..1134: mol_type = other DNA

SEQ ID NO: 159180 - DNA, 1044 bp, synthetic construct
  misc_feature 1..1044: note = Description of Artificial Sequence: Synthetic coding sequence
  source 1..1044: mol_type = other DNA
atgacccaggagcccttccgggaggagctggcctatgacaggatgcccaccctggagcggggccggcaggaccctgccagctatgccccagatgccaagcccagcgacctgcagctgagcaagaggctgcccccctgcttcagccacaagacctgggtgttttctgtgctgatgggctgcatccccagcgccatcgtgtccttcaccgtgtccagaagaaatgccaacgtcatccccaacttccagatcctgtttgtgtccacctttgctgtgaccaccacctgcctgatctggtttggctgcaagctggtgctgaaccccagcgccatcaacatcaacttcaacctgatcctgctgctgctgctggagctgctgatggccgccaccgtcatcatcgccgcccggagcagcgaggaggactgcaagaagaagaagggctccatgtctgattctgccaacatcctggatgaggtgcccttccctgcccgggtgctgaagagctacagcgtggtggaggtgattgctggcatctctgctgtgctgggcggcatcatcgccctgaatgtggatgacagcgtgtctggcccccacctgtctgtgaccttcttctggatcctggtggcctgcttccccagcgccatcgccagccacgtggccgcagaatgtcccagcaagtgcctggtggaggtgctgattgccatcagcagcctgaccagccccctgctcttcaccgccagcggctacctgtccttcagcatcatgagaattgtggagatgttcaaggactaccccccagccatcaagcccagctatgatgtgctgctgctgctgctgctgctggtgctgctgctgcaggccggcctgaacacaggaacagccatccagtgtgtgcgcttcaaggtgtctgcccggctgcagggcgcctcctgggacacccagaatggcccccaggagcggctggccggggaggtggcccggagccccctgaaggagtttgacaaggagaaggcctggagggctgtggtggtgcagatggcccagtag

SEQ ID NO: 159181 - DNA, 672 bp, synthetic construct
  misc_feature 1..672: note = Description of Artificial Sequence: Synthetic coding sequence
  source 1..672: mol_type = other DNA
atgacccaggagcccttccgggaggagctggcctatgacaggatgcccaccctggagcggggccggcaggaccctgccagctatgccccagatgccaagcccagcgacctgcagctgagcaagaggctgcccccctgcttcagccacaagacctgggtgttttctgtgctgatgggctgcatccccagcgccatcgtgtccttcaccgtgtccagaagaaatgccaacgtcatccccaacttccagatcctgtttgtgtccacctttgctgtgaccaccacctgcctgatctggtttggctgcaagctggtgctgaaccccagcgccatcaacatcaacttcaacctgatcctgctgctgctgctggagctgctgatggccgccaccgtcatcatcgccgcccggagcagcgaggaggactgcaagaagaagaagggctccatgtctgattctgccaacatcctggatgaggtgcccttccctgcccgggtgctgaagagctacagcgtggtggaggtgattgctggcatctctgctgtgctgggcggcatcatcgccctgaatgtggatgacagcgtgtctggcccccacctgtctgtgaccttcttctggatcctggtggcctgcttccccagcgccatcgccagccacgtggccgcagaatgtccctag

SEQ ID NO: 159182 - DNA, 978 bp, synthetic construct
  misc_feature 1..978: note = Description of Artificial Sequence: Synthetic coding sequence
  source 1..978: mol_type = other DNA
atgacccaggagcccttccgggaggagctggcctatgacaggatgcccaccctggagcggggccggcaggaccctgccagctatgccccagatgccaagcccagcgacctgcagctgagcaagaggctgcccccctgcttcagccacaagacctgggtgttttctgtgctgatgggcagctgcctgctggtgaccagcggcttcagcctgtacctgggcaatgtgtttcctgctgagatggactacctgcgctgtgccgccggcagcatcaacttcaacctgatcctgctgctgctgctggagctgctgatggccgccaccgtcatcatcgccgcccggagcagcgaggaggactgcaagaagaagaagggctccatgtctgattctgccaacatcctggatgaggtgcccttccctgcccgggtgctgaagagctacagcgtggtggaggtgattgctggcatctctgctgtgctgggcggcatcatcgccctgaatgtggatgacagcgtgtctggcccccacctgtctgtgaccttcttctggatcctggtggcctgcttccccagcgccatcgccagccacgtggccgcagaatgtcccagcaagtgcctggtggaggtgctgattgccatcagcagcctgaccagccccctgctcttcaccgccagcggctacctgtccttcagcatcatgagaattgtggagatgttcaaggactaccccccagccatcaagcccagctatgatgtgctgctgctgctgctgctgctggtgctgctgctgcaggccggcctgaacacaggaacagccatccagtgtgtgcgcttcaaggtgtctgcccggctgcagggcgcctcctgggacacccagaatggcccccaggagcggctggccggggaggtggcccggagccccctgaaggagtttgacaaggagaaggcctggagggctgtggtggtgcagatggcccagtag

SEQ ID NO: 159183 - DNA, 897 bp, synthetic construct
  misc_feature 1..897: note = Description of Artificial Sequence: Synthetic coding sequence
  source 1..897: mol_type = other DNA
atggactacctgcgctgtgccgccggcagctgcatccccagcgccatcgtgtccttcaccgtgtccagaagaaatgccaacgtcatccccaacttccagatcctgtttgtgtccacctttgctgtgaccaccacctgcctgatctggtttggctgcaagctggtgctgaaccccagcgccatcaacatcaacttcaacctgatcctgctgctgctgctggagctgctgatggccgccaccgtcatcatcgccgcccggagcagcgaggaggactgcaagaagaagaagggctccatgtctgacagcgccaacatcctggatgaggtgcccttccctgcccgggtgctgaagagctacagcgtggtggaggtgattgctggcatctctgctgtgctgggcggcatcatcgccctgaatgtggatgattctgtgtctggcccccacctgtctgtgaccttcttctggatcctggtggcctgcttccccagcgccatcgccagccacgtggccgctgagtgccccagcaagtgcctggtggaggtgctgattgccatcagcagcctgaccagccccctgctcttcaccgccagcggctacctgtccttcagcatcatgagaattgtggagatgttcaaggactaccccccagccatcaagcccagctatgatgtgctgctgctgctgctgctgctggtgctgctgctgcaggccggcctgaacacaggaacagccatccagtgtgtgcgcttcaaggtgtctgcccggctgcagggcgcctcctgggacacccagaatggcccccaggagcggctggccggggaggtggcccggagccccctgaaggagtttgacaaggagaaggcctggagggctgtggtggtgcagatggcccagtag

SEQ ID NO: 159184 - DNA, 1032 bp, synthetic construct
  misc_feature 1..1032: note = Description of Artificial Sequence: Synthetic coding sequence
  source 1..1032: mol_type = other DNA
atgacccaggagcccttccgggaggagctggcctatgacaggatgcccaccctggagcggggccggcaggaccctgccagctatgccccagatgccaagcccagcgacctgcagctgagcaagaggctgcccccctgcttcagccacaagacctgggtgttttctgtgctgatgggcagctgcctgctggtgaccagcggcttcagcctgtacctgggcaatgtgtttcctgctgagatggactacctgcgctgtgccgccggcagctgcatccccagcgccatcgtgtccttcaccgtgtccagaagaaatgccaacgtcatcaacttcaacctgatcctgctgctgctgctggagctgctgatggccgccaccgtcatcatcgccgcccggagcagcgaggaggactgcaagaagaagaagggctccatgtctgattctgccaacatcctggatgaggtgcccttccctgcccgggtgctgaagagctacagcgtggtggaggtgattgctggcatctctgctgtgctgggcggcatcatcgccctgaatgtggatgacagcgtgtctggcccccacctgtctgtgaccttcttctggatcctggtggcctgcttccccagcgccatcgccagccacgtggccgcagaatgtcccagcaagtgcctggtggaggtgctgattgccatcagcagcctgaccagccccctgctcttcaccgccagcggctacctgtccttcagcatcatgagaattgtggagatgttcaaggactaccccccagccatcaagcccagctatgatgtgctgctgctgctgctgctgctggtgctgctgctgcaggccggcctgaacacaggaacagccatccagtgtgtgcgcttcaaggtgtctgcccggctgcagggcgcctcctgggacacccagaatggcccccaggagcggctggccggggaggtggcccggagccccctgaaggagtttgacaaggagaaggcctggagggctgtggtggtgcagatggcccagtag

SEQ ID NO: 159185 - DNA, 267 bp, synthetic construct
  misc_feature 1..267: note = Description of Artificial Sequence: Synthetic coding sequence
  source 1..267: mol_type = other DNA
atggccagcagtgatgtgaagcccaagtctgtgtcccatgccaagaagtggagcgaggagattgagaacctgtaccgcttccagcaggccggctacagagatgaaacagagtaccggcaggtgaagcaggtgtccatggtggaccgctggccagagaccggctacgtgaagaagctgcagaggcgggacaacaccttctactactacaacaagcagcgggagtgtgatgacaaggaggtgcacaaggtgaagatctatgcctactag

SEQ ID NO: 159186 - DNA, 267 bp, synthetic construct; identical to SEQ ID NO: 159185
  misc_feature 1..267: note = Description of Artificial Sequence: Synthetic coding sequence
  source 1..267: mol_type = other DNA

SEQ ID NO: 159187 - DNA, 1488 bp, synthetic construct
  misc_feature 1..1488: note = Description of Artificial Sequence: Synthetic coding sequence
  source 1..1488: mol_type = other DNA
atgggcagcaagagaagaaacctgagctgcagcgagcggcaccagaagctggtggatgagaactactgcaagaagctgcacgtgcaggccctgaagaatgtgaacagccagatccggaaccagatggtgcagaatgaaaatgacaacagagtgcagaggaagcagttcctgcggctgctgcagaatgagcagtttgagctggacatggaggaggccatccagaaggccgaggagaacaagaggctgaaggagctgcagctgaagcaggaggagaagctggccatggagctggccaagctgaagcatgagagcctgaaggatgagaagatgaggcagcaggtgcgggagaacagcattgagctgcgggagctggagaagaagctgaaggccgcctacatgaacaaggagcgggccgcccagattgctgagaaggatgccatcaagtatgagcagatgaagagagatgctgagatcgccaagaccatgatggaggagcacaagaggatcatcaaggaggagaatgctgctgaggacaagaggaacaaggccaaggcccagtactacctggacctggagaagcagctggaggagcaggagaagaagaagcaggaggcctatgagcagctgctgaaggagaagctgatgattgatgaaattgtgaggaagatctatgaggaggaccagctggagaagcagcagaagctggagaagatgaatgccatgaggcgctacatcgaggagttccagaaggagcaggccctgtggaggaagaagaagcgggaggagatggaggaggagaacaggaagatcattgaatttgccaacatgcagcagcagcgggaggaggacaggatggccaaggtgcaggagaatgaggagaagaggctgcagctgcagaatgccctgacccagaagctggaggagatgctgcggcagcgggaggacctggagcaggtgcggcaggagctgtaccaggaggagcaggccgagatctacaagagcaagctgaaggaggaggccgagaagaagctgaggaagcagaaggagatgaagcaggactttgaggagcagatggccctgaaggagctggtgctgcaggccgccaaggaggaggaggagaacttcaggaagaccatgctggccaagtttgctgaagatgacagaattgagctgatgaatgcccagaagcagaggatgaagcagctggagcacagaagagctgtggagaagctgattgaggagcggcggcagcagttcctggccgacaagcagcgggagctggaggagtggcagctgcagcagaggcggcagggcttcatcaatgccatcatcgaggaggagcggctgaagctgctgaaggagcacgccaccaacctgctgggctacctgcccaagggcgtcttcaagaaggaggatgacatcgacctgctgggggaggagttcaggaaggtgtaccagcagaggtctgagatctgtgaggagaagtag

SEQ ID NO: 159188 - DNA, 1173 bp, synthetic construct
  misc_feature 1..1173: note = Description of Artificial Sequence: Synthetic coding sequence
  source 1..1173: mol_type = other DNA
atggcccagagatatgatgacctgccccactatggaggcatggatggagtgggcatccccagcaccatgtacggggacccccatgctgcccgctccatgcagcctgtgcaccacctgaaccacggcccccccctgcacagccaccagtacccccacacagcccacaccaatgccatggcccccagcatgggcagctctgtgaatgatgccctgaagagggacaaggatgccatctacggccaccccctcttccccctgctggccctgatctttgagaagtgtgagctggccacctgcaccccccgggagcccggggtggccggaggagatgtgtgcagcagcgagagcttcaatgaagatattgctgtgtttgccaagcagatccgggcagagaagcccctcttcagcagcaaccctgagctggacaacctgatgatccaggccatccaggtgctgcgcttccacctgctggagctggagaaggtgcatgagctgtgtgacaacttctgccaccgctacatcagctgcctgaagggcaagatgcccatcgacctggtgattgatgaccgggagggcggcagcaagagtgacagcgaggacatcaccaggtctgccaacctgacagaccagcccagctggaacagagaccatgatgacacagccagcaccaggtctgggggcaccccaggccccagcagcggcggccacaccagccacagcggggacaacagcagcgagcagggagatggcctggacaacagcgtggccagccccagcactggagatgatgatgatcctgacaaggacaagaagaggcacaagaagaggggcatcttccccaaggtggccaccaacatcatgagggcctggctgttccagcacctgacccacccctaccccagcgaggagcagaagaagcagctggcccaggacaccggcctgaccatcctgcaggtgaacaactggttcatcaatgcccggcggcgcatcgtgcagcccatgattgaccagagcaacagagctgtgtcccagggcaccccctacaacccagatggccagcccatgggcggctttgtgatggatggccagcagcacatgggcatccgggcccctggccccatgagcggcatgggcatgaacatgggcatggagggccagtggcactacatgtag

SEQ ID NO: 159189 - DNA, 1392 bp, synthetic construct
  misc_feature 1..1392: note = Description of Artificial Sequence: Synthetic coding sequence
  source 1..1392: mol_type = other DNA
atgcagtatgatgacctgccccactatggaggcatggatggagtgggcatccccagcaccatgtacggggacccccatgctgcccgctccatgcagcctgtgcaccacctgaaccacggcccccccctgcacagccaccagtacccccacacagcccacaccaatgccatggcccccagcatgggcagctctgtgaatgatgccctgaagagggacaaggatgccatctacggccaccccctcttccccctgctggccctgatctttgagaagtgtgagctggccacctgcaccccccgggagcccggggtggccggaggagatgtgtgcagcagcgagagcttcaatgaagatattgctgtgtttgccaagcagatccgggcagagaagcccctcttcagcagcaaccctgagctggacaacctgatgatccaggccatccaggtgctgcgcttccacctgctggagctggagaaggtgcatgagctgtgtgacaacttctgccaccgctacatcagctgcctgaagggcaagatgcccatcgacctggtgattgatgaccgggagggcggcagcaagagtgacagcgaggacatcaccaggtctgccaacctgacagaccagcccagctggaacagagaccatgatgacacagccagcaccaggtctgggggcaccccaggccccagcagcggcggccacaccagccacagcggggacaacagcagcgagcagggagatggcctggacaacagcgtggccagccccagcactggagatgatgatgatcctgacaaggacaagaagaggcacaagaagaggggcatcttccccaaggtggccaccaacatcatgagggcctggctgttccagcacctgacccacccctaccccagcgaggagcagaagaagcagctggcccaggacaccggcctgaccatcctgcaggtgaacaactggttcatcaatgcccggcggcgcatcgtgcagcccatgattgaccagagcaacagagctgtgtcccagggcaccccctacaacccagatggccagcccatgggcggctttgtgatggatggccagcagcacatgggcatccgggcccctggcctgcagagcatgcctggagaatatgtggcccggggcggccccatgggcgtgtccatgggccagcccagctacacccagccccagatgccaccccacccagcccagctgcggcacggcccccccatgcacacctacatccctggccacccccaccaccccaccgtgatgatgcacggcggccccccccaccctggcatgcccatgtctgccagcagccccaccgtgctgaacacaggagaccccaccatgagcggccaggtgatggacatccacgcccagtag

SEQ ID NO: 159190 - DNA, 762 bp, synthetic construct
  misc_feature 1..762: note = Description of Artificial Sequence: Synthetic coding sequence
  source 1..762: mol_type = other DNA
atgatccaggccatccaggtgctgcgcttccacctgctggagctggagaaggtgcatgagctgtgtgacaacttctgccaccgctacatcagctgcctgaagggcaagatgcccatcgacctggtgattgatgaccgggagggcggcagcaagagtgacagcgaggacatcaccaggtctgccaacctgacagaccagcccagctggaacagagaccatgatgacacagccagcaccaggtctgggggcaccccaggccccagcagcggcggccacaccagccacagcggggacaacagcagcgagcagggagatggcctggacaacagcgtggccagccccagcactggagatgatgatgatcctgacaaggacaagaagaggcacaagaagaggggcatcttccccaaggtggccaccaacatcatgagggcctggctgttccagcacctgacccacccctaccccagcgaggagcagaagaagcagctggcccaggacaccggcctgaccatcctgcaggtgaacaactggttcatcaatgcccggcggcgcatcgtgcagcccatgattgaccagagcaacagagctgtgtcccagggcaccccctacaacccagatggccagcccatgggcggctttgtgatggatggccagcagcacatgggcatccgggcccctggccccatgagcggcatgggcatgaacatgggccccccctgcatccgcaccttcctggacaccctgaccacccagcagtag

SEQ ID NO: 159191 - DNA, 1398 bp, synthetic construct
  misc_feature 1..1398: note = Description of Artificial Sequence: Synthetic coding sequence
  source 1..1398: mol_type = other DNA
atggcccagagatatgatgacctgccccactatggaggcatggatggagtgggcatccccagcaccatgtacggggacccccatgctgcccgctccatgcagcctgtgcaccacctgaaccacggcccccccctgcacagccaccagtacccccacacagcccacaccaatgccatggcccccagcatgggcagctctgtgaatgatgccctgaagagggacaaggatgccatctacggccaccccctcttccccctgctggccctgatctttgagaagtgtgagctggccacctgcaccccccgggagcccggggtggccggaggagatgtgtgcagcagcgagagcttcaatgaagatattgctgtgtttgccaagcagatccgggcagagaagcccctcttcagcagcaaccctgagctggacaacctgatgatccaggccatccaggtgctgcgcttccacctgctggagctggagaaggtgcatgagctgtgtgacaacttctgccaccgctacatcagctgcctgaagggcaagatgcccatcgacctggtgattgatgaccgggagggcggcagcaagagtgacagcgaggacatcaccaggtctgccaacctgacagaccagcccagctggaacagagaccatgatgacacagccagcaccaggtctgggggcaccccaggccccagcagcggcggccacaccagccacagcggggacaacagcagcgagcagggagatggcctggacaacagcgtggccagccccagcactggagatgatgatgatcctgacaaggacaagaagaggcacaagaagaggggcatcttccccaaggtggccaccaacatcatgagggcctggctgttccagcacctgacccacccctaccccagcgaggagcagaagaagcagctggcccaggacaccggcctgaccatcctgcaggtgaacaactggttcatcaatgcccggcggcgcatcgtgcagcccatgattgaccagagcaacagagctgtgtcccagggcaccccctacaacccagatggccagcccatgggcggctttgtgatggatggccagcagcacatgggcatccgggcccctggcctgcagagcatgcctggagaatatgtggcccggggcggccccatgggcgtgtccatgggccagcccagctacacccagccccagatgccaccccacccagcccagctgcggcacggcccccccatgcacacctacatccctggccacccccaccaccccaccgtgatgatgcacggcggccccccccaccctggcatgcccatgtctgccagcagccccaccgtgctgaacacaggagaccccaccatgagcggccaggtgatggacatccacgcccagtag

SEQ ID NO: 159192 - DNA, 423 bp, synthetic construct
  misc_feature 1..423: note = Description of Artificial Sequence: Synthetic coding sequence
  source 1..423: mol_type = other DNA
atgaagaagaatggagatgagaagagccccctgggcacagagatcatgatgaccaggcacctgctggtgcaggaggagccccaggccctgcctgctgtggccaccaggcacacagtgggcaccacagctgtgtccaagcacccctaccccagcgaggagcagaagaagcagctggcccaggacaccggcctgaccatcctgcaggtgaacaactggttcatcaatgcccggcggcgcatcgtgcagcccatgattgaccagagcaacagagctgtgtcccagggcaccccctacaacccagatggccagcccatgggcggctttgtgatggatggccagcagcacatgggcatccgggcccctggccccatgagcggcatgggcatgaacatgggcatggagggccagtggcactacatgtag

SEQ ID NO: 159193 - DNA, 663 bp, synthetic construct
  misc_feature 1..663: note = Description of Artificial Sequence: Synthetic coding sequence
  source 1..663: mol_type = other DNA
atgcagcctgtgcaccacctgaaccacggcccccccctgcacagccaccagtacccccacacagcccacaccaatgccatggcccccagcatgggcagctctgtgaatgatgccctgaagagggacaaggatgccatctacggccaccccctcttccccctgctggccctgatctttgagaagtgtgagctggccacctgcaccccccgggagcccggggtggccggaggagatgtgtgcagcagcgagagcttcaatgaagatattgctgtgtttgccaagcagatccgggcagagaagcccctcttcagcagcaaccctgagctggacaacctgatgatccaggccatccaggtgctgcgcttccacctgctggagctggagaaggtgcatgagctgtgtgacaacttctgccaccgctacatcagctgcctgaagggcaagatgcccatcgacctggtgattgatgaccgggagggcggcagcaagagtgacagcgaggacatcaccaggtctgccaacctgacagaccagcccagctggaacagagaccatgatgacacagccagcaccaggtctgggggcaccccaggccccagcagcggcggccacaccagccacagcggggacaacagcagcgagcaggcccccctgcccttctag

SEQ ID NO: 159194 - DNA, 540 bp, synthetic construct
  misc_feature 1..540: note = Description of Artificial Sequence: Synthetic coding sequence
  source 1..540: mol_type = other DNA
atgaagagcctgctgaccttctacaagtgtggcagcgagctgctgcctgctgctgtgtggagcgctgggggcagccccagcctcttcagtgacctgaagagcaagaagggcaagaagttcagccgggaccacatcgaggtgaccatcagcaactgtggggtgaatggaaatgccaagggagatggcctggacaacagcgtggccagccccagcactggagatgatgatgatcctgacaaggacaagaagaggcacaagaagaggggcatcttccccaaggtggccaccaacatcatgagggcctggctgttccagcacctgacccacccctaccccagcgaggagcagaagaagcagctggcccaggacaccggcctgaccatcctgcaggtgaacaactggttcatcaatgcccggcggcgcatcgtgcagcccatgattgaccagagcaacagagctgtgtcccagggcaccccctacaacccagatggccagcccatgggcggctttgtgatggatggccagcagcacatgggctag

SEQ ID NO: 159195 - DNA, 978 bp, synthetic construct
  misc_feature 1..978: note = Description of Artificial Sequence: Synthetic coding sequence
  source 1..978: mol_type = other DNA
atggcccagggcctgcggctgcagggcagcaggaggaagggccgccaccccctcttccccctgctggccctgatctttgagaagtgtgagctggccacctgcaccccccgggagcccggggtggccggaggagatgtgtgcagcagcgagagcttcaatgaagatattgctgtgtttgccaagcagatccgggcagagaagcccctcttcagcagcaaccctgagctggacaacctgatgatccaggccatccaggtgctgcgcttccacctgctggagctggagaaggtgcatgagctgtgtgacaacttctgccaccgctacatcagctgcctgaagggcaagatgcccatcgacctggtgattgatgaccgggagggcggcagcaagagtgacagcgaggacatcaccaggtctgccaacctgacagaccagcccagctggaacagagaccatgatgacacagccagcaccaggtctgggggcaccccaggccccagcagcggcggccacaccagccacagcggggacaacagcagcgagcagggagatggcctggacaacagcgtggccagccccagcactggagatgatgatgatcctgacaaggacaagaagaggcacaagaagaggggcatcttccccaaggtggccaccaacatcatgagggcctggctgttccagcacctgacccacccctaccccagcgaggagcagaagaagcagctggcccaggacaccggcctgaccatcctgcaggtgaacaactggttcatcaatgccaggagaagaattgtgcagcccatgattgaccagagcaacagagctgtgtcccagggcaccccctacaacccagatggccagcccatgggcggctttgtgatggatggccagcagcacatgggcatccgggcccctggccccatgagcggcatgggcatgaacatgggcatggagggccagtggcactacatgtag

SEQ ID NO: 159196 - DNA, 1113 bp, synthetic construct
  misc_feature 1..1113: note = Description of Artificial Sequence: Synthetic coding sequence
  source 1..1113: mol_type = other DNA
atggcccagagatatgatgacctgccccactatggaggcatggatggagtgggcatccccagcaccatgtacggggacccccatgctgcccgctccatgcagcctgtgcaccacctgaaccacggcccccccctgcacagccaccagtacccccacacagcccacaccaatgccatggcccccagcatgggcagctctgtgaatgatgccctgaagagggacaaggatgccatctacggccaccccctcttccccctgctggccctgatctttgagaagtgtgagctggccacctgcaccccccgggagcccggggtggccggaggagatgtgtgcagcagcgagagcttcaatgaagatattgctgtgtttgccaagcagatccgggcagagaagcccctcttcagcagcaaccctgagctggacaacctgatgatccaggccatccaggtgctgcgcttccacctgctggagctggagaaggtgcatgagctgtgtgacaacttctgccaccgctacatcagctgcctgaagggcaagatgcccatcgacctggtgattgatgaccgggagggcggcagcaagagtgacagcgaggacatcaccaggtctgccaacctgacagaccagcccagctggaacagagaccatgatgacacagccagcaccaggtctgggggcaccccaggccccagcagcggcggccacaccagccacagcggggacaacagcagcgagcagggagatggcctggacaacagcgtggccagccccagcactggagatgatgatgatcctgacaaggacaagaagaggcacaagaagaggggcatcttccccaaggtggccaccaacatcatgagggcctggctgttccagcacctgacccacccctaccccagcgaggagcagaagaagcagctggcccaggacaccggcctgaccatcctgcaggtgaacaactggttcatcaatgcccggcggcgcatcgtgcagcccatgattgaccagagcaacagagctgggaagagccccatcgtgaccgtcttcaagagcaggaagaggaagcccagcagcagccacagccctgggggccccctgcccgggaagtag

SEQ ID NO: 159197 - DNA, 2259 bp, synthetic construct
  misc_feature 1..2259: note = Description of Artificial Sequence: Synthetic coding sequence
  source 1..2259: mol_type = other DNA
accacagccatggcccacaggaagctggagagcgtgggcagcggcatgctggaccaccgggtgcggcccggccctgtgccccacagccaggagcctgagagcgaggacatggagctgcccctggagggctacgtgcctgagggcctggagctggccgccctgcggcctgagagccctgcccctgaggagcaggagtgccacaaccacagcccagatggagacagcagcagtgactatgtgaacaacaccagcgaggaggaggactatgatgagggcctgcctgaggaggaggagggcatcacctactacatccgctactgcccagaagatgacagctacctggagggcatggactgcaatggagaggagtacctggcccacagcgcccaccctgtggacacagatgagtgccaggaggccgtggaggagtggacagattctgctggcccccacccccacggccatgaagctgagggcagccaggactacccagatggccagctgcccatcccagaagatgagcccagcgtgctggaggcccatgaccaggaggaggatggccactactgtgccagcaaggagggctaccaggactactacccagaggaggccaatggaaacacaggagccagcccctaccgcctgcggagaggagatggagacctggaggaccaggaggaggacatcgaccagatcgtggccgagatcaagatgagcctgtccatgaccagcatcaccagcgccagcgaggccagccctgagcacggccctgagcccggccctgaggacagcgtggaggcctgcccccccatcaaggccagctgcagccccagcagacatgaggcccggcccaagagcctgaacctgctgcctgaggccaagcaccctggggacccccagaggggcttcaagcccaagaccaggaccccagaggagcggctgaagtggccccatgagcaggtgtgcaatggcctggagcagcccaggaagcagcagaggagtgacctgaatggacctgtggacaacaacaacatccctgagaccaagaaggtggccagcttccccagctttgtggccgtgcccggcccctgtgagcctgaggacctgattgatggcatcatctttgctgccaactacctgggcagcacccagctgctgtctgaaagaaaccccagcaagaacatccgcatgatgcaggcccaggaggccgtgtcccgggtgaagaggatgcagaaggccgccaagatcaagaagaaggccaacagtgaaggagatgcccagaccctgacagaggtggacctcttcatcagcacccagaggatcaaggtgctgaatgctgacacccaggagaccatgatggaccacgccctgcggaccatctcctacatcgctgacatcggcaacatcgtggtgctgatggcccggcggaggatgcccaggtctgccagccaggactgcatcgagaccacccctggggcccaggagggcaagaagcagtacaagatgatctgccacgtgtttgaaagtgaagatgcccagctgattgcccagagcatcggccaggccttctctgtggcctaccaggagttcctgcgggccaacggcatcaaccctgaggacctgagccagaaggagtacagcgacatcatcaacacccaggagatgtacaatgatgacctgatccacttcagcaacagcgagaactgcaaggagctgcagctggagaagcacaagggggagatcctgggcgtggtggtggtggagagcggctggggcagcatcctgcccaccgtcatcctggccaacatgatgaatggaggccctgctgcccggagcggcaagctgagcattggagaccagatcatgagcatcaatggcaccagcctggtgggcctgcccctggccacctgccagggcatcatcaagggcctgaagaaccagacccaggtgaagctgaacatcgtgtcctgcccccctgtgaccaccgtgctgatcaagaggccagacctgaagtaccagctgggcttctctgtgcagaatggcatcatctgcagcctgatgagaggaggcattgctgagcggggcggcgtgcgggtgggccaccgcatcatcgagatcaatggccagagcgtggtggccacagcccacgagaagatcgtgcaggccctgagcaacagcgtgggggagatccacatgaagaccatgcctgctgccatgttccggctgctgaccggccaggagacccccctgtacatctag

SEQ ID NO: 159198 - DNA, 1413 bp, synthetic construct
  misc_feature 1..1413: note = Description of Artificial Sequence: Synthetic coding sequence
  source 1..1413: mol_type = other DNA
atggcccagagatatgatgagctgccccactatggaggcatggatggagtgggcgtgcctgcctccatgtacggggacccccacgccccccggcccatcccccctgtgcaccacctgaaccacggcccccccctgcacgccacccagcactatggagcccacgccccccaccccaacgtgatgcctgcctccatgggcagcgctgtgaatgatgccctgaagagggacaaggatgccatctacggccaccccctcttccccctgctggccctggtgtttgagaagtgtgagctggccacctgcaccccccgggagcccggggtggccggaggagatgtgtgcagcagtgacagcttcaatgaagatattgctgtgtttgccaagcaggtgcgggcagagaagcccctcttcagcagcaaccctgagctggacaacctgatgatccaggccatccaggtgctgcgcttccacctgctggagctggagaaggtgcatgagctgtgtgacaacttctgccaccgctacatcagctgcctgaagggcaagatgcccatcgacctggtgattgatgaaagagatggcagcagcaagagtgaccacgaggagctgagcggcagcagcaccaacctggccgaccacaaccccagctcctggagggaccatgatgatgccaccagcacccacagcgctggcaccccaggccccagcagcggcggccacgccagccagagcggggacaacagcagcgagcagggagatggcctggacaacagcgtggccagccctggcactggagatgatgatgatcctgacaaggacaagaagaggcagaagaagaggggcatcttccccaaggtggccaccaacatcatgagggcctggctgttccagcacctgacccacccctaccccagcgaggagcagaagaagcagctggcccaggacaccggcctgaccatcctgcaggtgaacaactggttcatcaatgcccggcggcgcatcgtgcagcccatgattgaccagagcaacagagctgtgtcccagggcgccgcctacagccctgagggccagcccatgggcagctttgtgctggatggccagcagcacatgggcatccggcctgctggcctgcagagcatgcctggggactatgtgtcccagggcggccccatgggcatgtccatggcccagcccagctacaccccaccccagatgaccccccaccccacccagctgcggcacggcccccccatgcacagctacctgcccagccacccccaccacccagccatgatgatgcacggcggcccccccacccaccctggcatgaccatgtctgcccagagccccaccatgctgaacagcgtggaccccaacgtgggcggccaggtgatggacatccacgcccagtag

SEQ ID NO: 159199 - DNA, 1146 bp, synthetic construct
  misc_feature 1..1146: note = Description of Artificial Sequence: Synthetic coding sequence
  source 1..1146: mol_type = other DNA
atggatggagtgggcgtgcctgcctccatgtatggagacccccacgccccccggcccatcccccctgtgcaccacctgaaccacggcccccccctgcacgccacccagcactacggggcccacgccccccaccccaacgtgatgcctgcctccatgggcagcgctgtgaatgatgccctgaagagggacaaggatgccatctacggccaccccctcttccccctgctggccctggtgtttgagaagtgtgagctggccacctgcaccccccgggagcccggggtggccggaggagatgtgtgcagcagtgacagcttcaatgaagatattgctgtgtttgccaagcaggtgcgggcagagaagcccctcttcagcagcaaccctgagctggacaacctgatgatccaggccatccaggtgctgcgcttccacctgctggagctggagaaggtgcatgagctgtgtgacaacttctgccaccgctacatcagctgcctgaagggcaagatgcccatcgacctggtgattgatgaaagagatggcagcagcaagagtgaccacgaggagctgagcggcagcagcaccaacctggccgaccacaaccccagctcctggagggaccatgatgatgccaccagcacccacagcgctggcaccccaggccccagcagcggcggccacgccagccagagcggggacaacagcagcgagcagggagatggcctggacaacagcgtggccagccctggcactggagatgatgatgatcctgacaaggacaagaagaggcagaagaagaggggcatcttccccaaggtggccaccaacatcatgagggcctggctgttccagcacctgacccacccctaccccagcgaggagcagaagaagcagctggcccaggacaccggcctgaccatcctgcaggtgaacaactggttcatcaatgccaggagaagaattgtgcagcccatgattgaccagagcaacagagctgtgtcccagggcgccgcctacagccctgagggccagcccatgggcagctttgtgctggatggccagcagcacatgggcatccggcctgctggccccatgagcggcatgggcatgaacatgggcatggatggccagtggcactacatgtag

SEQ ID NO: 159200 - DNA, 1413 bp, synthetic construct; identical to SEQ ID NO: 159198
  misc_feature 1..1413: note = Description of Artificial Sequence: Synthetic coding sequence
  source 1..1413: mol_type = other DNA

SEQ ID NO: 159201 - DNA, 921 bp, synthetic construct
  misc_feature 1..921: note = Description of Artificial Sequence: Synthetic coding sequence
  source 1..921: mol_type = other DNA
atggccctggtgtttgagaagtgtgagctggccacctgcaccccccgggagcccggggtggccggaggagatgtgtgcagcagtgacagcttcaatgaagatattgctgtgtttgccaagcaggtgcgggcagagaagcccctcttcagcagcaaccctgagctggacaacctgatgatccaggccatccaggtgctgcgcttccacctgctggagctggagaaggtgcatgagctgtgtgacaacttctgccaccgctacatcagctgcctgaagggcaagatgcccatcgacctggtgattgatgaaagagatggcagcagcaagagtgaccacgaggagctgagcggcagcagcaccaacctggccgaccacaaccccagctcctggagggaccatgatgatgccaccagcacccacagcgctggcaccccaggccccagcagcggcggccacgccagccagagcggggacaacagcagcgagcagggagatggcctggacaacagcgtggccagccctggcactggagatgatgatgatcctgacaaggacaagaagaggcagaagaagaggggcatcttccccaaggtggccaccaacatcatgagggcctggctgttccagcacctgacccacccctaccccagcgaggagcagaagaagcagctggcccaggacaccggcctgaccatcctgcaggtgaacaactggttcatcaatgcccggcggcgcatcgtgcagcccatgattgaccagagcaacagagctgtgtcccagggcgccgcctacagccctgagggccagcccatgggcagctttgtgctggatggccagcagcacatgggcatccggcctgctggccccatgagcggcatgggcatgaacatgggcatggatggccagtggcactacatgtag

SEQ ID NO: 159202 - DNA, 921 bp, synthetic construct; identical to SEQ ID NO: 159201
  misc_feature 1..921: note = Description of Artificial Sequence: Synthetic coding sequence
  source 1..921: mol_type = other DNA

SEQ ID NO: 159203 - DNA, 1206 bp, synthetic construct
  misc_feature 1..1206: note = Description of Artificial Sequence: Synthetic coding sequence
  source 1..1206: mol_type = other DNA
atggcccagagatatgatgagctgccccactatggaggcatggatggagtgggcgtgcctgcctccatgtacggggacccccacgccccccggcccatcccccctgtgcaccacctgaaccacggcccccccctgcacgccacccagcactatggagcccacgccccccaccccaacgtgatgcctgcctccatgggcagcgctgtgaatgatgccctgaagagggacaaggatgccatctacggccaccccctcttccccctgctggccctggtgtttgagaagtgtgagctggccacctgcaccccccgggagcccggggtggccggaggagatgtgtgcagcagtgacagcttcaatgaagatattgctgtgtttgccaagcaggtgcgggcagagaagcccctcttcagcagcaaccctgagctggacaacctgatgatccaggccatccaggtgctgcgcttccacctgctggagctggagaaggtgcatgagctgtgtgacaacttctgccaccgctacatcagctgcctgaagggcaagatgcccatcgacctggtgattgatgaaagagatggcagcagcaagagtgaccacgaggagctgagcggcagcagcaccaacctggccgaccacaaccccagctcctggagggaccatgatgatgccaccagcacccacagcgctggcaccccaggccccagcagcggcggccacgccagccagagcggggacaacagcagcgagcagggagatggcctggacaacagcgtggccagccctggcactggagatgatgatgatcctgacaaggacaagaagaggcagaagaagaggggcatcttccccaaggtggccaccaacatcatgagggcctggctgttccagcacctgacccacccctaccccagcgaggagcagaagaagcagctggcccaggacaccggcctgaccatcctgcaggtgaacaactggttcatcaatgcccggcggcgcatcgtgcagcccatgattgaccagagcaacagagctggcttcctgctggaccccagcgtgtcccagggcgccgcctacagccctgagggccagcccatgggcagctttgtgctggatggccagcagcacatgggcatccggcctgctggccccatgagcggcatgggcatgaacatgggcatggatggccagtggcactacatgtag

SEQ ID NO: 159204 - DNA, 1185 bp, synthetic construct
  misc_feature 1..1185: note = Description of Artificial Sequence: Synthetic coding sequence
  source 1..1185: mol_type = other DNA
atggcccagagatatgatgagctgccccactatggaggcatggatggagtgggcgtgcctgcctccatgtacggggacccccacgccccccggcccatcccccctgtgcaccacctgaaccacggcccccccctgcacgccacccagcactatggagcccacgccccccaccccaacgtgatgcctgcctccatgggcagcgctgtgaatgatgccctgaagagggacaaggatgccatctacggccaccccctcttccccctgctggccctggtgtttgagaagtgtgagctggccacctgcaccccccgggagcccggggtggccggaggagatgtgtgcagcagtgacagcttcaatgaagatattgctgtgtttgccaagcaggtgcgggcagagaagcccctcttcagcagcaaccctgagctggacaacctgatgatccaggccatccaggtgctgcgcttccacctgctggagctggagaaggtgcatgagctgtgtgacaacttctgccaccgctacatcagctgcctgaagggcaagatgcccatcgacctggtgattgatgaaagagatggcagcagcaagagtgaccacgaggagctgagcggcagcagcaccaacctggccgaccacaaccccagctcctggagggaccatgatgatgccaccagcacccacagcgctggcaccccaggccccagcagcggcggccacgccagccagagcggggacaacagcagcgagcagggagatggcctggacaacagcgtggccagccctggcactggagatgatgatgatcctgacaaggacaagaagaggcagaagaagaggggcatcttccccaaggtggccaccaacatcatgagggcctggctgttccagcacctgacccacccctaccccagcgaggagcagaagaagcagctggcccaggacaccggcctgaccatcctgcaggtgaacaactggttcatcaatgcccggcggcgcatcgtgcagcccatgattgaccagagcaacagagctgtgtcccagggcgccgcctacagccctgagggccagcccatgggcagctttgtgctggatggccagcagcacatgggcatccggcctgctggccccatgagcggcatgggcatgaacatgggcatggatggccagtggcactacatgtag

SEQ ID NO: 159205 - DNA, 717 bp, synthetic construct
  misc_feature 1..717: note = Description of Artificial Sequence: Synthetic coding sequence
  source 1..717: mol_type = other DNA
atggatggagtgggcgtgcctgcctccatgtatggagacccccacgccccccggcccatcccccctgtgcaccacctgaaccacggcccccccctgcacgccacccagcactacggggcccacgccccccaccccaacgtgatgcctgcctccatgggcagcgctgtgaatgatgccctgaagagggacaaggatgccatctacggccaccccctcttccccctgctggccctggtgtttgagaagtgtgagctggccacctgcaccccccgggagcccggggtggccggaggagatgtgtgcagcagtgacagcttcaatgaagatattgctgtgtttgccaagcaggtgcgggcagagaagcccctcttcagcagcaaccctgagctggacaacctgatgatccaggccatccaggtgctgcgcttccacctgctggagctggagaaggtgcatgagctgtgtgacaacttctgccaccgctacatcagctgcctgaagggcaagatgcccatcgacctggtgattgatgaaagagatggcagcagcaagagtgaccacgaggagctgagcggcagcagcaccaacctggccgaccacaaccccagctcctggagggaccatgatgatgccaccagcacccacagcgctggcaccccaggccccagcagcggcggccacgccagccagagcggggacaacagcagcgagcagtag

SEQ ID NO: 159206 - DNA, 240 bp, synthetic construct
  misc_feature 1..240: note = Description of Artificial Sequence: Synthetic coding sequence
  source 1..240: mol_type = other DNA
atggccctggtgtttgagaagtgtgagctggccacctgcaccccccgggagcccggggtggccggaggagatgtgtgcagcagtgacagcttcaatgaagatattgctgtgtttgccaagcaggtgcgggcagagaagcccctcttcagcagcaaccctgagctggacaacctgatgatccaggccatccaggtgctgcgcttccacctgctggagctggagaaggtgtccaggaagtag

SEQ ID NO: 159207 - DNA, 1167 bp, synthetic construct
  misc_feature 1..1167: note = Description of Artificial Sequence: Synthetic coding sequence
  source 1..1167: mol_type = other DNA
atggatggagtgggcgtgcctgcctccatgtatggagacccccacgccccccggcccatcccccctgtgcaccacctgaaccacggcccccccctgcacgccacccagcactacggggcccacgccccccaccccaacgtgatgcctgcctccatgggcagcgctgtgaatgatgccctgaagagggacaaggatgccatctacggccaccccctcttccccctgctggccctggtgtttgagaagtgtgagctggccacctgcaccccccgggagcccggggtggccggaggagatgtgtgcagcagtgacagcttcaatgaagatattgctgtgtttgccaagcaggtgcgggcagagaagcccctcttcagcagcaaccctgagctggacaacctgatgatccaggccatccaggtgctgcgcttccacctgctggagctggagaaggtgcatgagctgtgtgacaacttctgccaccgctacatcagctgcctgaagggcaagatgcccatcgacctggtgattgatgaaagagatggcagcagcaagagtgaccacgaggagctgagcggcagcagcaccaacctggccgaccacaaccccagctcctggagggaccatgatgatgccaccagcacccacagcgctggcaccccaggccccagcagcggcggccacgccagccagagcggggacaacagcagcgagcagggagatggcctggacaacagcgtggccagccctggcactggagatgatgatgatcctgacaaggacaagaagaggcagaagaagaggggcatcttccccaaggtggccaccaacatcatgagggcctggctgttccagcacctgacccacccctaccccagcgaggagcagaagaagcagctggcccaggacaccggcctgaccatcctgcaggtgaacaactggttcatcaatgccaggagaagaattgtgcagcccatgattgaccagagcaacagagctggcttcctgctggaccccagcgtgtcccagggcgccgcctacagccctgagggccagcccatgggcagctttgtgctggatggccagcagcacatgggcatccggcctgctggccccatgagcggcatgggcatgaacatgggcatggatggccagtggcactacatgtag

SEQ ID NO: 159208 - DNA, 1185 bp, synthetic construct; identical to SEQ ID NO: 159204
  misc_feature 1..1185: note = Description of Artificial Sequence: Synthetic coding sequence
  source 1..1185: mol_type = other DNA

SEQ ID NO: 159209 - DNA, 1434 bp, synthetic construct
  misc_feature 1..1434: note = Description of Artificial Sequence: Synthetic coding sequence
  source 1..1434: mol_type = other DNA
atggcccagagatatgatgagctgccccactatggaggcatggatggagtgggcgtgcctgcctccatgtacggggacccccacgccccccggcccatcccccctgtgcaccacctgaaccacggcccccccctgcacgccacccagcactatggagcccacgccccccaccccaacgtgatgcctgcctccatgggcagcgctgtgaatgatgccctgaagagggacaaggatgccatctacggccaccccctcttccccctgctggccctggtgtttgagaagtgtgagctggccacctgcaccccccgggagcccggggtggccggaggagatgtgtgcagcagtgacagcttcaatgaagatattgctgtgtttgccaagcaggtgcgggcagagaagcccctcttcagcagcaaccctgagctggacaacctgatgatccaggccatccaggtgctgcgcttccacctgctggagctggagaaggtgcatgagctgtgtgacaacttctgccaccgctacatcagctgcctgaagggcaagatgcccatcgacctggtgattgatgaaagagatggcagcagcaagagtgaccacgaggagctgagcggcagcagcaccaacctggccgaccacaaccccagctcctggagggaccatgatgatgccaccagcacccacagcgctggcaccccaggccccagcagcggcggccacgccagccagagcggggacaacagcagcgagcagggagatggcctggacaacagcgtggccagccctggcactggagatgatgatgatcctgacaaggacaagaagaggcagaagaagaggggcatcttccccaaggtggccaccaacatcatgagggcctggctgttccagcacctgacccacccctaccccagcgaggagcagaagaagcagctggcccaggacaccggcctgaccatcctgcaggtgaacaactggttcatcaatgcccggcggcgcatcgtgcagcccatgattgaccagagcaacagagctggcttcctgctggaccccagcgtgtcccagggcgccgcctacagccctgagggccagcccatgggcagctttgtgctggatggccagcagcacatgggcatccggcctgctggcctgcagagcatgcctggggactatgtgtcccagggcggccccatgggcatgtccatggcccagcccagctacaccccaccccagatgaccccccaccccacccagctgcggcacggcccccccatgcacagctacctgcccagccacccccaccacccagccatgatgatgcatggaggcccccccacccaccctggcatgaccatgtctgcccagagccccaccatgctgaacagcgtggaccccaacgtgggcggccaggtgatggacatccacgcccagtag

SEQ ID NO: 159210 - DNA, 1434 bp, synthetic construct; identical to SEQ ID NO: 159209
  misc_feature 1..1434: note = Description of Artificial Sequence: Synthetic coding sequence
  source 1..1434: mol_type = other DNA

SEQ ID NO: 159211 - DNA, 357 bp, synthetic construct
  misc_feature 1..357: note = Description of Artificial Sequence: Synthetic coding sequence
  source 1..357: mol_type = other DNA
atgccccgggaggatgcccacttcatctacggctaccccaagaagggccacggccacagctacaccacagctgaggaggccgccggcatcggcatcctgaccgtcatcctgggcgtgctgctgctgattggctgctggtactgcagaagaagaaatggctaccgggccctgatggacaagagcctgcacgtgggcacccagtgtgccctgacccggcgctgcccccaggagggctttgaccaccgggacagcaaggtgtccctgcaggagaagaactgtgagcctgtggtgcccaatgcccccccagcctatgagaagctgtctgctgagcagagccccccaccctacagcccctag

SEQ ID NO: 159212 - DNA, 357 bp, synthetic construct; identical to SEQ ID NO: 159211
  misc_feature 1..357: note = Description of Artificial Sequence: Synthetic coding sequence
  source 1..357: mol_type = other DNA

SEQ ID NO: 159213 - DNA, 357 bp, synthetic construct; identical to SEQ ID NO: 159211
  misc_feature 1..357: note = Description of Artificial Sequence: Synthetic coding sequence
  source 1..357: mol_type = other DNA

SEQ ID NO: 159214 - DNA, 1269 bp, synthetic construct
  misc_feature 1..1269: note = Description of Artificial Sequence: Synthetic coding sequence
  source 1..1269: mol_type = other DNA
atgtctgtgggcgccatgaagaagggcgtgggccgggctgtgggcctgggcggcggcagcggctgccaggccacagaggaggaccccctgcccaactgtggggcctgtgcccctggccagggcggccgccgctggaggctgccccagcctgcctgggtggagggcagcagcgcccggctgtgggagcaggccactggaacaggctggatggacctggaggccagcctgctgcccaccggccccaatgccagcaacaccagtgatggccctgacaacctgaccagcgctggcagcccccccaggacaggcagcatctcctacatcaacatcatcatgcccagcgtgtttggcaccatctgcctgctgggcatcatcggcaacagcaccgtcatctttgctgtggtgaagaagagcaagctgcactggtgcaacaacgtgcctgacatcttcatcatcaacctgtctgtggtggacctgctcttcctgctgggcatgcccttcatgatccaccagctgatgggaaatggagtgtggcactttggagagaccatgtgcaccctcatcacagccatggatgccaacagccagttcaccagcacctacatcctgacagccatggccatcgaccgctacctggccaccgtgcaccccatcagcagcaccaagttcaggaagcccagcgtggccaccctggtgatctgcctgctgtgggccctgtccttcatcagcatcacccctgtgtggctgtatgcccggctcatccccttccctggaggagctgtgggctgcggcatccggctgcccaacccagacacagacctgtactggttcaccctgtaccagttcttcctggcctttgccctgccctttgtggtgatcacagctgcctacgtgcgcatcctgcagaggatgaccagctctgtggccccagccagccagaggagcatccggctgcggaccaagagggtgaccaggacagccatcgccatctgcctggtgttctttgtgtgctgggccccctactacgtgctgcagctgacccagctgagcatcagccggcccaccctgacctttgtgtacctgtacaatgctgccatcagcctgggctacgccaacagctgcctgaacccctttgtgtacatcgtgctgtgtgagaccttcaggaagaggctggtgctgtctgtgaagccagctgcccagggccagctgcgggctgtgtccaatgcccagacagcagatgaggagaggacagagagcaagggcacctag

SEQ ID NO: 159215 - DNA, 891 bp, synthetic construct
  misc_feature 1..891: note = Description of Artificial Sequence: Synthetic coding sequence
  source 1..891: mol_type = other DNA
atgtctgtgggcgccatgaagaagggcgtgggccgggctgtgggcctgggcggcggcagcggctgccaggccacagaggaggaccccctgcccaactgtggggcctgtgcccctggccagggcggccgccgctggaggctgccccagcctgcctgggtggagggcagcagcgcccggctgtgggagcaggccactggaacaggctggatggacctggaggccagcctgctgcccaccggccccaatgccagcaacaccagtgatggccctgacaacctgaccagcgctggcagcccccccaggacaggcagcatctcctacatcaacatcatcatgcccagcgtgtttggcaccatctgcctgctgggcatcatcggcaacagcaccgtcatctttgctgtggtgaagaagagcaagctgcactggtgcaacaacgtgcctgacatcttcatcatcaacctgtccttcttcctggcctttgccctgccctttgtggtgatcacagctgcctacgtgcgcatcctgcagaggatgaccagctctgtggccccagccagccagaggagcatccggctgcggaccaagagggtgaccaggacagccatcgccatctgcctggtgttctttgtgtgctgggccccctactacgtgctgcagctgacccagctgagcatcagccggcccaccctgacctttgtgtacctgtacaatgctgccatcagcctgggctacgccaacagctgcctgaacccctttgtgtacatcgtgctgtgtgagaccttcaggaagaggctggtgctgtctgtgaagccagctgcccagggccagctgcgggctgtgtccaatgcccagacagcagatgaggagaggacagagagcaagggcacctag

SEQ ID NO: 159216 - DNA, 1023 bp, synthetic construct
  misc_feature 1..1023: note = Description of Artificial Sequence: Synthetic coding sequence
  source 1..1023: mol_type = other DNA
atgaaccccttccacgccagctgctggaacaccagcgctgagctgctgaacaagtcctggaacaaggagtttgcctaccagacagcctctgtggtggacaccgtcatcctgcccagcatgattggcatcatctgcagcacaggcctggtgggcaacatcctgattgtgttcaccatcatccgcagcaggaagaagacagtgcctgacatctacatctgcaacctggccgtggccgacctggtgcacatcgtgggcatgcccttcctgatccaccagtgggcccggggcggggagtgggtgtttggaggccccctgtgcaccatcatcaccagcctggacacctgcaaccagtttgcctgcagcgccatcatgacagtgatgtctgtggaccgctactttgccctggtgcagcccttccggctgacccgctggaggacccgctacaagaccatccgcatcaacctgggcctgtgggccgccagcttcatcctggccctgcctgtgtgggtgtacagcaaggtgatcaagttcaaggatggagtggagagctgtgcctttgacctgaccagcccagatgatgtgctgtggtacaccctgtacctgaccatcaccaccttcttcttccccctgcccctcatcctggtgtgctacatcctgatcctgtgctacacctgggagatgtaccagcagaacaaggatgcccgctgctgcaaccccagcgtgcccaagcagagggtgatgaagctgaccaagatggtgctggtgctggtggtggtgttcatcctgtctgctgccccctaccacgtgatccagctggtgaacctgcagatggagcagcccaccctggccttctacgtgggctactacctgagcatctgcctgtcctatgccagcagcagcatcaaccccttcctgtacatcctgctgagcggcaacttccagaagaggctgccccagatccagaggcgggccacagagaaggagatcaacaacatgggcaacaccctgaagagccacttctag

SEQ ID NO: 159217 - DNA, 1023 bp, synthetic construct; identical to SEQ ID NO: 159216
  misc_feature 1..1023: note = Description of Artificial Sequence: Synthetic coding sequence
  source 1..1023: mol_type = other DNA

SEQ ID NO: 159218 - DNA, 1023 bp, synthetic construct; identical to SEQ ID NO: 159216
  misc_feature 1..1023: note = Description of Artificial Sequence: Synthetic coding sequence
  source 1..1023: mol_type = other DNA

SEQ ID NO: 159219 - DNA, 519 bp, synthetic construct
  misc_feature 1..519: note = Description of Artificial Sequence: Synthetic coding sequence
  source 1..519: mol_type = other DNA
atggccaacggcaccaatgccagcgccccctactacagctatgagtactacctggactacctggacctgatccctgtggatgagaagaagctgaaggcccacaagcacagcatcgtcatcgccttctgggtgtccctggccgcctttgtggtgctgctcttcctgatcctgctgtacatgtcctggagcgccagcccccagatgaggaacagccccaagcaccaccagacctgcccctggagccacggcctgaacctgcacctgtgcatccagaagtgcctgccctgccaccgggagcccctggccaccagccaggcccaggccagctctgtggagcccggcagcaggactggaccagaccagcccctgcggcaggagagcagcagcaccctgcccctgggcggcttccagacccaccccaccctgctgtgggagctgaccctgaatggaggccccctggtgcgcagcaagcccagcgagcccccacctggggacaggaccagccagctgcagagctag

SEQ ID NO: 159220 - DNA, 309 bp, synthetic construct
  misc_feature 1..309: note = Description of Artificial Sequence: Synthetic coding sequence
  source 1..309: mol_type = other DNA
atggccaacggcaccaatgccagcgccccctactacagctatgagtactacctggactacctggacctgatccctgtggatgagaagaagctgaaggcccacaagcacagcatcgtcatcgccttctgggtgtccctggccgcctttgtggtgctgctcttcctgatcctgctgtacatgtcctggagcgccagcccccagatgtccttcaacacagatgagagcctgctgcacagcgaggtgctgccccagacccgggccatcagctgtgatgagctgcaggccccccgggaggagggcgccgcctag

SEQ ID NO: 159221 - DNA, 519 bp, synthetic construct; identical to SEQ ID NO: 159219
  misc_feature 1..519: note = Description of Artificial Sequence: Synthetic coding sequence
  source 1..519: mol_type = other DNA

SEQ ID NO: 159222 - DNA, 309 bp, synthetic construct; identical to SEQ ID NO: 159220
  misc_feature 1..309: note = Description of Artificial Sequence: Synthetic coding sequence
  source 1..309: mol_type = other DNA

SEQ ID NO: 159223 - DNA, 1110 bp, synthetic construct
  misc_feature 1..1110: note = Description of Artificial Sequence: Synthetic coding sequence
  source 1..1110: mol_type = other DNA
atgccccgggcccccaagaggcagcgctgcatgcctgaggaggacctgcagagccagagcgagacccagggcctggagggcgcccaggcccccctggccgtggaggaggatgccagcagcagcaccagcaccagcagcagcttccccagcagcttccccagcagcagcagcagcagcagcagcagctgctaccccctcatccccagcaccccagaggaggtgtctgcagatgatgagacccccaaccccccccagagcgcccagatcgcctgcagcagccccagcgtggtggccagcctgcccctggaccagagtgatgagggcagcagcagccagaaggaggagagccccagcaccctgcaggtgctgcctgacagcgagagcctgcccaggagtgaaattgatgagaaggtgacagacctggtgcagttcctgctcttcaagtaccagatgaaggagcccatcaccaaggccgagatcctggagagcgtcatccggaactatgaggaccacttccccctgctcttcagcgaggccagcgagtgcatgctgctggtgtttggaattgatgtgaaggaggtggaccccaccggccacagctttgtgctggtgaccagcctgggcctgacctatgatggcatgctgagtgatgtgcagagcatgcccaagacaggcatcctgatcctgatcctgagcatcgtgttcatcgagggctactgcaccccagaggaggtgatctgggaggccctgaacatgatgggcctgtatgatggcatggagcacctgatctacggggagcccaggaagctgctgacccaggactgggtgcaggagaactacctggagtaccggcaggtgcccggcagtgaccctgcccgctatgagttcctgtggggcccccgggcccacgccgagatcaggaagatgagcctgctgaagttcctggccaaggtgaatggaagtgaccccaggagcttccccctgtggtatgaggaggccctgaaggatgaggaggagcgggcccaggacagaattgccaccacagatgacaccacagccatggccagcgccagcagcagcgccaccggcagcttctcctacccagagtag

SEQ ID NO: 159224 - DNA, 1110 bp, synthetic construct; identical to SEQ ID NO: 159223
  misc_feature 1..1110: note = Description of Artificial Sequence: Synthetic coding sequence
  source 1..1110: mol_type = other DNA

SEQ ID NO: 159225 - DNA, 486 bp, synthetic construct
  misc_feature 1..486: note = Description of Artificial Sequence: Synthetic coding sequence
  source 1..486: mol_type = other DNA
atgccccgggcccccaagaggcagcgctgcatgcctgaggaggacctgcagagccagagcgagacccagggcctggagggcgcccaggcccccctggccgtggaggaggatgccagcagcagcaccagcaccagcagcagcttccccagcagcttccccagcagcagcagcagcagcagcagcagctgctaccccctcatccccagcaccccagaggaggtgtctgcagatgatgagacccccaaccccccccagagcgcccagatcgcctgcagcagccccagcgtggtggccagcctgcccctggaccagagtgatgagggcagcagcagccagaaggaggagagccccagcaccctgcaggtgctgcctgacagcgagagcctgcccaggagtgaaattgatgagaaggtgacagacctggtgcagttcctgctcttcaagtaccagatgaaggagcccatcaccaaggccgagatcctgtag

SEQ ID NO: 159226 - DNA, 573 bp, synthetic construct
  misc_feature 1..573: note = Description of Artificial Sequence: Synthetic coding sequence
  source 1..573: mol_type = other DNA
atgccccgggcccccaagaggcagcgctgcatgcctgaggaggacctgcagagccagagcgagacccagggcctggagggcgcccaggcccccctggccgtggaggaggatgccagcagcagcaccagcaccagcagcagcttccccagcagcttccccagcagcagcagcagcagcagcagcagctgctaccccctcatccccagcaccccagaggaggtgtctgcagatgatgagacccccaaccccccccagagcgcccagatcgcctgcagcagccccagcgtggtggccagcctgcccctggaccagagtgatgagggcagcagcagccagaaggaggagagccccagcaccctgcaggtgctgcctgacagcgagagcctgcccaggagtgaaattgatgagaaggtgacagacctggtgcagttcctgctcttcaagtaccagatgaaggagcccatcaccaaggccgagatcctggagagcgtcatccggaactatgaggaccacttccccctgctcttcagcgaggccagcgagtgcatgctgctggtgtttggaattgattag

SEQ ID NO: 159227 - DNA, 1203 bp, synthetic construct
  misc_feature 1..1203: note = Description of Artificial Sequence: Synthetic coding sequence
  source 1..1203: mol_type = other DNA
atgagcaaggtgtccaccatgttttctgaagatgacttccagagcacagagcgggccccctacggcccccagctgcagtggagccaggacctgccccgggtgcaggtgttccgggagcaggccaacctggaggacaggagccccaggaggacccagaggatcactggaggagagcaggtgctgtggggccccatcacccagatcttccccaccgtgcggcctgctgacctgaccagggtcatcatgcccctggagcagaggagccagcactgcaagccagaggagggcctgcaggcccaggaggaggacctgggcctggtgggcgcccaggccctgcaggccgaggagcaggaggccgccttcttcagcagcaccctgaatgtgggcaccctggaggagctgcctgctgctgagagccccagccccccccagagcccccaggaggagagcttcagccccacagccatggatgccatcttcggcagcctgagtgatgagggcagcggcagccaggagaaggagggccccagcaccagcccagacctgattgatcctgagagcttcagccaggacatcctgcatgacaagatcatcgacctggtgcacctgctgctgaggaagtacagagtgaagggcctcatcaccaaggccgagatgctgggcagcgtcatcaagaactatgaggactacttccctgagatcttccgggaggcctctgtgtgcatgcagctgctgtttggaattgatgtgaaggaggtggaccccaccagccacagctatgtgctggtgaccagcctgaacctgtcctatgatggcatccagtgcaatgagcagagcatgcccaagagcggcctgctgatcatcgtgctgggcgtcatcttcatggagggcaactgcatccctgaggaggtgatgtgggaggtgctgagcatcatgggcgtgtatgccggccgggagcacttcctgtttggagagcccaagaggctgctgacccagaactgggtgcaggagaagtacctggtgtaccggcaggtgcccggcacagatcctgcctgctatgagttcctgtggggcccccgggcccatgctgagaccagcaagatgaaggtgctggagtacatcgccaatgccaacggccgggaccccaccagctaccccagcctgtatgaagatgccctgcgggaggagggggagggcgtgtag

SEQ ID NO: 159228 - DNA, 1290 bp, synthetic construct
  misc_feature 1..1290: note = Description of Artificial Sequence: Synthetic coding sequence
  source 1..1290: mol_type = other DNA
atggagacccagttccggcggggcggcctgggctgcagccctgccagcatcaagaggaagaagaagcgggaggacagcggggactttggcctgcaggtgtccaccatgttttctgaagatgacttccagagcacagagcgggccccctacggcccccagctgcagtggagccaggacctgccccgggtgcaggtgttccgggagcaggccaacctggaggacaggagccccaggaggacccagaggatcaccggcggggagcaggtgctgtggggccccatcacccagatcttccccaccgtgcggcctgctgacctgaccagggtcatcatgcccctggagcagaggagccagcactgcaagccagaggagggcctgcaggcccaggaggaggacctgggcctggtgggcgcccaggccctgcaggccgaggagcaggaggccgccttcttcagcagcaccctgaatgtgggcaccctggaggagctgcctgctgctgagagccccagccccccccagagcccccaggaggagagcttcagccccacagccatggatgccatcttcggcagcctgagtgatgagggcagcggcagccaggagaaggagggccccagcaccagcccagacctgattgatcctgagagcttcagccaggacatcctgcatgacaagatcatcgacctggtgcacctgctgctgaggaagtacagagtgaagggcctcatcaccaaggccgagatgctgggcagcgtcatcaagaactatgaggactacttccctgagatcttccgggaggcctctgtgtgcatgcagctgctgtttggaattgatgtgaaggaggtggaccccaccagccacagctatgtgctggtgaccagcctgaacctgtcctatgatggcatccagtgcaatgagcagagcatgcccaagagcggcctgctgatcatcgtgctgggcgtcatcttcatggagggcaactgcatccctgaggaggtgatgtgggaggtgctgagcatcatgggcgtgtatgccggccgggagcacttcctgtttggagagcccaagaggctgctgacccagaactgggtgcaggagaagtacctggtgtaccggcaggtgcctggaacagatcctgcctgctatgagttcctgtggggcccccgggcccacgccgagaccagcaagatgaaggtgctggagtacatcgccaatgccaacggccgggaccccaccagctaccccagcctgtatgaagatgccctgcgggaggagggggagggcgtgtag

SEQ ID NO: 159229 - DNA, 945 bp, synthetic construct
  misc_feature 1..945: note = Description of Artificial Sequence: Synthetic coding sequence
  source 1..945: mol_type = other DNA
atgcccctggagcagaggagccagcactgcaagccagaggagggcctggaggcccagggcgaggccctgggcctggtgggcgcccaggccccagccacagaggagcaggagacagccagcagcagcagcaccctggtggaggtgaccctgcgggaggtgcctgctgctgagagccccagccccccccacagcccccagggcgccagcaccctgcccaccaccatcaactacaccctgtggagccagagtgatgagggcagcagcaatgaggagcaggagggccccagcaccttcccagacctggagaccagcttccaggtggccctgagcaggaagatggccgagctggtgcacttcctgctgctgaagtaccgggcccgggagcccttcaccaaggccgagatgctgggcagcgtcatccggaacttccaggacttcttccctgtgatcttcagcaaggccagcgagtacctgcagctggtgtttggcatcgaggtggtggaggtggtgcgcatcggccacctgtacatcctggtgacctgcctgggcctgtcctatgatggcctgctgggggacaaccagatcgtgcccaagacaggcctgctgatcatcgtgctggccatcatcgccaaggagggggactgtgcccctgaggagaagatctgggaggagctgtctgtgctggaggccagtgatggaagagaagattctgtgtttgcccaccccaggaagctgctgacccaggacctggtgcaggagaactacctggagtaccggcaggtgcccggcagtgaccctgcctgctatgagttcctgtggggcccccgggccctggtggagaccagctatgtgaaggtgctgcaccacctgctgaagatcagcggcggcccccacatctcctacccacccctgcacgagtgggccttccgggagggggaggagtag

SEQ ID NO: 159230 - DNA, 945 bp, synthetic construct; identical to SEQ ID NO: 159229
  misc_feature 1..945: note = Description of Artificial Sequence: Synthetic coding sequence
  source 1..945: mol_type = other DNA

SEQ ID NO: 159231 - DNA, 945 bp, synthetic construct; identical to SEQ ID NO: 159229
  misc_feature 1..945: note = Description of Artificial Sequence: Synthetic coding sequence
  source 1..945: mol_type = other DNA

SEQ ID NO: 159232 - DNA, 945 bp, synthetic construct
  misc_feature 1..945: note = Description of Artificial Sequence: Synthetic coding sequence
  source 1..945: mol_type = other DNA
atgcccctggagcagaggagccagcactgcaagccagaggagggcctggaggcccggggggaggccctgggcctggtgggcgcccaggccccagccacagaggagcagcagacagccagcagcagcagcaccctggtggaggtgaccctgggggaggtgcctgctgctgacagccccagccccccccacagcccccagggcgccagcagcttcagcaccaccatcaactacaccctgtggaggcagagtgatgagggcagcagcaaccaggaggaggagggccccaggatgtttcctgacctggagagcgagttccaggccgccatcagcaggaagatggtggagctggtgcacttcctgctgctgaagtaccgggcccgggagcctgtgaccaaggccgagatgctggagagcgtgctgaggaactgccaggacttcttccctgtgatcttcagcaaggccagcgagtacctgcagctggtgtttggcatcgaggtggtggaggtggtgcccatcagccacctgtacatcctggtgacctgcctgggcctgtcctatgatggcctgctgggggacaaccaggtgatgcccaagacaggcctgctgatcatcgtgctggccatcatcgccattgaaggagactgtgcccctgaggagaagatctgggaggagctgtccatgctggaggtgtttgagggcagagaagattctgtgtttgcccaccccaggaagctgctgatgcaggacctggtgcaggagaactacctggagtaccggcaggtgcccggcagtgaccctgcctgctatgagttcctgtggggcccccgggccctgattgagaccagctatgtgaaggtgctgcaccacaccctgaagattggaggagagccccacatctcctacccacccctgcacgagcgggccctgcgggagggggaggagtag

SEQ ID NO: 159233 - DNA, 945 bp, synthetic construct; identical to SEQ ID NO: 159232
  misc_feature 1..945: note = Description of Artificial Sequence: Synthetic coding sequence
  source 1..945: mol_type = other DNA

SEQ ID NO: 159234 - DNA, 945 bp, synthetic construct; identical to SEQ ID NO: 159232
  misc_feature 1..945: note = Description of Artificial Sequence: Synthetic coding sequence
  source 1..945: mol_type = other DNA

SEQ ID NO: 159235 - DNA, 945 bp, synthetic construct; identical to SEQ ID NO: 159232
  misc_feature 1..945: note = Description of Artificial Sequence: Synthetic coding sequence
  source 1..945: mol_type = other DNA

SEQ ID NO: 159236 - DNA, 945 bp, synthetic construct
  misc_feature 1..945: note = Description of Artificial Sequence: Synthetic coding sequence
  source 1..945: mol_type = other DNA
atgcccctggagcagaggagccagcactgcaagccagaggagggcctggaggcccggggggaggccctgggcctggtgggcgcccaggccccagccacagaggagcaggaggccgccagcagcagcagcaccctggtggaggtgaccctgggggaggtgcctgctgctgagagcccagaccccccccagagcccccagggcgccagcagcctgcccaccaccatgaactaccccctgtggagccagagctatgaggacagcagcaaccaggaggaggagggccccagcaccttcccagacctggagagcgagttccaggccgccctgagcaggaaggtggccgagctggtgcacttcctgctgctgaagtaccgggcccgggagcctgtgaccaaggccgagatgctgggctctgtggtgggcaactggcagtacttcttccctgtgatcttcagcaaggccagcagcagcctgcagctggtgtttggcatcgagctgatggaggtggaccccatcggccacctgtacatctttgccacctgcctgggcctgtcctatgatggcctgctgggggacaaccagatcatgcccaaggccggcctgctgatcatcgtgctggccatcatcgcccgggagggggactgtgcccctgaggagaagatctgggaggagctgtctgtgctggaggtgtttgagggcagagaagattccatcctgggggaccccaagaagctgctgacccagcactttgtgcaggagaactacctggagtaccggcaggtgcccggcagtgaccctgcctgctatgagttcctgtggggcccccgggccctggtggagaccagctatgtgaaggtgctgcaccacatggtgaagatcagcggcggcccccacatctcctacccacccctgcacgagtgggtgctgcgggagggggaggagtag

SEQ ID NO: 159237 - DNA, 945 bp, synthetic construct; identical to SEQ ID NO: 159236
  misc_feature 1..945: note = Description of Artificial Sequence: Synthetic coding sequence
  source 1..945: mol_type = other DNA

SEQ ID NO: 159238 - DNA, 597 bp, synthetic construct
  misc_feature 1..597: note = Description of Artificial Sequence: Synthetic coding sequence
  source 1..597: mol_type = other DNA
atgcccctggagcagaggagccagcactgcaagccagaggagggcctggaggcccggggggaggccctgggcctggtgggcgcccaggccccagccacagaggagcaggaggccgccagcagcagcagcaccctggtggaggtgaccctgggggaggtgcctgctgctgagagcccagaccccccccagagcccccagggcgccagcagcctgcccaccaccatgaactaccccctgtggagccagagctatgaggacagcagcaaccaggaggaggagggccccagcaccttcccagacctggagagcgagttccaggccgccctgagcaggaaggtggccgagctggtgcacttcctgctgctgaagtaccgggcccgggagcctgtgaccaaggccgagatgctgggctctgtggtgggcaactggcagtacttcttccctgtgatcttcagcaaggccagcagcagcctgcagctggtgtttggcatcgagctgatggaggtggaccccatcggccacctgtacatctttgccacctgcctgggcctgtcctatgatggcctgctgggggacaaccagatcatgcccaagtag

SEQ ID NO: 159239 - DNA, 954 bp, synthetic construct
  misc_feature 1..954: note = Description of Artificial Sequence: Synthetic coding sequence
  source 1..954: mol_type = other DNA
atgagcagcgagcagaagagccagcactgcaagccagaggagggcgtggaggcccaggaggaggccctgggcctggtgggcgcccaggcccccaccacagaggagcaggaggccgctgtgagcagcagcagccccctggtgcccggcaccctggaggaggtgcctgctgctgagagcgctggccccccccagagcccccagggcgccagcgccctgcccaccaccatctccttcacctgctggaggcagcccaatgaaggcagcagcagccaggaggaggagggccccagcaccagcccagatgctgagagcctcttccgggaggccctgagcaacaaggtggatgagctggcccacttcctgctgaggaagtaccgggccaaggagctggtgaccaaggccgagatgctggagagggtcatcaagaactacaagcgctgcttccctgtgatctttgggaaggccagcgagagcctgaagatgatctttggaattgatgtgaaggaggtggaccctgccagcaacacctacaccctggtgacctgcctgggcctgtcctatgatggcctgctgggcaacaaccagatcttccccaagacaggcctgctgatcatcgtgctgggcaccatcgccatggagggggacagcgccagcgaggaggagatctgggaggagctgggcgtgatgggcgtgtatgatggccgggagcacacagtgtatggagagcccaggaagctgctgacccaggactgggtgcaggagaactacctggagtaccggcaggtgcccggcagcaacccagcccgctatgagttcctgtggggcccccgggccctggccgagaccagctatgtgaaggtgctggagcacgtggtgcgggtgaatgcccgggtgcgcatcgcctaccccagcctgcgggaggccgccctgctggaggaggaggagggcgtgtag

SEQ ID NO: 159240 - DNA, 954 bp, synthetic construct; identical to SEQ ID NO: 159239
  misc_feature 1..954: note = Description of Artificial Sequence: Synthetic coding sequence
  source 1..954: mol_type = other DNA

SEQ ID NO: 159241 - DNA, 954 bp, synthetic construct; identical to SEQ ID NO: 159239
  misc_feature 1..954: note = Description of Artificial Sequence: Synthetic coding sequence
  source 1..954: mol_type = other DNA

SEQ ID NO: 159242 - DNA, 954 bp, synthetic construct; identical to SEQ ID NO: 159239
  misc_feature 1..954: note = Description of Artificial Sequence: Synthetic coding sequence
  source 1..954: mol_type = other DNA

SEQ ID NO: 159243 - DNA, 954 bp, synthetic construct; identical to SEQ ID NO: 159239
  misc_feature 1..954: note = Description of Artificial Sequence: Synthetic coding sequence
  source 1..954: mol_type = other DNA

SEQ ID NO: 159244 - DNA, 954 bp, synthetic construct; identical to SEQ ID NO: 159239
  misc_feature 1..954: note = Description of Artificial Sequence: Synthetic coding sequence
  source 1..954: mol_type = other DNA

SEQ ID NO: 159245 - DNA, 954 bp, synthetic construct; identical to SEQ ID NO: 159239
  misc_feature 1..954: note = Description of Artificial Sequence: Synthetic coding sequence
  source 1..954: mol_type = other DNA

SEQ ID NO: 159246 - DNA, 693 bp, synthetic construct
  misc_feature 1..693: note = Description of Artificial Sequence: Synthetic coding sequence
  source 1..693: mol_type = other DNA
atgagcagcgagcagaagagccagcactgcaagccagaggagggcgtggaggcccaggaggaggccctgggcctggtgggcgcccaggcccccaccacagaggagcaggaggccgctgtgagcagcagcagccccctggtgcccggcaccctggaggaggtgcctgctgctgagagcgctggccccccccagagcccccagggcgccagcgccctgcccaccaccatctccttcacctgctggaggcagcccaatgaaggcagcagcagccaggaggaggagggccccagcaccagcccagatgctgagagcctcttccgggaggccctgagcaacaaggtggatgagctggcccacttcctgctgaggaagtaccgggccaaggagctggtgaccaaggccgagatgctggagagggtcatcaagaactacaagcgctgcttccctgtgatctttgggaaggccagcgagagcctgaagatgatctttggaattgatgtgaaggaggtggaccctgccagcaacacctacaccctggtgacctgcctgggcctgtcctatgatggcctgctgggcaacaaccagatcttccccaagacaggcctgctgatcatcgtgctgggcaccatcgccatggagggggacagcgccagcgaggaggagatctgggaggagctgggcgtgatgggctag

SEQ ID NO: 159247 - DNA, 654 bp, synthetic construct
  misc_feature 1..654: note = Description of Artificial Sequence: Synthetic coding sequence
  source 1..654: mol_type = other DNA
atgagcagcgagcagaagagccagcactgcaagccagaggagggcgtggaggcccaggaggaggccctgggcctggtgggcgcccaggcccccaccacagaggagcaggaggccgctgtgagcagcagcagccccctggtgcccggcaccctggaggaggtgcctgctgctgagagcgctggccccccccagagcccccagggcgccagcgccctgcccaccaccatctccttcacctgctggaggcagcccaatgaaggcagcagcagccaggaggaggagggccccagcaccagcccagatgctgagagcctcttccgggaggccctgagcaacaaggtggatgagctggcccacttcctgctgaggaagtaccgggccaaggagctggtgaccaaggccgagatgctggagagggtcatcaagaactacaagcgctgcttccctgtgatctttgggaaggccagcgagagcctgaagatgatctttggaattgatgtgaaggaggtggaccctgccagcaacacctacaccctggtgacctgcctgggcctgtcctatgatggcctgctgggcaacaaccagatcttccccaagacaggcctgctgatcatcgtgctgggcaccatcgccatggagggggacagcgcctag

SEQ ID NO: 159248 - DNA, 726 bp, synthetic construct
  misc_feature 1..726: note = Description of Artificial Sequence: Synthetic coding sequence
  source 1..726: mol_type = other DNA
atgagcagcgagcagaagagccagcactgcaagccagaggagggcgtggaggcccaggaggaggccctgggcctggtgggcgcccaggcccccaccacagaggagcaggaggccgctgtgagcagcagcagccccctggtgcccggcaccctggaggaggtgcctgctgctgagagcgctggccccccccagagcccccagggcgccagcgccctgcccaccaccatctccttcacctgctggaggcagcccaatgaaggcagcagcagccaggaggaggagggccccagcaccagcccagatgctgagagcctcttccgggaggccctgagcaacaaggtggatgagctggcccacttcctgctgaggaagtaccgggccaaggagctggtgaccaaggccgagatgctggagagggtcatcaagaactacaagcgctgcttccctgtgatctttgggaaggccagcgagagcctgaagatgatctttggaattgatgtgaaggaggtggaccctgccagcaacacctacaccctggtgacctgcctgggcctgtcctatgatggcctgctgggcaacaaccagatcttccccaagacaggcctgctgatcatcgtgctgggcaccatcgccatggagggggacagcgccagcgaggaggagatctgggaggagctgggcgtgatgggcgtgtatgatggccgggagcacacagtgtatggatag

SEQ ID NO: 159249 - DNA, 519 bp, synthetic construct
  misc_feature 1..519: note = Description of Artificial Sequence: Synthetic coding sequence
  source 1..519: mol_type = other DNA
atgagcagcgagcagaagagccagcactgcaagccagaggagggcgtggaggcccaggaggaggccctgggcctggtgggcgcccaggcccccaccacagaggagcaggaggccgctgtgagcagcagcagccccctggtgcccggcaccctggaggaggtgcctgctgctgagagcgctggccccccccagagcccccagggcgccagcgccctgcccaccaccatctccttcacctgctggaggcagcccaatgaaggcagcagcagccaggaggaggagggccccagcaccagcccagatgctgagagcctcttccgggaggccctgagcaacaaggtggatgagctggcccacttcctgctgaggaagtaccgggccaaggagctggtgaccaaggccgagatgctggagagggtcatcaagaactacaagcgctgcttccctgtgatctttgggaaggccagcgagagcctgaagatgatctttggaattgatgtgaaggaggtggacccctag

SEQ ID NO: 159250 - DNA, 726 bp, synthetic construct; identical to SEQ ID NO: 159248
  misc_feature 1..726: note = Description of Artificial Sequence: Synthetic coding sequence
  source 1..726: mol_type = other DNA

SEQ ID NO: 159251 - DNA, 726 bp, synthetic construct; identical to SEQ ID NO: 159248
  misc_feature 1..726: note = Description of Artificial Sequence: Synthetic coding sequence
  source 1..726: mol_type = other DNA

SEQ ID NO: 159252 - DNA, 654 bp, synthetic construct; identical to SEQ ID NO: 159247
  misc_feature 1..654: note = Description of Artificial Sequence: Synthetic coding sequence
  source 1..654: mol_type = other DNA

SEQ ID NO: 159253 - DNA, 726 bp, synthetic construct; identical to SEQ ID NO: 159248
  misc_feature 1..726: note = Description of Artificial Sequence: Synthetic coding sequence
  source 1..726: mol_type = other DNA

SEQ ID NO: 159254 - DNA, 945 bp, synthetic construct
  misc_feature 1..945: note = Description of Artificial Sequence: Synthetic coding sequence
  source 1..945: mol_type = other DNA
atgcccctggagcagaggagccagcactgcaagccagaggagggcctggaggcccggggggaggccctgggcctggtgggcgcccaggccccagccacagaggagcaggaggccgccagcagcagcagcaccctggtggaggtgaccctgggggaggtgcctgctgctgagagcccagaccccccccagagcccccagggcgccagcagcctgcccaccaccatgaactaccccctgtggagccagagctatgaggacagcagcaaccaggaggaggagggccccagcaccttcccagacctggagagcgagttccaggccgccctgagcaggaaggtggccaagctggtgcacttcctgctgctgaagtaccgggcccgggagcctgtgaccaaggccgagatgctgggctctgtggtgggcaactggcagtacttcttccctgtgatcttcagcaaggccagtgacagcctgcagctggtgtttggcatcgagctgatggaggtggaccccatcggccacgtgtacatctttgccacctgcctgggcctgtcctatgatggcctgctgggggacaaccagatcatgcccaagacaggcttcctgatcatcatcctggccatcatcgccaaggagggggactgtgcccctgaggagaagatctgggaggagctgtctgtgctggaggtgtttgagggcagagaagattccatctttggagaccccaagaagctgctgacccagtactttgtgcaggagaactacctggagtaccggcaggtgcccggcagtgaccctgcctgctatgagttcctgtggggcccccgggccctgattgagaccagctatgtgaaggtgctgcaccacatggtgaagatcagcggcggcccccgcatctcctaccccctgctgcacgagtgggccctgcgggagggggaggagtag

SEQ ID NO: 159255 - DNA, 606 bp, synthetic construct
  misc_feature 1..606: note = Description of Artificial Sequence: Synthetic coding sequence
  source 1..606: mol_type = other DNA
atgcccctggagcagaggagccagcactgcaagccagaggagggcctggaggcccggggggaggccctgggcctggtgggcgcccaggccccagccacagaggagcaggaggccgccagcagcagcagcaccctggtggaggtgaccctgggggaggtgcctgctgctgagagcccagaccccccccagagcccccagggcgccagcagcctgcccaccaccatgaactaccccctgtggagccagagctatgaggacagcagcaaccaggaggaggagggccccagcaccttcccagacctggagagcgagttccaggccgccctgagcaggaaggtggccaagctggtgcacttcctgctgctgaagtaccgggcccgggagcctgtgaccaaggccgagatgctgggctctgtggtgggcaactggcagtacttcttccctgtgatcttcagcaaggccagtgacagcctgcagctggtgtttggcatcgagctgatggaggtggaccccatcggccacgtgtacatctttgccacctgcctgggcctgtcctatgatggcctgctgggggacaaccagatcatgcccaagacaggcttctag

SEQ ID NO: 159256 - DNA, 708 bp, synthetic construct
  misc_feature 1..708: note = Description of Artificial Sequence: Synthetic coding sequence
  source 1..708: mol_type = other DNA
atgcccctggagcagaggagccagcactgcaagccagaggagggcctggaggcccggggggaggccctgggcctggtgggcgcccaggccccagccacagaggagcaggaggccgccagcagcagcagcaccctggtggaggtgaccctgggggaggtgcctgctgctgagagcccagaccccccccagagcccccagggcgccagcagcctgcccaccaccatgaactaccccctgtggagccagagctatgaggacagcagcaaccaggaggaggagggccccagcaccttcccagacctggagagcgagttccaggccgccctgagcaggaaggtggccaagctggtgcacttcctgctgctgaagtaccgggcccgggagcctgtgaccaaggccgagatgctgggctctgtggtgggcaactggcagtacttcttccctgtgatcttcagcaaggccagtgacagcctgcagctggtgtttggcatcgagctgatggaggtggaccccatcggccacgtgtacatctttgccacctgcctgggcctgtcctatgatggcctgctgggggacaaccagatcatgcccaagacaggcttcctgatcatcatcctggccatcatcgccaaggagggggactgtgcccctgaggagaagatctgggaggagctgtctgtgctggaggtgtttgagggccgggagtag

SEQ ID NO: 159257 - DNA, 957 bp, synthetic construct
  misc_feature 1..957: note = Description of Artificial Sequence: Synthetic coding sequence
  source 1..957: mol_type = other DNA
atgctgctgggccagaagagccagcgctacaaggccgaggagggcctgcaggcccagggcgaggcccctggcctgatggatgtgcagatccccacagctgaggagcagaaggccgccagcagcagcagcaccctcatcatgggcaccctggaggaggtgacagacagcggcagccccagccccccccagagccctgagggcgccagcagcagcctgactgtgacagacagcaccctgtggagccagagtgatgagggcagcagcagcaatgaggaggagggccccagcaccagcccagaccctgcccacctggagagcctcttccgggaggccctggatgagaaggtggccgagctggtgcgcttcctgctgaggaagtaccagatcaaggagcctgtgaccaaggccgagatgctggagagcgtcatcaagaactacaagaaccacttcccagacatcttcagcaaggccagcgagtgcatgcaggtgatctttggaattgatgtgaaggaggtggaccctgctggccacagctacatcctggtgacctgcctgggcctgtcctatgatggcctgctgggagatgaccagagcacccccaagacaggcctgctgatcatcgtgctgggcatgatcctgatggagggcagccgggcccctgaggaggccatctgggaggccctgtctgtgatgggcctgtatgatggccgggagcacagcgtgtactggaagctgaggaagctgctgacccaggagtgggtgcaggagaactacctggagtaccggcaggcccctggcagtgaccctgtgcgctatgagttcctgtggggcccccgggccctggccgagaccagctatgtgaaggtgctggagcacgtggtgcgggtgaatgcccgggtgcgcatctcctaccccagcctgcacgaggaggccctgggggaggagaagggcgtgtag

SEQ ID NO: 159258 - DNA, 957 bp, synthetic construct; identical to SEQ ID NO: 159257
  misc_feature 1..957: note = Description of Artificial Sequence: Synthetic coding sequence
  source 1..957: mol_type = other DNA

SEQ ID NO: 159259 - DNA, 957 bp, synthetic construct; identical to SEQ ID NO: 159257
  misc_feature 1..957: note = Description of Artificial Sequence: Synthetic coding sequence
  source 1..957: mol_type = other DNA

SEQ ID NO: 159260 - DNA, 948 bp, synthetic construct
  misc_feature 1..948: note = Description of Artificial Sequence: Synthetic coding sequence
  source 1..948: mol_type = other DNA
atgagcctggagcagaggagcccccactgcaagccagatgaggacctggaggcccagggcgaggacctgggcctgatgggcgcccaggagcccaccggggaggaggaggagaccaccagcagcagtgacagcaaggaggaggaggtgtctgctgctggcagcagcagccccccccagagcccccagggcggggccagcagcagcatctctgtgtactacaccctgtggagccagtttgatgagggcagcagcagccaggaggaggaggagcccagcagctctgtggaccctgcccagctggagttcatgttccaggaggccctgaagctgaaggtggccgagctggtgcacttcctgctgcacaagtacagagtgaaggagcctgtgaccaaggccgagatgctggagagcgtcatcaagaactacaagcgctacttccctgtgatctttgggaaggccagcgagttcatgcaggtgatctttggaacagatgtgaaggaggtggaccctgctggccacagctacatcctggtgacagccctgggcctgagctgtgacagcatgctgggagatggccacagcatgcccaaggccgccctgctgatcatcgtgctgggcgtcatcctgaccaaggacaactgtgcccctgaggaggtgatctgggaggccctgtctgtgatgggcgtgtatgtgggcaaggagcacatgttctacggggagcccaggaagctgctgacccaggactgggtgcaggagaactacctggagtaccggcaggtgcccggcagtgaccctgcccactatgagttcctgtggggcagcaaggcccacgccgagaccagctatgagaaggtgatcaactacctggtgatgctgaatgcccgggagcccatctgctaccccagcctgtatgaggaggtgctgggggaggagcaggagggcgtgtag

SEQ ID NO: 159261 - DNA, 345 bp, synthetic construct
  misc_feature 1..345: note = Description of Artificial Sequence: Synthetic coding sequence
  source 1..345: mol_type = other DNA
atgagcctggagcagaggagcccccactgcaagccagatgaggacctggaggcccagggcgaggacctgggcctgatgggcgcccaggagcccaccggggaggaggaggagaccaccagcagcagtgacagcaaggaggaggaggtgtctgctgctggcagcagcagccccccccagagcccccagggcggggccagcagcagcatctctgtgtactacaccctgtggagccagtttgatgagggcagcagcagccaggaggaggaggagcccagcagctctgtggaccctgcccagctggagttcatgttccaggaggccctgaagctgaaggtggccgagtag

SEQ ID NO: 159262 - DNA, 930 bp, synthetic construct
  misc_feature 1..930: note = Description of Artificial Sequence: Synthetic coding sequence
  source 1..930: mol_type = other DNA
atgagcctggagcagaggagcccccactgcaagccagatgaggacctggaggcccagggcgaggacctgggcctgatgggcgcccaggagcccaccggggaggaggaggagaccaccagcagcagtgacagcaaggaggaggaggtgtctgctgctggcagcagcagccccccccagagcccccagggcggggccagcagcagcatctctgtgtactacaccctgtggagccagtttgatgagggcagcagcagccaggaggaggaggagcccagcagctctgtggaccctgcccagctggagttcatgttccaggaggccctgaagctgaaggtggccgagctggtgcacttcctgctgcacaagtacagagtgaaggagcctgtgaccaaggccgagatgctggagagcgtcatcaagaactacaagcgctacttccctgtgatctttgggaaggccagcgagttcatgcaggtgatctttggaacagatgtgaaggaggtggaccctgctggccacagctacatcctggtgacagccctgggcctgagctgtgacagcatgctgggagatggccacagcatgcccaaggccgccctgctgatcatcgtgctgggcgtcatcctgaccaaggacaactgtgcccctgaggaggtgatctgggaggccctgtctgtgatgggcgtgtatgtgggcaaggagcacatgttctacggggagcccaggaagctgctgacccaggactgggtgcaggagaactacctggagtaccggcaggtgcccggcagtgaccctgcccactatgagttcctgtggggcagcaaggcccacgccgagaccagctatgagaaggtgatcaactacctggtgatgctgaatgcccgggagcccatctgctaccccagcctgtatgaggaggtgctgggctag

SEQ ID NO: 159263 - DNA, 591 bp, synthetic construct
  misc_feature 1..591: note = Description of Artificial Sequence: Synthetic coding sequence
  source 1..591: mol_type = other DNA
atgagcctggagcagaggagcccccactgcaagccagatgaggacctggaggcccagggcgaggacctgggcctgatgggcgcccaggagcccaccggggaggaggaggagaccaccagcagcagtgacagcaaggaggaggaggtgtctgctgctggcagcagcagccccccccagagcccccagggcggggccagcagcagcatctctgtgtactacaccctgtggagccagtttgatgagggcagcagcagccaggaggaggaggagcccagcagctctgtggaccctgcccagctggagttcatgttccaggaggccctgaagctgaaggtggccgagctggtgcacttcctgctgcacaagtacagagtgaaggagcctgtgaccaaggccgagatgctggagagcgtcatcaagaactacaagcgctacttccctgtgatctttgggaaggccagcgagttcatgcaggtgatctttggaacagatgtgaaggaggtggaccctgctggccacagctacatcctggtgacagccctgggcctgagctgtgacagcatgctgggagatggccacagcatgccctag

SEQ ID NO: 159264 - DNA, 294 bp, synthetic construct
  misc_feature 1..294: note = Description of Artificial Sequence: Synthetic coding sequence
  source 1..294: mol_type = other DNA
atgagcctggagcagaggagcccccactgcaagccagatgaggacctggaggcccagggcgaggacctgggcctgatgggcgcccaggagcccaccggggaggaggaggagaccaccagcagcagtgacagcaaggaggaggaggtgtctgctgctggcagcagcagccccccccagagcccccagggcggggccagcagcagcatctctgtgtactacaccctgtggagccagtttgatgagggcagcagcagccaggaggaggaggagcccagcagctctgtggacccctag

SEQ ID NO: 159265 - DNA, 948 bp, synthetic construct; identical to SEQ ID NO: 159260
  misc_feature 1..948: note = Description of Artificial Sequence: Synthetic coding sequence
  source 1..948: mol_type = other DNA

SEQ ID NO: 159266 - DNA, 1044 bp, synthetic construct
  misc_feature 1..1044: note = Description of Artificial Sequence: Synthetic coding sequence
  source 1..1044: mol_type = other DNA
atgccccggggccagaagagcaagctgcgggcccgggagaagaggaggaaggcccgggaggagacccagggcctgaaggtggcccacgccacagctgctgagaaggaggagtgccccagcagcagccctgtgctgggggacacccccaccagcagccctgctgctggcatcccccagaagccccagggcgccccacccaccaccacagctgctgctgctgtgtcctgcacagaaagtgatgagggcgccaagtgccagggcgaggagaatgccagcttcagccaggccaccaccagcacagagagctctgtgaaggaccctgtggcctgggaggccggcatgctgatgcacttcatcctgaggaagtacaagatgagggagcccatcatgaaggctgacatgctgaaggtggtggatgagaagtacaaggaccacttcacagagatcctgaatggagccagccggcggctggagctggtgtttggcctggacctgaaggaggacaaccccagcggccacacctacaccctggtgtccaagctgaacctgaccaatgatggcaacctgagcaatgactgggacttccccagaaatggcctgctgatgcccctgctgggcgtcatcttcctgaagggcaacagcgccacagaggaggagatctggaagttcatgaatgtgctgggcgcctatgatggagaggagcacctgatctacggggagcccaggaagttcatcacccaggacctggtgcaggagaagtacctgaagtatgagcaggtgcccaacagcgaccccccacgctaccagttcctgtggggcccccgggcctatgcagagaccaccaagatgaaggtgctggagttcctggccaagatgaatggagccaccccccgggacttccccagccactatgaggaggccctgagagatgaggaggagcgggcccaggtgcgcagctctgtgcgggcccggcggaggaccacagccaccaccttccgggcccggagccgggcccccttcagccgcagcagccaccccatgtag

SEQ ID NO: 159267 - DNA, 1044 bp, synthetic construct; identical to SEQ ID NO: 159266
  misc_feature 1..1044: note = Description of Artificial Sequence: Synthetic coding sequence
  source 1..1044: mol_type = other DNA

SEQ ID NO: 159268 - DNA, 1044 bp, synthetic construct; identical to SEQ ID NO: 159266
  misc_feature 1..1044: note = Description of Artificial Sequence: Synthetic coding sequence
  source 1..1044: mol_type = other DNA

SEQ ID NO: 159269 - DNA, 1044 bp, synthetic construct
  misc_feature 1..1044: note = Description of Artificial Sequence: Synthetic coding sequence
  source 1..1044: mol_type = other DNA
atgccccggggccagaagagcaagctgcgggcccgggagaagaggcggcaggcccggggcggcctggaggacctgattgatgccctggacatcctggaggaggaggaggagagccccccatctgccagcgcctgcctgaaggatgtgttccagagcagcctggatggagccagcaacaacccccacggcctgcgggaggcccagagcaccagcaccagcgccacagctgccagccacaccaggcaccctgagggcgtgaatgaccagatggaggagcggcccatctgcacccaggacctggaggccacagacagcttcccccggggccctgtggatgagaaggtgatcatcctggtgcactacctgctgtacaagtaccagatgaaggagcccatcaccaaggctgacatgctgagaaatgtgacccagatgagcaagagccagtttcctgtgatcctgagccgggccagcgagcacctggagctgatcttcggcctggacctgaaggaggtggagcccaacaagcacatctacgtgctggtgaacaagctggacctgggctgtgatgccaagctgagtgatgagaccggggtgcccaagacaggcctgctgatgacagtgctgggcatcatcttcaccaacggcaactgtgtggccgaggaggaggtgtggaaggtgttcaacaccatgggcctgtatgatggcatcgagcacttcatgtttggagagcccaggaagctgctgaccaaggacctggtgaaggagaactacctggagtaccagcaggtgcccaacagcgaccccccacgctaccagttcctgtggggcccccgggcccatgctgagaccagcaagatgaaggtgctggagttcctggccaaggtgaatgacacagcccccagcgagttcagcaactggtacacagaggccctgcaggatgaggaggagcgggcccgggcccgggtggccgccaaggcccgggtgtctgccacagctggggcccggagcaaggtgaagagcagcaagagcagccagctgcagtag

SEQ ID NO: 159270 - DNA, 975 bp, synthetic construct
  misc_feature 1..975: note = Description of Artificial Sequence: Synthetic coding sequence
  source 1..975: mol_type = other DNA
atgagccaggaccaggagagcccccgctgcacccatgaccagcacctgcagaccttcagcgagacccagagcctggaggtggcccaggtgtccaaggccctggagaagaccctgctgagcagcagccaccccctggtgcctgggaagctgaaggaggccccagctgccaaggccgagagccccctggaggtgccccagagcttctgcagcagcagcattgctgtgaccaccaccagcagcagcgagagtgatgaggccagcagcaaccaggaggaggaggacagccccagcagcagcgaggacaccagtgaccccagaaatgtgcctgcagatgccctggaccagaaggtggccttcctggtgaacttcatgctgcacaagtgccagatgaagaagcccatcaccaaggctgacatgctgaagatcatcatcaaggatgatgagagccacttcagcgagatcctgctgcgggccagcgagcacctggagatgatcttcggcctggatgtggtggaggtggaccccaccacccactgctacggcctcttcatcaagctgggcctgacctatgatggcatgctgtctggagagaagggcgtgcccaagacaggcctgctgatcatcgtgctgggcgtcatcttcatgaagggcaacagagccacagaggaggaggtgtgggaggtgctgaacctgactggagtgtacagcggcaagaagcacttcatctttggagagcccaggatgctgatcaccaaggactttgtgaaggagaagtacctggagtaccagcaggtggccaacagcgaccctgcccgctatgagttcctgtggggcccccgggccaaggccgagaccagcaagatgaaggtgctggagtttgtggccaaggtgcacggcagctacccccacagcttccccagccagtatgcagaggccctgaaggaggaggaggagcgggcccgggcccgcatctag

SEQ ID NO: 159271 - DNA, 975 bp, synthetic construct; identical to SEQ ID NO: 159270
  misc_feature 1..975: note = Description of Artificial Sequence: Synthetic coding sequence
  source 1..975: mol_type = other DNA

SEQ ID NO: 159272 - DNA, 975 bp, synthetic construct; identical to SEQ ID NO: 159270
  misc_feature 1..975: note = Description of Artificial Sequence: Synthetic coding sequence
  source 1..975: mol_type = other DNA

SEQ ID NO: 159273 - DNA, 975 bp, synthetic construct; identical to SEQ ID NO: 159270
  misc_feature 1..975: note = Description of Artificial Sequence: Synthetic coding sequence
  source 1..975: mol_type = other DNA

SEQ ID NO: 159274 - DNA, 1071 bp, synthetic construct
  misc_feature 1..1071: note = Description of Artificial Sequence: Synthetic coding sequence
  source 1..1071: mol_type = other DNA
atgggcacagaggcccagcctgtggtgaaggctgtgatcctgcactgcctgcccagctgcccccacagctgcctgctgccccccaccagggtcatcatgagccaggaccaggagagcccccgctgcacccatgaccagcacctgcagaccttcagcgagacccagagcctggaggtggcccaggtgtccaaggccctggagaagaccctgctgagcagcagccaccccctggtgcctgggaagctgaaggaggccccagctgccaaggccgagagccccctggaggtgccccagagcttctgcagcagcagcattgctgtgaccaccaccagcagcagcgagagtgatgaggccagcagcaaccaggaggaggaggacagccccagcagcagcgaggacaccagtgaccccagaaatgtgcctgcagatgccctggaccagaaggtggccttcctggtgaacttcatgctgcacaagtgccagatgaagaagcccatcaccaaggctgacatgctgaagatcatcatcaaggatgatgagagccacttcagcgagatcctgctgcgggccagcgagcacctggagatgatcttcggcctggatgtggtggaggtggaccccaccacccactgctacggcctcttcatcaagctgggcctgacctatgatggcatgctgtctggagagaagggcgtgcccaagacaggcctgctgatcatcgtgctgggcgtcatcttcatgaagggcaacagagccacagaggaggaggtgtgggaggtgctgaacctgactggagtgtacagcggcaagaagcacttcatctttggagagcccaggatgctgatcaccaaggactttgtgaaggagaagtacctggagtaccagcaggtggccaacagcgaccctgcccgctatgagttcctgtggggcccccgggccaaggccgagaccagcaagatgaaggtgctggagtttgtggccaaggtgcacggcagctacccccacagcttccccagccagtatgcagaggccctgaaggaggaggaggagcgggcccgggcccgcatctag

SEQ ID NO: 159275 - DNA, 996 bp, synthetic construct
  misc_feature 1..996: note = Description of Artificial Sequence: Synthetic coding sequence
  source 1..996: mol_type = other DNA
atgccccggggccaggccagcaagagaagagcccgggagaagaggcggcaggcccggggggaggaccagtgcctgggcggggcccaggccacagctgctgagaaggagaagctgcccagcagcagcagccctgcctgccagagccccccccagagcttccccaatgccggcatcccccaggagagccagagggccagctaccccagcagccctgccagcgctgtgtccctgaccagcagtgatgaaggagccaagggccagaagggggagagccccaacagcttccacggccccagcagcagcgagagcacaggccgggacctgctgaacaccaagacaggagagctggtgcagttcctgctgaacaagtacatcaggaaggagcccatcacccgggaggccatgctgaaggtgatcaacaggaagtacaagcagcacttccctgagatcctgcggcgcagcacagaaaatgtggaggtggtgtttggcctgtacctgaaggagatggaccccagccggcagagctatgtgctggtgggcaagctggacttccccaaccagggcagcctgagtgatggcggcggcttccccctgagcggcctgctgatggtgctgctgagcaccatcttcatgcacggcaacagagccacagaggaggagatgtgggagtgcctgaatgccctgggcatgtacaagggcaggaagcacttcatctatggagagccccaggagctggtgaccaaggacctggtgcgggagggctacctggagtaccagcaggtgcccagcagtgacccccccaggtatgagttcctgtggggcccccgggcccgggcagagaccagcaagatgaaggtgctggagtttgtggccaagctgaatgacacagtggccagcacctacaagagccgctatgaggaggccctgcgggaggaggaggagcaggcccgggcccgggctgtggcccgggacagcgcccgggcccgggccagctag

SEQ ID NO: 159276 - DNA, 1011 bp, synthetic construct
  misc_feature 1..1011: note = Description of Artificial Sequence: Synthetic coding sequence
  source 1..1011: mol_type = other DNA
atgccccggggccaggccagcaagagaagagcccgggagaagaggcggcaggcccggggggaggaccagtgcctgggcggggcccaggccacagctgctgagaaggagaagctgcccagcagcagcagccctgcctgccagagccccccccagagcttccccaatgccggcatcccccaggagagccagagggccagctaccccagcagccctgccagcgctgtgtccctgaccagcagtgatgaaggagccaagggccagaagggggagagccccaacagcttccacggccccagcagcagcgagagcacaggccgggacctgctgaacaccaagacaggagagctggtgcagttcctgctgaacaagtacatcaggaaggagcccatcacccgggaggccatgctgaaggtgatcaacaggaagtacaagcagcacttccctgagatcctgcggcgcagcacagaaaatgtggaggtggtgtttggcctgtacctgaaggagatggaccccagccggcagagctatgtgctggtgggcaagctggacttccccaaccagggcagcctgagtgatggcggcggcttccccctgagcggcctgctgatggtgctgctgagcaccatcttcatgcacggcaacagagccacagaggaggagatgtgggagtgcctgaatgccctgggcatgtacaagggcaggaagcacttcatctatggagagccccaggagctggtgaccaaggacctggtgcgggagggctacctggagtaccagcaggtgcccagcagtgacccccccaggtatgagttcctgtggggcccccgggcccgggcagagaccagcaagatgaaggtgctggagtttgtggccaagctgaatgacacagtggccagcacctacaagagccgctatgaggaggccctgcgggaggaggaggagcaggcccgggcccgggctgtggcccgggacagcgcccgggcccgggccagccgctccttccagccctag

SEQ ID NO: 159277 - DNA, 1011 bp, synthetic construct; identical to SEQ ID NO: 159276
  misc_feature 1..1011: note = Description of Artificial Sequence: Synthetic coding sequence
  source 1..1011: mol_type = other DNA

SEQ ID NO: 159278 - DNA, 960 bp, synthetic construct
  misc_feature 1..960: note = Description of Artificial Sequence: Synthetic coding sequence
  source 1..960: mol_type = other DNA
atgccccggggccagaagagcaagctgcgggcccgggagaagaggaggaaggccagagatgagacccggggcctgaatgtgccccaggtgacagaagctgaggaggaggaggccccctgctgcagcagctctgtgtctgggggcgccgccagcagcagccctgctgctggcatcccccaggagccccagagggcccccaccacagctgctgctgctgctgctggggtgagcagcaccaagagcaagaagggggccaagagccaccagggcgagaagaatgccagcagcagccaggccagcaccagcaccaagagccccagcgaggaccccctgaccaggaagagcggcagcctggtgcagttcctgctgtacaagtacaagatcaagaagtctgtgaccaagggggagatgctgaagatcgtgggcaagcgcttccgggagcacttccctgagatcctgaagaaggccagcgagggcctgtctgtggtgtttggcctggagctgaacaaggtgaaccccaacggccacacctacaccttcatcgacaaggtggacctgacagatgaggagagcctgctgagctcctgggacttccccaggaggaagctgctgatgcccctgctgggcgtcatcttcctgaatggaaattctgccacagaggaggagatctgggagttcctgaacatgctgggcgtgtatgatggagaggagcacagcgtgtttggagagccctggaagctgatcaccaaggacctggtgcaggagaagtacctggagtacaagcaggtgcccagcagtgaccccccacgcttccagttcctgtggggcccccgggcctatgcagagaccagcaagatgaaggtgctggagttcctggccaaggtgaatggcaccaccccctgtgccttccccacccactatgaggaggccctgaaggatgaggagaaggccggcgtgtag

SEQ ID NO: 159279 - DNA, 1041 bp, synthetic construct
  misc_feature 1..1041: note = Description of Artificial Sequence: Synthetic coding sequence
  source 1..1041: mol_type = other DNA
atgccccggggccagaagagcaccctgcacgcccgggagaagaggcagcagacccggggccagacccaggaccaccagggcgcccagatcacagccaccaacaagaagaaggtgtccttcagcagccccctcatcctgggcgccaccatccagaagaagtctgctggccgcagccgcagcgccctgaagaagccccagagggccctgagcaccaccacctctgtggatgtgtcctacaagaagagctacaagggggccaacagcaagattgagaagaagcagagcttcagccagggcctgagcagcacagtgcagagcaggacagaccccctcatcatgaagaccaacatgctggtgcagttcctgatggagatgtacaagatgaagaagcccatcatgaaggctgacatgctgaagatcgtgcagaagagccacaagaactgcttccctgagatcctgaagaaggccagcttcaacatggaggtggtgtttggagtggacctgaagaaggtggacagcaccaaggacagctatgtgctggtgtccaagatggacctgcccaacaatggaacagtgacccggggccggggcttccccaagacaggcctgctgctgaacctgctgggcgtcatcttcatgaagggcaactgtgccacagaggagaagatctgggagttcctgaacaagatgaggatctatgatggcaagaagcacttcatctttggagagcccaggaagctgatcacccaggacctggtgaagctgaagtacctggagtaccggcaggtgcccaacagcaacccagcccgctatgagttcctgtggggcccccgggcccatgctgagaccagcaagatgaaggtgctggagttctgggccaaggtgaacaagacagtgcccagcgccttccagttctggtatgaggaggccctgagagatgaggaggagcgggtgcaggccgccgccatgctgaatgatggcagcagcgccatgggcaggaagtgcagcaaggccaaggccagcagcagcagccacgcctag

SEQ ID NO: 159280 - DNA, 1041 bp, synthetic construct; identical to SEQ ID NO: 159279
  misc_feature 1..1041: note = Description of Artificial Sequence: Synthetic coding sequence
  source 1..1041: mol_type = other DNA

SEQ ID NO: 159281 - DNA, 1041 bp, synthetic construct
  misc_feature 1..1041: note = Description of Artificial Sequence: Synthetic coding sequence
  source 1..1041: mol_type = other DNA
atgccccggggccagaagagcaagctgcgggcccgggagaagaggcagaggacccggggccagacccaggacctgaaggtgggccagcccacagctgctgagaaggaggagagccccagcagcagcagctctgtgctgcgggacacagccagcagcagcctggccttcggcatcccccaggagccccagcgggagccccccaccaccagcgctgctgctgccatgagctgcaccggcagtgacaagggagatgagagccaggatgaggagaatgccagcagcagccaggccagcaccagcacagagaggagcctgaaggacagcctgaccaggaagaccaagatgctggtgcagttcctgctgtacaagtacaagatgaaggagcccaccaccaaggccgagatgctgaagatcatcagcaagaagtacaaggagcacttccctgagatcttcaggaaggtgtcccagaggacagagctggtgtttggcctggccctgaaggaggtgaaccccaccacccacagctacatcctggtgtccatgctgggccccaatgatggcaaccagagcagcgcctggaccctgcccagaaatggcctgctgatgcccctgctgagcgtcatcttcctgaatggaaactgtgcccgggaggaggagatctgggagttcctgaacatgctgggcatctatgatggcaagaggcacctgatctttggagagcccaggaagctgatcacccaggacctggtgcaggagaagtacctggagtaccagcaggtgcccaacagcgaccccccacgctaccagttcctgtggggcccccgggcccacgccgagaccagcaagatgaaggtgctggagttcctggccaaggtgaatgacaccacccccaacaacttccccctgctgtatgaggaggccctgagagatgaggaggagagagctggggcccggccccgggtggccgcccggcggggcaccacagccatgaccagcgcctacagccgggccaccagcagcagcagcagccagcccatgtag

SEQ ID NO: 159282 - DNA, 828 bp, synthetic construct
  misc_feature 1..828: note = Description of Artificial Sequence: Synthetic coding sequence
  source 1..828: mol_type = other DNA
atgaccagcgctggggtcttcaatgccggcagtgatgagcgggccaacagcagagatgaggagtacccctgcagcagcgaggtgagccccagcacagagagcagctgcagcaacttcatcaacatcaaggtgggcctgctggagcagttcctgctgtacaagttcaagatgaagcagaggatcctgaaggaggacatgctgaagatcgtgaacccccgctaccagaaccagtttgctgagatccacagaagagccagcgagcacatcgaggtggtgtttgctgtggacctgaaggaggtgaaccccacctgccacctgtatgacctggtgtccaagctgaagctgcccaacaacggccgcatccacgtgggcaaggtgctgcccaagacaggcctgctgatgaccttcctggtggtgatcttcctgaagggcaactgtgccaacaaggaggacacctggaagttcctggacatgatgcagatctatgatggcaagaagtactacatctacggggagcccaggaagctgatcacccaggactttgtgcggctgacctacctggagtaccaccaggtgccctgcagctacccagcccactaccagttcctgtggggcccccgggcctacacagagaccagcaagatgaaggtgctggagtacctggccaaggtgaatgacatcgcccctggggccttcagcagccagtatgaggaggccctgcaggatgaggaggagagccccagccagcgctgcagcaggaactggcactactgcagcggccaggactgcctgcgggccaagttcagcagcttcagccagccctactag

SEQ ID NO: 159283 - DNA, 1224 bp, synthetic construct
  misc_feature 1..1224: note = Description of Artificial Sequence: Synthetic coding sequence
  source 1..1224: mol_type = other DNA
atgccccggggccacaagagcaagctgcggacctgtgagaagaggcaggagaccaacggccagccccagggcctgaccggcccccaggccacagctgagaagcaggaggagagccacagcagcagcagcagcagccgggcctgcctgggggactgcagaagaagcagtgatgccagcatcccccaggagagccagggcgtgagccccaccggcagcccagatgctgtggtgtcctacagcaagagtgatgtggccgccaacggccaggatgagaagagccccagcaccagcagagatgcctctgtgccccaggagagccagggcgccagccccaccggcagcccagatgctggggtgtctggcagcaaatatgatgtggccgccaacggccaggatgagaagagccccagcaccagccatgatgtgtctgtgccccaggagagccagggcgccagccccaccggcagcccagatgctggggtgtctggcagcaaatatgatgtggccgcagaaggagaagatgaggagagcgtgtctgccagccagaaggccatcatcttcaagaggctgagcaaggatgctgtgaagaagaaggcctgcaccctggcccagttcctgcagaagaagtttgagaagaaggagagcatcctgaaggctgacatgctgaagtgtgtgcggcgggagtacaagccctacttcccccagatcctgaacagaaccagccagcacctggtggtggccttcggcgtggagctgaaggagatggacagcagcggggagagctacaccctggtgtccaagctgggcctgcccagcgagggcatcctgagcggggacaatgccctgcccaagagcggcctgctgatgagcctgctggtggtgatcttcatgaatggaaactgtgccacagaggaggaggtgtgggagttcctgggcctgctgggcatctatgatggcatcctgcacagcatctatggagatgccaggaagatcatcacagaggacctggtgcaggacaagtatgtggtgtaccggcaggtgtgcaacagcgaccccccctgctatgagttcctgtggggcccccgggcctatgcagagaccaccaagatgagggtgctgcgggtgctggccgacagcagcaacaccagccctggcctgtacccccacctgtatgaagatgccctgattgatgaggtggagcgggccctgcggctgcgggcctag

SEQ ID NO: 159284 - DNA, 3429 bp, synthetic construct
  misc_feature 1..3429: note = Description of Artificial Sequence: Synthetic coding sequence
  source 1..3429: mol_type = other DNA
atgggagacaaggacatgcccacagctggcatgcccagcctgctgcagagcagcagcgagagcccccagagctgcccagaaggagaggacagccagagccccctgcagatcccccagagcagccctgagagtgatgacaccctgtaccccctgcagagcccccagagccgctcagaaggagaggacagcagtgaccccctgcagaggcctcctgagggcaaggacagccagagccccctgcagatcccccagagcagcccagaaggagatgacacccagagccccctgcagaacagccagagcagccctgagggcaaggacagcctgagccccctggagatcagccagagccccccagagggggaggatgtgcagagccccctgcagaacccagccagcagcttcttcagcagcgccctgctgagcatcttccagagcagccctgagagcacccagagcccctttgagggcttcccccagagcgtgctgcagatccctgtgtctgctgccagcagcagcaccctggtgtccatcttccagagcagccctgagagcacccagagcccctttgagggcttcccccagagccccctgcagatccctgtgagccgctccttcagcagcaccctgctgagcatcttccagagcagccctgagaggacccagagcacctttgagggctttgcccagagccccctgcagatccctgtgagccccagcagcagcagcaccctgctgagcctcttccagagcttcagcgagaggacccagagcacctttgagggctttgcccagagcagcctgcagatccctgtgagccccagcttcagcagcaccctggtgtccctcttccagagcagccctgagaggacccagagcacctttgagggcttcccccagagccccctgcagatccctgtgagcagcagcagcagcagcaccctgctgagcctcttccagagcagccctgagaggacccacagcacctttgagggcttcccccagagcctgctgcagatccccatgaccagcagcttcagcagcaccctgctgagcatcttccagagcagccctgagagcgcccagagcacctttgagggcttcccccagagccccctgcagatccctggcagccccagcttcagcagcaccctgctgagcctcttccagagcagccctgagaggacccacagcacctttgagggcttcccccagagccccctgcagatccccatgaccagcagcttcagcagcaccctgctgagcatcctgcagagcagccctgagagcgcccagagcgcctttgagggcttcccccagagccccctgcagatccctgtgagcagcagcttctcctacaccctgctgagcctcttccagagcagccctgagaggacccacagcacctttgagggcttcccccagagccccctgcagatccctgtgagcagcagcagcagcagcagcaccctgctgagcctcttccagagcagccctgagtgcacccagagcacctttgagggcttcccccagagccccctgcagatcccccagagccccccagagggggagaacacccacagccccctgcagatcgtgcccagcctgcctgagtgggaggacagcctgagcccccactacttcccccagagccccccccagggcgaggacagcctgagcccccactacttcccccagagccccccccagggcgaggacagcctgagcccccactacttcccccagagcccccagggcgaggacagcctgagcccccactacttcccccagagccccccccagggagaagattccatgagccccctgtacttcccccagagccccctgcagggcgaggagttccagagcagcctgcagagccctgtgtccatctgcagcagcagcacccccagcagcctgccccagagcttccctgagagcagccagagccccccagagggccctgtgcagagccccctgcacagcccccagagccccccagagggcatgcacagccagagccccctgcagagccctgagagcgcccctgagggggaggacagcctgagccccctgcagatcccccagagccccctggagggggaggacagcctgagcagcctgcacttcccccagagccccccagagtgggaggacagcctgagccccctgcacttcccccagttccccccccagggcgaggacttccagagcagcctgcagagccctgtgtccatctgcagcagcagcaccagcctgagcctgccccagagcttccctgagagcccccagagccccccagagggccctgcccagagccccctgcagaggcctgtgtcctccttcttctcctacaccctggccagcctgctgcagagcagccatgagagcccccagagccccccagagggccctgcccagagccccctgcagagccctgtgagcagcttccccagcagcaccagcagcagcctgagccagagcagccctgtgtcctccttccccagcagcaccagcagcagcctgagcaagagcagccctgagagccccctgcagagccctgtgatctccttcagcagcagcaccagcctgagccccttcagcgaggagagcagcagccctgtggatgagtacaccagcagcagtgacaccctgctggagagtgacagcctgacagacagcgagagcctcatcgagagcgagcccctcttcacctacaccctggatgagaaggtggatgagctggcccgcttcctgctgctgaagtaccaggtgaagcagcccatcaccaaggccgagatgctgaccaacgtcatcagccgctacacaggctacttccctgtgatcttcaggaaggcccgggagttcatcgagatcctgtttggcatcagcctgcgggaggtggaccctgatgacagctatgtgtttgtgaacaccctggacctgaccagcgagggctgcctgagtgatgagcagggcatgagccagaaccggctgctgatcctgatcctgagcatcatcttcatcaagggcacctacgccagcgaggaggtgatctgggatgtgctgagcggcatcggcgtgcgggccggccgggagcactttgcctttggagagccccgggagctgctgaccaaggtgtgggtgcaggagcactacctggagtaccgggaggtgcccaacagcagcccccccaggtatgagttcctgtggggcccccgggcccacagcgaggtgatcaagaggaaggtggtggagttcctggccatgctgaagaacacagtgcccatcaccttccccagcagctacaaggatgccctgaaggatgtggaggagcgggcccaggccatcatcgacaccacagatgacagcacagccacagaaagtgccagcagctctgtgatgagccccagcttcagcagcgagtag

SEQ ID NO: 159285 - DNA, 354 bp, synthetic construct
  misc_feature 1..354: note = Description of Artificial Sequence: Synthetic coding sequence
  source 1..354: mol_type = other DNA
ggggacaaggacatgcccacagctggcatgcccagcctgctgcagagcagcagcgagagcccccagagctgcccagagggggaggacagccagagccccctgcagatccctgtgagccccagcagcagcagcaccctgctgagcctcttccagagcttcagcgagaggacccagagcacctttgagggctttgcccagagcagcctgcagatccctgtgagccccagcttcagcagcaccctggtgtccctcttccagagcagccctgagaggacccagagcacctttgagggcttcccccagagccccctgcagatccctgtgagcagcagcagcagcagcaccctgctgtag

SEQ ID NO: 159286 - DNA, 357 bp, synthetic construct
  misc_feature 1..357: note = Description of Artificial Sequence: Synthetic coding sequence
  source 1..357: mol_type = other DNA
atgggagacaaggacatgcccacagctggcatgcccagcctgctgcagagcagcagcgagagcccccagagctgcccagaaggagaggacagccagagccccctgcagatccctgtgagccccagcagcagcagcaccctgctgagcctcttccagagcttcagcgagaggacccagagcacctttgagggctttgcccagagcagcctgcagatccctgtgagccccagcttcagcagcaccctggtgtccctcttccagagcagccctgagaggacccagagcacctttgagggcttcccccagagccccctgcagatccctgtgagcagcagcagcagcagcaccctgctgtag

SEQ ID NO: 159287 - DNA, 630 bp, synthetic construct
  misc_feature 1..630: note = Description of Artificial Sequence: Synthetic coding sequence
  source 1..630: mol_type = other DNA
atgctgaccaacgtcatcagccgctacacaggctacttccctgtgatcttcaggaaggcccgggagttcatcgagatcctgtttggcatcagcctgcgggaggtggaccctgatgacagctatgtgtttgtgaacaccctggacctgaccagcgagggctgcctgagtgatgagcagggcatgagccagaaccggctgctgatcctgatcctgagcatcatcttcatcaagggcacctacgccagcgaggaggtgatctgggatgtgctgtctggaattggagtgcgggccggccgggagcactttgccttcggggagccccgggagctgctgaccaaggtgtgggtgcaggagcactacctggagtaccgggaggtgcccaacagcagccccccaagatatgagttcctgtggggcccccgggcccacagcgaggtgatcaagaggaaggtggtggagttcctggccatgctgaagaacacagtgcccatcaccttccccagcagctacaaggatgccctgaaggatgtggaggagcgggcccaggccatcatcgacaccacagatgacagcacagccacagagagcgccagcagctctgtgatgagccccagcttcagcagcgagtag

SEQ ID NO: 159288 - DNA, 1122 bp, synthetic construct
  misc_feature 1..1122: note = Description of Artificial Sequence: Synthetic coding sequence
  source 1..1122: mol_type = other DNA
atgcctcctgtgcctggggtgcccttcagaaatgtggacaatgacagccccacctctgtggagctggaggactgggtggatgcccagcaccccacagatgaggaggaggaggaggccagcagcgccagcagcaccctgtacctggtgttcagccccagcagcttcagcaccagcagcagcctcatcctgggcggccctgaggaggaggaggtgcccagcggggtcatccccaacctgacagagagcatccccagcagccccccccagggccccccccagggccccagccagagccccctgagcagctgctgcagcagcttctcctggagcagcttcagcgaggagagcagcagccagaagggggaggacaccggcacctgccagggcctgcctgattctgagagcagcttcacctacaccctggatgagaaggtggccgagctggtggagttcctgctgctgaagtatgaggccgaggagcctgtgacagaagctgagatgctgatgatcgtcatcaagtacaaggactacttccctgtgatcctgaagagggcccgggagttcatggagctgctgtttggcctggccctgattgaggtgggccctgaccacttctgtgtgtttgccaacacagtgggcctgacagatgagggcagtgatgatgagggcatgcctgagaacagcctgctgatcatcatcctgagcgtcatcttcatcaagggcaactgtgccagcgaggaggtgatctgggaggtgctgaatgctgtgggcgtgtatgccggccgggagcactttgtgtatggagagccccgggagctgctgaccaaggtgtgggtgcagggccactacctggagtaccgggaggtgccccacagcagccccccctactatgagttcctgtggggcccccgggcccacagcgagagcatcaagaagaaggtgctggagttcctggccaagctgaacaacacagtgcccagcagcttccccagctggtacaaggatgccctgaaggatgtggaggagcgggtgcaggccaccatcgacacagcagatgatgccaccgtgatggccagcgagagcctgtctgtgatgagcagcaatgtgtccttcagcgagtag

SEQ ID NO: 159289 - DNA, 1932 bp, synthetic construct
  misc_feature 1..1932: note = Description of Artificial Sequence: Synthetic coding sequence
  source 1..1932: mol_type = other DNA
atgctgctgccctgccactgggtgctggatgccaccttcagtgatggcagcctgggccagtgggtgaagaacacctgtgccacctacgccctgagccctgtggtgctgcccccccagccccagcccaggaagaaggccacagacaaggactacagcgccttccacctgggccacctgcgggaggtgcggctcttcctgcggggcggcaccagtgaccagaggatggacagcctggtgctgtgccccacctacttcaagctgtggaggaccctgagcggcagccctggcctgcagctgagtgacctgcacttcggcagccagcctgagggcaagttcagcctgcggcgggctgtgtctgtgaagcagcgggaggagccccaggactggcccctgaatgagaagaggaccctgtggaaggacagcgacctgcccacctggaggcggggcaccggctacaccctgagcctgcctgctgtgtccccaggcaagaggctgtggggcgagaaggccggcagcctgcctgagagcgagcccctcttcacctacaccctggatgagaaggtggacaagctggtgcagttcctgctgctgaagtaccaggccaaggagcccctgaccagggctgagatgcagatgaatgtcatcaacacctacacaggctacttccccatgatcttcaggaaggcccgggagttcatcgagatcctgtttggcatcagcctgacagaggtggaccctgaccacttctacgtgtttgtgaacaccctggacctgacctgtgagggcagcctgagtgatgagcagggcatgccccagaaccggctgctgatcctgatcctgagcgtcatcttcatcaagggcaactgtgccagcgaggaggtgatctgggaggtgctgaatgccatcggcccctggagcgccctggccggctttgctgatgtgctgagccggctggccctgtgggagagcgagggccctgaggccttctgtgaggagagcggcctgcggtctgctgagggctctgtgctggacctggccaacccccagggcctggccggccaccggcaggaggatggccggcggggcctgacagaggccagcccccagcagaagaagggaggagaagatgaggacatgcctgctgctggcatgccacccctgccccagagccccccagagatccccccccagggcccccccaagatcagcccccagggccccccccagagccccccccagagccccctggacagctgcagcagccccctgctgtggacccggctggatgaggagagcagcagcgaggaggaggacacagccacctggcacgccctgcctgagagcgagagcctgcccaggtatgccctggatgagaaggtggccgagctggtgcagttcctgctgctgaagtaccagaccaaggagcctgtgaccaaggccgagatgctgaccaccgtcatcaagaagtacaaggactacttccccatgatctttgggaaggcccacgagttcatcgagctgatctttggaattgccctgacagacatggaccctgacaaccacagctacttctttgaggacaccctggacctgacctatgagggcagcctgattgatgaccagggcatgcccaagaactgcctgctgatcctgatcctgtccatgatcttcatcaagggcagctgtgtgcctgaggaggtgatctgggaggtgctgagcgccatcggccccatccagaggcctgcccgggaggtgctggagttcctgagcaagctgagcagcatcatccccagcgccttccccagctggtacatggatgccctgaaggacatggaggaccgggcccaggccatcatcgacaccacagatgatgccacagccatggccagcgccagccccagcgtgatgagcaccaacttctgcccagagtag

SEQ ID NO: 159290 - DNA, 801 bp, synthetic construct
  misc_feature 1..801: note = Description of Artificial Sequence: Synthetic coding sequence
  source 1..801: mol_type = other DNA
atgcctgctgctggcatgccacccctgccccagagccccccagagatccccccccagggcccccccaagatcagcccccagggccccccccagagccccccccagagccccctggacagctgcagcagccccctgctgtggacccggctggatgaggagagcagcagcgaggaggaggacacagccacctggcacgccctgcctgagagcgagagcctgcccaggtatgccctggatgagaaggtggccgagctggtgcagttcctgctgctgaagtaccagaccaaggagcctgtgaccaaggccgagatgctgaccaccgtcatcaagaagtacaaggactacttccccatgatctttgggaaggcccacgagttcatcgagctgatctttggaattgccctgacagacatggaccctgacaaccacagctacttctttgaggacaccctggacctgacctatgagggcagcctgattgatgaccagggcatgcccaagaactgcctgctgatcctgatcctgtccatgatcttcatcaagggcagctgtgtgcctgaggaggtgatctgggaggtgctgagcgccatcggcgtgtgtgccggccgggagcacttcatctacggggaccccaggaagctgctgaccatccactgggtgcagaggaagtacctggagtaccgggaggtgcccaacagcgccccacccaggtatgagttcctgtggggcccccgggcccacagcgaggccagcaagaggagcctgcgggtcttcatccaggccatccagtaccacccctag

SEQ ID NO: 159291 - DNA, 381 bp, synthetic construct
  misc_feature 1..381: note = Description of Artificial Sequence: Synthetic coding sequence
  source 1..381: mol_type = other DNA
atggacaccggccagctgcagctgagccgggagaggagccctggggccggccagcaggcccggcgggagctgtgtggccgcatcgccatcagccagcacggcggcaaggcccaggccagccccagccacagcctgctgagccccctggacaagacagatggagagccctggagcgccctggccggctttgctgatgtgctgagccggctggccctgtgggagagcgagggccctgaggccttctgtgaggagagcggcctgcggtctgctgagggctctgtgctggacctggccaacccccagggcaagggccccaagggggagctgcgggactttgcccccaggacagaggaggcccctgtgtgcccagccctgccctag

SEQ ID NO: 159292 - DNA, 1041 bp, synthetic construct
  misc_feature 1..1041: note = Description of Artificial Sequence: Synthetic coding sequence
  source 1..1041: mol_type = other DNA
atgcccctcttccccaacctgccccggctgagctttgaggaggacttccagaaccccagcgtgacagaggacctggtggatgcccaggacagcattgatgaggaggaggaggatgccagcagcaccagcagcagcagcttccacttcctgttccccagcagcagcagcctgagcagcagcagccccctgagcagccccctgcccagcaccctcatcctgggcgtgcctgaagatgaggacatgcctgctgctggcatgccacccctgccccagagccccccagagatccccccccagggcccccccaagatcagcccccagggccccccccagagccccccccagagccccctggacagctgcagcagccccctgctgtggacccggctggatgaggagagcagcagcgaggaggaggacacagccacctggcacgccctgcctgagagcgagagcctgcccaggtatgccctggatgagaaggtggccgagctggtgcagttcctgctgctgaagtaccagaccaaggagcctgtgaccaaggccgagatgctgaccaccgtcatcaagaagtacaaggactacttccccatgatctttgggaaggcccacgagttcatcgagctgatctttggaattgccctgacagacatggaccctgacaaccacagctacttctttgaggacaccctggacctgacctatgagggcagcctgattgatgaccagggcatgcccaagaactgcctgctgatcctgatcctgtccatgatcttcatcaagggcagctgtgtgcctgaggaggtgatctgggaggtgctgagcgccatcggcgtgtgtgccggccgggagcacttcatctacggggaccccaggaagctgctgaccatccactgggtgcagaggaagtacctggagtaccgggaggtgcccaacagcgccccacccaggtatgagttcctgtggggcccccgggcccacagcgaggccagcaagaggagcctgcgggtcttcatccaggccatccagtaccacccctag

SEQ ID NO: 159293 - DNA, 1041 bp, synthetic construct; identical to SEQ ID NO: 159292
  misc_feature 1..1041: note = Description of Artificial Sequence: Synthetic coding sequence
  source 1..1041: mol_type = other DNA

SEQ ID NO: 159294 - DNA, 2337 bp, synthetic construct
  misc_feature 1..2337: note = Description of Artificial Sequence: Synthetic coding sequence
  source 1..2337: mol_type = other DNA
atggcccagaagatggactgtggggccggcctgctgggcttccaggccgaggcctctgtggaggacagcgccctgctgatgcagaccctgatggaggccatccagatcagcgaggccccacccaccaaccaggccacagctgctgccagcccccagagcagccagcccccaacagccaatgagatggctgacatccaggtgtctgctgctgctgcccggcccaagagcgccttcaaggtgcagaatgccaccaccaagggccccaatggagtgtatgacttcagccaggcccacaatgccaaggatgtgcccaacacccagcccaaggccgccttcaagagccagaatgccacccccaagggccccaatgctgcctatgacttcagccaggccgccaccaccggggagctggccgccaacaagtctgagatggccttcaaggcccagaatgccaccaccaaggtgggccccaatgccacctacaacttcagccagagcctgaatgccaatgacctggccaacagccggcccaagacccccttcaaggcctggaatgacaccaccaaggcccccacagctgacacccagacccagaatgtgaaccaggccaagatggccaccagccaggccgacatcgagacagaccccggcatcagcgagccagatggagccacagcccagaccagcgcagatggcagccaggcccagaacctggagagcaggaccatcatccggggcaagaggaccaggaagatcaacaacctgaatgtggaggagaacagcagcggggaccagaggcgggcccccctggccgccggcacctggaggtctgcccctgtgcctgtgaccacccagaaccccccaggggcccccccaaatgtgctgtggcagacccccctggcctggcagaaccccagcggctggcagaaccagacagcccggcagaccccaccagcccggcagagccccccagcccggcagaccccaccagcctggcagaaccctgtggcctggcagaaccctgtgatctggcccaaccctgtgatctggcagaaccctgtgatctggcccaaccccatcgtgtggccaggccctgtggtgtggcccaaccccctggcctggcagaaccccccaggctggcagaccccacctggctggcagaccccacctggctggcagggccccccagactggcagggccccccagactggcccctgcccccagactggcccctgcccccagactggcccctgcccacagactggcccctgcccccagactggatcccagctgactggcccatccccccagactggcagaacctgcggcccagccccaacctgcggcccagccccaacagccgggccagccagaaccctggggccgcccagcccagagatgtggccctgctgcaggagcgggccaacaagctggtgaagtacctgatgctgaaggactacaccaaggtgcccatcaagaggtctgagatgctgcgggacatcatccgggagtacacagatgtgtacccagagatcatcgagcgggcctgctttgtgctggagaagaagtttggcatccagctgaaggagattgacaaggaggagcacctgtacatcctgatcagcaccccagagagcctggccggcatcctgggcaccaccaaggacacccccaagctgggcctgctgctggtgatcctgggcgtcatcttcatgaatggaaacagagccagcgaggccgtgctgtgggaggccctgaggaagatgggcctgcggcctggggtgcgccaccccctgctgggggacctgaggaagctgctgacctatgaatttgtgaagcagaagtacctggactaccgccgggtgcccaacagcaaccccccagaatatgagttcctgtggggcctgcggagctaccacgagaccagcaagatgaaggtgctgcgcttcatcgccgaggtgcagaagagggacccccgggactggacagcccagttcatggaggccgcagatgaggccctggatgccctggatgctgctgctgctgaggccgaggcccgggcagaggcccggaccaggatgggcattggagatgaggccgtgtctggcccctggagctgggatgacatcgagtttgagctgctgacctgggatgaggagggggactttggagacccctggagccgcatccccttcaccttctgggcccgctaccaccagaatgcccggagccgcttcccccagacctttgctggccccatcatcggccctgggggcacagccagcgccaactttgctgccaactttggagccatcggcttcttctgggtggagtag

SEQ ID NO: 159295 - DNA, 2505 bp, synthetic construct
  misc_feature 1..2505: note = Description of Artificial Sequence: Synthetic coding sequence
  source 1..2505: mol_type = other DNA
atggcccagaagatggactgtggggccggcctgctgggcttccagaacccagatgcctgcagagctgtgtgccaccccctgccccagcccccagccagcaccctgcccctgagcgccttccccaccctgtgtgaccccccctacagccagctgcgggaccccccagctgtgctgagctgctactgcacccccctgggcgccagccctgccccagctgaggcctctgtggaggacagcgccctgctgatgcagaccctgatggaggccatccagatcagcgaggccccacccaccaaccaggccacagctgctgccagcccccagagcagccagcccccaacagccaatgagatggctgacatccaggtgtctgctgctgctgcccggcccaagagcgccttcaaggtgcagaatgccaccaccaagggccccaatggagtgtatgacttcagccaggcccacaatgccaaggatgtgcccaacacccagcccaaggccgccttcaagagccagaatgccacccccaagggccccaatgctgcctatgacttcagccaggccgccaccaccggggagctggccgccaacaagtctgagatggccttcaaggcccagaatgccaccaccaaggtgggccccaatgccacctacaacttcagccagagcctgaatgccaatgacctggccaacagccggcccaagacccccttcaaggcctggaatgacaccaccaaggcccccacagctgacacccagacccagaatgtgaaccaggccaagatggccaccagccaggccgacatcgagacagaccccggcatcagcgagccagatggagccacagcccagaccagcgcagatggcagccaggcccagaacctggagagcaggaccatcatccggggcaagaggaccaggaagatcaacaacctgaatgtggaggagaacagcagcggggaccagaggcgggcccccctggccgccggcacctggaggtctgcccctgtgcctgtgaccacccagaaccccccaggggcccccccaaatgtgctgtggcagacccccctggcctggcagaaccccagcggctggcagaaccagacagcccggcagaccccaccagcccggcagagccccccagcccggcagaccccaccagcctggcagaaccctgtggcctggcagaaccctgtgatctggcccaaccctgtgatctggcagaaccctgtgatctggcccaaccccatcgtgtggccaggccctgtggtgtggcccaaccccctggcctggcagaaccccccaggctggcagaccccacctggctggcagaccccacctggctggcagggccccccagactggcagggccccccagactggcccctgcccccagactggcccctgcccccagactggcccctgcccacagactggcccctgcccccagactggatcccagctgactggcccatccccccagactggcagaacctgcggcccagccccaacctgcggcccagccccaacagccgggccagccagaaccctggggccgcccagcccagagatgtggccctgctgcaggagcgggccaacaagctggtgaagtacctgatgctgaaggactacaccaaggtgcccatcaagaggtctgagatgctgcgggacatcatccgggagtacacagatgtgtacccagagatcatcgagcgggcctgctttgtgctggagaagaagtttggcatccagctgaaggagattgacaaggaggagcacctgtacatcctgatcagcaccccagagagcctggccggcatcctgggcaccaccaaggacacccccaagctgggcctgctgctggtgatcctgggcgtcatcttcatgaatggaaacagagccagcgaggccgtgctgtgggaggccctgaggaagatgggcctgcggcctggggtgcgccaccccctgctgggggacctgaggaagctgctgacctatgaatttgtgaagcagaagtacctggactaccgccgggtgcccaacagcaaccccccagaatatgagttcctgtggggcctgcggagctaccacgagaccagcaagatgaaggtgctgcgcttcatcgccgaggtgcagaagagggacccccgggactggacagcccagttcatggaggccgcagatgaggccctggatgccctggatgctgctgctgctgaggccgaggcccgggcagaggcccggaccaggatgggcattggagatgaggccgtgtctggcccctggagctgggatgacatcgagtttgagctgctgacctgggatgaggagggggactttggagacccctggagccgcatccccttcaccttctgggcccgctaccaccagaatgcccggagccgcttcccccagacctttgctggccccatcatcggccctgggggcacagccagcgccaactttgctgccaactttggagccatcggcttcttctgggtggagtag

SEQ ID NO: 159296 - DNA, 2337 bp, synthetic construct; identical to SEQ ID NO: 159294
  misc_feature 1..2337: note = Description of Artificial Sequence: Synthetic coding sequence
  source 1..2337: mol_type = other DNA

SEQ ID NO: 159297 - DNA, 2337 bp, synthetic construct; identical to SEQ ID NO: 159294
  misc_feature 1..2337: note = Description of Artificial Sequence: Synthetic coding sequence
  source 1..2337: mol_type = other DNA

SEQ ID NO: 159298 - DNA, 414 bp, synthetic construct
  misc_feature 1..414: note = Description of Artificial Sequence: Synthetic coding sequence
  source 1..414: mol_type = other DNA
atggcccagaagatggactgtggggccggcctgctgggcttccaggccgaggcctctgtggaggacagcgccctgctgatgcagaccctgatggaggccatccagatcagcgaggccccacccaccaaccaggccacagctgctgccagcccccagagcagccagcccccaacagccaatgagatggctgacatccaggtgtctgctgctgctgcccggcccaagagcgccttcaaggtgcagaatgccaccaccaagggccccaatggagtgtatgacttcagccagagcctgaatgccaatgacctggccaacagccggcccaagacccaggtgtccctgaacctgactgtgcagctgcaccgccaccagcagatggtgccccggctgcgcatctggagccctggccagtag

SEQ ID NO: 159299 - DNA, 3942 bp, synthetic construct
  misc_feature 1..3942: note = Description of Artificial Sequence: Synthetic coding sequence
  source 1..3942: mol_type = other DNA
atgagcggctggagatacctgatctgtgtgtccttcctgctgaccatcctgctggagctgacctaccagggcccccctgtgcctgccagcagcagcaccaagctgctgatgaccagctacagcatgaggagcacagtggtgagccgctatgcccacaccctggtgacctctgtgctcttcaacccccacgccgaggcccacgaggccatctttgacctggacctgccccacctggccttcatcagcaacttcaccatgaccatcaacaacaaggtgtacatcgccgaggtgaaggagaagcaccaggccaagaagatctatgaggaggcccaccagcagggcaagacagctgcccacgtgggcatccgggaccgggagagcgagaagttccgcatcagcaccagcctggccgccggcacagaggtgaccttcagcctggcctatgaggagctgctgcagaggcaccagggccagtaccagctggtggtgtccctgcggcccggccagctggtgaagaggctgagcattgaggtgacagtgtctgagaggacaggcatctcctatgtgcacatcccccccctgaggacaggccgcctgcggaccaatgcccacgccagcgaggtggacagcccccccagcacccgcatcgagcggggggagacctgtgtgcgcatcacctactgccccaccctgcaggaccagagcagcatcagcggcagcggcatcatggctgacttcctggtgcagtatgatgtggtgatggaggacatcattggagatgtgcagatctatgatgactacttcatccactactttgccccccggggcctgccccccatggagaagaatgtggtgtttgtgattgatgtgagcagctccatgtttggcaccaagatggagcagaccaagacagccatgaatgtcatcctgagtgacctgcaggccaatgactacttcaacatcatctccttcagtgacacagtgaatgtgtggaaggccggcggcagcatccaggccaccatccagaatgtgcacagcgccaaggactacctgcactgcatggaggctgatggctggacagatgtgaacagcgccctgctggccgccgcctctgtgctgaaccacagcaaccaggagcccggccggggccccagcgtgggccgcatccccctcatcatcttcctgacagatggagagcccacagctggggtgaccacccccagcgtcatcctgagcaatgtgcggcaggccctgggccaccgggtgtccctcttcagcctggcctttggagatgatgctgacttcaccctgctgcggcggctgagcctggagaacagaggcatcgcccggcgcatctatgaggacacagatgctgccctgcagctgaagggcctgtatgaggagatctccatgcccctgctggctgatgtgcggctgaactacctgggcggcctggtgggcgccagcccctgggccgtgttccccaactactttggaggcagcgagctggtggtggccggccaggtgcagcccgggaagcaggagctgggcatccacctggccgcccggggccccaaggaccagctgctggtggcccaccacagcgagggcgccaccaacaacagccagaaggccttcggctgccctggagagcccgccccaaatgtggcccacttcatccggcggctgtgggcctacgtgaccatcggggagctgctggatgcccacttccaggcccgggacaccaccaccaggcacctgctggccgccaaggtgctgaacctgagcctggagtacaactttgtgacccccctgaccagcctggtgatggtgcagcccaagcaggccagcgaggagacccggcggcagaccagcaccagcgctggccctgacaccatcatgcccagcagcagcagcagacatggcctgggcgtgtccacagcccagcctgccctggtgcccaaggtgatcagccccaagagcaggcctgtgaagcccaagttctacctgagcagcaccaccacagccagcaccaagaagatgctgagcagcaaggagctggagcccctgggggagagcccccacaccctgtccatgcccacctaccccaaggccaagatcccagcccagcaggacagcggcaccctggcccagcccaccctgcggaccaagcccaccatcctggtgcccagcaacagcggcaccctgctgcccctgaagccaggcagcctgagccaccagaacccagacatcctgcccaccaacagcaggacccaggtgccccctgtgaagccaggcatcccagccagccccaaggctgacacagtgaagtgtgtgacccccctgcacagcaagccaggggcccccagccacccccagctgggcgccctgaccagccaggcccccaagggcctgccccagagcaggcctggggtgtccaccctgcaggtgcccaagtaccccctgcacacccggccccgggtgcctgcccccaagaccaggaacaacatgccccacctgggccctggcatcctgctgagcaagacccccaagatcctgctgagcctgaagcccagcgccccaccccaccagatcagcaccagcatcagcctgagcaagccagagacccccaacccccacatgccccagacccccctgccccccaggccagaccggcccaggcctcccctgcctgagagcctgagcaccttccccaacaccatcagcagcagcacaggccccagcagcaccaccaccacctctgtgctgggggagcccctgcccatgcccttcacccccaccctgcccccaggccgcttctggcaccagtatgacctgctgcccggcccccagaggacccggcaggtgctgggccccagcaggcctggggtgcccaccatgagcctgctgaacagcagccggcccaccccagagggcagcccccccaacctgcccatcctgctgcccagcagcatcctgcctgaggccatcagcctgctgctgctgcctgaggagctggagctgctgtctgagagcatggtggagagcaagtttgtggagagcctgaaccccccagccttctacaccttcctgaccccagatgaagatggcagccccaactgggatggcaacagcgaggagatcctgggcggggccggcggctccatggagagccagggcagctctgtgggcctggccaagggcaccctgcccagcatcttcaccttcagcagctctgtggatggagacccccacttcgtcatccagatcccccacagcgaggagaagatctgcttcaccctgaatggccaccctggggacctgctgcagctgattgaggaccccaaggccggcctgcacgtgtctgggaagctgctgggcgccccaccccggcccggccacaaggaccagaccaggacctacttccagatcatcaccgtgaccacagacaagccccgggcctacaccatcaccatcagccgcagcagcatcagcctgcggggggagggcaccctgcggctgtcctgggaccagcctgccctgctgaagaggccccagctggagctgtatgtggccgccgccgcccggctgaccctgcggctgggcccctacctggagttcctggtgctgcggcaccgctaccgccaccccagcaccctgcagctgccccacctgggcttctacgtggccaatggaagtggcctgagccccagcgcccggggcctgattggccagttccagcacgccgacatccggctggtgacaggccccatgggcccctgcctgcggcggcaccacggcccagatgtgcctgtgatcctgggcaagaggctgctgaaggacagcccccggctgctgccccgctgggccagctgctggctggtgaagaggagccacgtggagctgctgctgggccacccctacctgtcctatgtgctgtag

SEQ ID NO: 159300 - DNA, 1767 bp, synthetic construct
  misc_feature 1..1767: note = Description of Artificial Sequence: Synthetic coding sequence
  source 1..1767: mol_type = other DNA
atgtctgacaccagcgagagcggggccggcctgacccgcttccaggccgaggccagcgagaaggacagcagctccatgatgcagaccctgctgactgtgacccagaatgtggaggtgcctgagacccccaaggccagcaaggccacagaggtgtccaagaccccagaggcccgggaggccccagccacccaggccagcagcaccacccagctgacagacacccaggtgctggccgctgagaacaagagcctggccgctgacaccaagaagcagaatgctgacccccaggccgtgaccatgcctgccacagagaccaagaaggtgagccacgtggccgacaccaaggtgaacaccaaggcccaggagacagaagctgcccccagccaggccccagcagatgagcctgagcctgagagcgctgctgcccagagccaggagaaccaggacacccggcccaaggtgaaggccaagaaggccaggaaggtgaagcacctggatggagaagaagatggcagcagtgaccagagccaggccagcggcaccaccggcggcagaagagtgtccaaggccctgatggcctccatggcccggcgggccagccggggccccatcgccttctgggcccggcgggccagcaggacccggctggccgcctgggcccggcgggccctgctgagcctgcggagccccaaggcccggcggggcaaggccaggagaagagctgccaagctgcagagcagccaggagcctgaggcccccccaccaagagatgtggccctgctgcagggccgggccaatgacctggtgaagtacctgctggccaaggaccagaccaagatccccatcaagagaagtgacatgctgaaggacatcatcaaggagtacacagatgtgtacccagagatcatcgagcgggccggctacagcctggagaaggtgtttggcatccagctgaaggagattgacaagaatgaccacctgtacatcctgctgagcaccctggagcccacagatgctggcatcctgggcaccaccaaggacagccccaagctgggcctgctgatggtgctgctgagcatcatcttcatgaatggaaacagaagcagcgaggccgtcatctgggaggtgctgaggaagctgggcctgcggcccggcatccaccacagcctgtttggagatgtgaagaagctgatcacagatgaatttgtgaagcagaagtacctggactatgcccgggtgcccaacagcaaccccccagaatatgagttcttctggggcctgcggagctactatgagaccagcaagatgaaggtgctgaagtttgcctgcaaggtgcagaagaaggaccccaaggagtgggccgcccagtaccgggaggccatggaggccgacctgaaggctgctgctgaggccgctgctgaggccaaggcccgggcagagatccgggccaggatgggcatcggcctgggctctgaaaatgctgctggcccctgcaactgggatgaagctgacatcggcccctgggccaaggcccgcatccaggccggggctgaggccaaggccaaggcccaggagagcggcagcgccagcactggagccagcaccagcaccaacaacagcgccagcgccagcgccagcaccagcggcggcttctctgctggggccagcctgacagccaccctgaccttcggcctgtttgctggcctgggcggggccggggccagcaccagcggcagcagcggggcctgtggcttctcctacaagtag

SEQ ID NO: 159301 - DNA, 1653 bp, synthetic construct
  misc_feature 1..1653: note = Description of Artificial Sequence: Synthetic coding sequence
  source 1..1653: mol_type = other DNA
atgtggaggagccagaggcaccggcggccccagagggtgtccaagaccccagaggcccgggaggccccagccacccaggccagcagcaccacccagctgacagacacccaggtgctggccgctgagaacaagagcctggccgctgacaccaagaagcagaatgctgacccccaggccgtgaccatgcctgccacagagaccaagaaggtgagccacgtggccgacaccaaggtgaacaccaaggcccaggagacagaagctgcccccagccaggccccagcagatgagcctgagcctgagagcgctgctgcccagagccaggagaaccaggacacccggcccaaggtgaaggccaagaaggccaggaaggtgaagcacctggatggagaagaagatggcagcagtgaccagagccaggccagcggcaccaccggcggcagaagagtgtccaaggccctgatggcctccatggcccggcgggccagccggggccccatcgccttctgggcccggcgggccagcaggacccggctggccgcctgggcccggcgggccctgctgagcctgcggagccccaaggcccggcggggcaaggccaggagaagagctgccaagctgcagagcagccaggagcctgaggcccccccaccaagagatgtggccctgctgcagggccgggccaatgacctggtgaagtacctgctggccaaggaccagaccaagatccccatcaagagaagtgacatgctgaaggacatcatcaaggagtacacagatgtgtacccagagatcatcgagcgggccggctacagcctggagaaggtgtttggcatccagctgaaggagattgacaagaatgaccacctgtacatcctgctgagcaccctggagcccacagatgctggcatcctgggcaccaccaaggacagccccaagctgggcctgctgatggtgctgctgagcatcatcttcatgaatggaaacagaagcagcgaggccgtcatctgggaggtgctgaggaagctgggcctgcggcccggcatccaccacagcctgtttggagatgtgaagaagctgatcacagatgaatttgtgaagcagaagtacctggactatgcccgggtgcccaacagcaaccccccagaatatgagttcttctggggcctgcggagctactatgagaccagcaagatgaaggtgctgaagtttgcctgcaaggtgcagaagaaggaccccaaggagtgggccgcccagtaccgggaggccatggaggccgacctgaaggctgctgctgaggccgctgctgaggccaaggcccgggcagagatccgggccaggatgggcatcggcctgggctctgaaaatgctgctggcccctgcaactgggatgaagctgacatcggcccctgggccaaggcccgcatccaggccggggctgaggccaaggccaaggcccaggagagcggcagcgccagcactggagccagcaccagcaccaacaacagcgccagcgccagcgccagcaccagcggcggcttctctgctggggccagcctgacagccaccctgaccttcggcctgtttgctggcctgggcggggccggggccagcaccagcggcagcagcggggcctgtggcttctcctacaagtag

SEQ ID NO: 159302 - DNA, 1821 bp, synthetic construct
  misc_feature 1..1821: note = Description of Artificial Sequence: Synthetic coding sequence
  source 1..1821: mol_type = other DNA
atgtctgacaccagcgagagcggggccggcctgacccgcttccaggccgaggccagcgagaaggacagcagctccatgatgcagaccctgctgactgtgacccagaatgtggaggtgcctgagacccccaaggccagcaaggccctggaggtgtctgaagatgtgaaggtgtccaaggccagcggcgtgtccaaggccacagaggtgtccaagaccccagaggcccgggaggccccagccacccaggccagcagcaccacccagctgacagacacccaggtgctggccgctgagaacaagagcctggccgctgacaccaagaagcagaatgctgacccccaggccgtgaccatgcctgccacagagaccaagaaggtgagccacgtggccgacaccaaggtgaacaccaaggcccaggagacagaagctgcccccagccaggccccagcagatgagcctgagcctgagagcgctgctgcccagagccaggagaaccaggacacccggcccaaggtgaaggccaagaaggccaggaaggtgaagcacctggatggagaagaagatggcagcagtgaccagagccaggccagcggcaccaccggcggcagaagagtgtccaaggccctgatggcctccatggcccggcgggccagccggggccccatcgccttctgggcccggcgggccagcaggacccggctggccgcctgggcccggcgggccctgctgagcctgcggagccccaaggcccggcggggcaaggccaggagaagagctgccaagctgcagagcagccaggagcctgaggcccccccaccaagagatgtggccctgctgcagggccgggccaatgacctggtgaagtacctgctggccaaggaccagaccaagatccccatcaagagaagtgacatgctgaaggacatcatcaaggagtacacagatgtgtacccagagatcatcgagcgggccggctacagcctggagaaggtgtttggcatccagctgaaggagattgacaagaatgaccacctgtacatcctgctgagcaccctggagcccacagatgctggcatcctgggcaccaccaaggacagccccaagctgggcctgctgatggtgctgctgagcatcatcttcatgaatggaaacagaagcagcgaggccgtcatctgggaggtgctgaggaagctgggcctgcggcccggcatccaccacagcctgtttggagatgtgaagaagctgatcacagatgaatttgtgaagcagaagtacctggactatgcccgggtgcccaacagcaaccccccagaatatgagttcttctggggcctgcggagctactatgagaccagcaagatgaaggtgctgaagtttgcctgcaaggtgcagaagaaggaccccaaggagtgggccgcccagtaccgggaggccatggaggccgacctgaaggctgctgctgaggccgctgctgaggccaaggcccgggcagagatccgggccaggatgggcatcggcctgggctctgaaaatgctgctggcccctgcaactgggatgaagctgacatcggcccctgggccaaggcccgcatccaggccggggctgaggccaaggccaaggcccaggagagcggcagcgccagcactggagccagcaccagcaccaacaacagcgccagcgccagcgccagcaccagcggcggcttctctgctggggccagcctgacagccaccctgaccttcggcctgtttgctggcctgggcggggccggggccagcaccagcggcagcagcggggcctgtggcttctcctacaagtag

SEQ ID NO: 159303 - DNA, 1821 bp, synthetic construct; identical to SEQ ID NO: 159302
  misc_feature 1..1821: note = Description of Artificial Sequence: Synthetic coding sequence
  source 1..1821: mol_type = other DNA

SEQ ID NO: 159304 - DNA, 1566 bp, synthetic construct
  misc_feature 1..1566: note = Description of Artificial Sequence: Synthetic coding sequence
  source 1..1566: mol_type = other DNA
atgtctgacaccagcgagagcggggccggcctgacccgcttccaggccgaggccagcgagaaggacagcagctccatgatgcagaccctgctgactgtgacccagaatgtggaggtgcctgagacccccaaggccagcagcaccacccagctgacagacacccaggtgctggccgctgagaacaagagcctggccgctgacaccaagaagcagaatgctgacccccaggccgtgaccatgcctgccacagagaccaagaaggtgagccacgtggccgacaccaaggtgaacaccaaggcccaggagacagaagctgcccccagccaggccccagcagatgagcctgagcctgagagcgctgctgcccagagccaggagaaccaggacacccggcccaaggtgaaggccaagaaggccaggaaggtgaagcacctggatggagaagaagatggcagcagtgaccagagccaggccagcggcaccaccggcggcagaagagtgtccaaggcccggcggcgggccgccaagctgcagagcagccaggagcctgaggcccccccaccaagagatgtggccctgctgcagggccgggccaatgacctggtgaagtacctgctggccaaggaccagaccaagatccccatcaagagaagtgacatgctgaaggacatcatcaaggagtacacagatgtgtacccagagatcatcgagagagctggctacagcctggagaaggtgtttggcatccagctgaaggagattgacaagaatgaccacctgtacatcctgctgagcaccctggagcccacagatgctggcatcctgggcaccaccaaggacagccccaagctgggcctgctgatggtgctgctgagcatcatcttcatgaatggaaacagaagcagcgaggccgtcatctgggaggtgctgaggaagctgggcctgcggcccggcatccaccacagcctgtttggagatgtgaagaagctgatcacagatgaatttgtgaagcagaagtacctggactatgcccgggtgcccaacagcaaccccccagaatatgagttcttctggggcctgcggagctactatgagaccagcaagatgaaggtgctgaagtttgcctgcaaggtgcagaagaaggaccccaaggagtgggccgcccagtaccgggaggccatggaggccgacctgaaggctgctgctgaggccgctgctgaggccaaggcccgggcagagatccgggccaggatgggcatcggcctgggctctgaaaatgctgctggcccctgcaactgggatgaggccgacatcggcccctgggccaaggcccgcatccaggccggggctgaggccaaggccaaggcccaggagagcggcagcgccagcactggagccagcaccagcaccaacaacagcgccagcgccagcgccagcaccagcggcggcttctctgctggggccagcctgacagccaccctgaccttcggcctgtttgctggcctgggcggggccggggccagcaccagcggcagcagcggggcctgtggcttctcctacaagtag

SEQ ID NO: 159305 - DNA, 1566 bp, synthetic construct; identical to SEQ ID NO: 159304
  misc_feature 1..1566: note = Description of Artificial Sequence: Synthetic coding sequence
  source 1..1566: mol_type = other DNA

SEQ ID NO: 159306 - DNA, 1821 bp, synthetic construct; identical to SEQ ID NO: 159302
  misc_feature 1..1821: note = Description of Artificial Sequence: Synthetic coding sequence
  source 1..1821: mol_type = other DNA

SEQ ID NO: 159307 - DNA, 1821 bp, synthetic construct; identical to SEQ ID NO: 159302
  misc_feature 1..1821: note = Description of Artificial Sequence: Synthetic coding sequence
  source 1..1821: mol_type = other DNA

SEQ ID NO: 159308 - DNA, 2220 bp, synthetic construct
  misc_feature 1..2220: note = Description of Artificial Sequence: Synthetic coding sequence
  source 1..2220: mol_type = other DNA
atggccgagggcagcttctctgtgcagagcgagagctacagcgtggaggacatggatgagggcagtgatgaggtgggggaggaggagatggtggagggcaatgactatgaggagtttggagccttcggcggctacggcaccctgaccagctttgacatccacatcctgcgggccttcggcagcctgggccctggcctgcgcatcctgagcaatgagccctgggagctggagaaccctgtgctggcccagaccctggtggaggccctgcagctggaccctgagaccctggccaatgaaacagctgcccgggccgccaacgtggcccgggctgctgccagcaacagagctgcccgggctgctgctgctgctgccaggacagccttcagccaggtggtggccagccaccgggtggccaccccccaggtgtctggagaggacacccagcccaccacctatgctgctgaggcccagggccccaccccagagccccccctggccagcccccagaccagccagatgctggtgaccagcaagatggccgcccctgaggccccagccaccagcgcccagagccagacaggcagccctgcccaggaggccgccacagagggccccagcagcgcctgtgccttcagccaggccccctgtgcccgggaggtggatgccaaccggcccagcacagccttcctgggccagaatgatgtgtttgacttcacccagcctgctggggtgtctggcatggccttcccccggcccaagaggcctgccccagcccaggaggccgccacagagggccccagcgctgccagcggcgtgccccagacaggccctggccgggaggtggccgccacccggcccaagaccaccaagagcggcaaggccctggccaagacccgctgggtggagccccagaatgtggtggccgctgctgctgccaaggccaagatggccaccagcatccctgagcctgagggcgctgctgctgccacagcccagcacagcgctgagccctgggccaggatgggcggcaagaggaccaagaagagcaagcacctggatgatgaatatgagagcagcgaggaggagcgggagaccccagctgtgccccccacctggagggccagccagcccagcctgactgtgcgggcccagctggcccccaggcctcccatggcccccaggagccagatccccagcagacatgtgctgtgcctgcccccaagaaatgtgaccctgctgcaggagcgggccaacaagctggtgaagtacctgatgatcaaggactacaagaagatccccatcaagagagctgacatgctgaaggatgtgatccgggagtatgatgagcacttccctgagatcatcgagcgggccacctacaccctggagaagaagtttggcatccacctgaaggagattgacaaggaggagcacctgtacatcctggtgtgcacccgggacagcagcgcccggctgctgggcaagaccaaggacaccccccggctgagcctgctgctggtgatcctgggcgtcatcttcatgaatggaaacagagccagcgaggccgtgctgtgggaggccctgaggaagatgggcctgcggcctggggtgcgccaccccttcctgggggacctgaggaagctgatcacagatgactttgtgaagcagaagtacctggagtacaagaagatccccaacagcaaccccccagaatatgagttcctgtggggcctgcgggcccggcatgagaccagcaagatgagggtgctgcgcttcatcgcccagaaccagaacagagacccccgggagtggaaggcccacttcctggaggccgtggatgatgccttcaagaccatggatgtggacatggccgaggagcacgcccgggcccagatgagggcccagatgaacattggagatgaggccctgattggccgctggagctgggatgacatccaggtggagctgctgacctgggatgaagatggagactttggagatgcctgggcccgcatcccctttgccttctgggcccgctaccaccagtacatcctgaacagcaacagagccaacagaagagccacctggagggctggggtgagcagcggcaccaatggaggagccagcacctctgtgctggatggccccagcaccagcagcaccatccgcaccagaaatgctgcccgggccggggccagcttcttctcctggatccagtag

SEQ ID NO: 159309 - DNA, 2274 bp, synthetic construct
  misc_feature 1..2274: note = Description of Artificial Sequence: Synthetic coding sequence
  source 1..2274: mol_type = other DNA
atggccgagggcagcttctctgtgcagagcgagagctacagcgtggaggacatggatgagggcagtgatgaggtgggggaggaggagatggtggagggcaatgactatgaggagtttggagccttcggcggctacggcaccctgaccagctttgacatccacatcctgcgggccttcggcagcctgggccctggcctgcgcatcctgagcaatgagccctgggagctggagaaccctgtgctggcccagaccctggtggaggccctgcagctggaccctgagaccctggccaatgaaacagctgcccgggccgccaacgtggcccgggctgctgccagcaacagagctgcccgggctgctgctgctgctgccaggacagccttcagccaggtggtggccagccaccgggtggccaccccccaggtgtctggagaggacacccagcccaccacctatgctgctgaggcccagggccccaccccagagccccccctggccagcccccagaccagccagatgctggtgaccagcaagatggccgcccctgaggccccagccaccagcgcccagagccagacaggcagccctgcccaggaggccgccacagagggccccagcagcgcctgtgccttcagccaggccccctgtgcccgggaggtggatgccaaccggcccagcacagccttcctgggccagaatgatgtgtttgacttcacccagcctgctggggtgtctggcatggccttcccccggcccaagaggcctgccccagcccaggaggccgccacagagggccccagcgctgccagcggcgtgccccagacaggccctggccgggaggtggccgccacccggcccaagaccaccaagagcggcaaggccctggccaagacccgctgggtggagccccagaatgtggtggccgctgctgctgccaaggccaagatggccaccagcatccctgagcctgagggcgctgctgctgccacagcccagcacagcgctgagccctgggccaggatgggcggcaagaggaccaagaagagcaagcacctggatgatgaatatgagagcagcgaggaggagcgggagaccccagctgtgccccccacctggagggccagccagcccagcctgactgtgcgggcccagctggcccccaggcctcccatggcccccaggagccagatccccagcagacatgtgctgtgcctgcccccaagaaatgtgaccctgctgcaggagcgggccaacaagctggtgaagtacctgatgatcaaggactacaagaagatccccatcaagagagctgacatgctgaaggatgtgatccgggagtatgatgagcacttccctgagatcatcgagcgggccacctacaccctggagaagaagtttggcatccacctgaaggagattgacaaggaggagcacctgtacatcctggtgtgcacccgggacagcagcgcccggctgctgggcaagaccaaggacaccccccggctgagcctgctgctggtgatcctgggcgtcatcttcatgaatggaaacagagccagcgaggccgtgctgtgggaggccctgaggaagatgggcctgcggcctggggtgcgccaccccttcctgggggacctgaggaagctgatcacagatgactttgtgaagcagaagaaccctgagctgcgggaggagacccccctgtccatggcccccagctggtacctggagtacaagaagatccccaacagcaaccccccagaatatgagttcctgtggggcctgcgggcccggcatgagaccagcaagatgagggtgctgcgcttcatcgcccagaaccagaacagagacccccgggagtggaaggcccacttcctggaggccgtggatgatgccttcaagaccatggatgtggacatggccgaggagcacgcccgggcccagatgagggcccagatgaacattggagatgaggccctgattggccgctggagctgggatgacatccaggtggagctgctgacctgggatgaagatggagactttggagatgcctgggcccgcatcccctttgccttctgggcccgctaccaccagtacatcctgaacagcaacagagccaacagaagagccacctggagggctggggtgagcagcggcaccaatggaggagccagcacctctgtgctggatggccccagcaccagcagcaccatccgcaccagaaatgctgcccgggccggggccagcttcttctcctggatccagcacaggtag

SEQ ID NO: 159310 - DNA, 2226 bp, synthetic construct
  misc_feature 1..2226: note = Description of Artificial Sequence: Synthetic coding sequence
  source 1..2226: mol_type = other DNA
atggccgagggcagcttctctgtgcagagcgagagctacagcgtggaggacatggatgagggcagtgatgaggtgggggaggaggagatggtggagggcaatgactatgaggagtttggagccttcggcggctacggcaccctgaccagctttgacatccacatcctgcgggccttcggcagcctgggccctggcctgcgcatcctgagcaatgagccctgggagctggagaaccctgtgctggcccagaccctggtggaggccctgcagctggaccctgagaccctggccaatgaaacagctgcccgggccgccaacgtggcccgggctgctgccagcaacagagctgcccgggctgctgctgctgctgccaggacagccttcagccaggtggtggccagccaccgggtggccaccccccaggtgtctggagaggacacccagcccaccacctatgctgctgaggcccagggccccaccccagagccccccctggccagcccccagaccagccagatgctggtgaccagcaagatggccgcccctgaggccccagccaccagcgcccagagccagacaggcagccctgcccaggaggccgccacagagggccccagcagcgcctgtgccttcagccaggccccctgtgcccgggaggtggatgccaaccggcccagcacagccttcctgggccagaatgatgtgtttgacttcacccagcctgctggggtgtctggcatggccttcccccggcccaagaggcctgccccagcccaggaggccgccacagagggccccagcgctgccagcggcgtgccccagacaggccctggccgggaggtggccgccacccggcccaagaccaccaagagcggcaaggccctggccaagacccgctgggtggagccccagaatgtggtggccgctgctgctgccaaggccaagatggccaccagcatccctgagcctgagggcgctgctgctgccacagcccagcacagcgctgagccctgggccaggatgggcggcaagaggaccaagaagagcaagcacctggatgatgaatatgagagcagcgaggaggagcgggagaccccagctgtgccccccacctggagggccagccagcccagcctgactgtgcgggcccagctggcccccaggcctcccatggcccccaggagccagatccccagcagacatgtgctgtgcctgcccccaagaaatgtgaccctgctgcaggagcgggccaacaagctggtgaagtacctgatgatcaaggactacaagaagatccccatcaagagagctgacatgctgaaggatgtgatccgggagtatgatgagcacttccctgagatcatcgagcgggccacctacaccctggagaagaagtttggcatccacctgaaggagattgacaaggaggagcacctgtacatcctggtgtgcacccgggacagcagcgcccggctgctgggcaagaccaaggacaccccccggctgagcctgctgctggtgatcctgggcgtcatcttcatgaatggaaacagagccagcgaggccgtgctgtgggaggccctgaggaagatgggcctgcggcctggggtgcgccaccccttcctgggggacctgaggaagctgatcacagatgactttgtgaagcagaagtacctggagtacaagaagatccccaacagcaaccccccagaatatgagttcctgtggggcctgcgggcccggcatgagaccagcaagatgagggtgctgcgcttcatcgcccagaaccagaacagagacccccgggagtggaaggcccacttcctggaggccgtggatgatgccttcaagaccatggatgtggacatggccgaggagcacgcccgggcccagatgagggcccagatgaacattggagatgaggccctgattggccgctggagctgggatgacatccaggtggagctgctgacctgggatgaagatggagactttggagatgcctgggcccgcatcccctttgccttctgggcccgctaccaccagtacatcctgaacagcaacagagccaacagaagagccacctggagggctggggtgagcagcggcaccaatggaggagccagcacctctgtgctggatggccccagcaccagcagcaccatccgcaccagaaatgctgcccgggccggggccagcttcttctcctggatccagcacaggtag

SEQ ID NO: 159311 - DNA, 2220 bp, synthetic construct; identical to SEQ ID NO: 159308
  misc_feature 1..2220: note = Description of Artificial Sequence: Synthetic coding sequence
  source 1..2220: mol_type = other DNA

SEQ ID NO: 159312 - DNA, 2274 bp, synthetic construct; identical to SEQ ID NO: 159309
  misc_feature 1..2274: note = Description of Artificial Sequence: Synthetic coding sequence
  source 1..2274: mol_type = other DNA

SEQ ID NO: 159313 - DNA, 2226 bp, synthetic construct; identical to SEQ ID NO: 159310
  misc_feature 1..2226: note = Description of Artificial Sequence: Synthetic coding sequence
  source 1..2226: mol_type = other DNA

SEQ ID NO: 159314 - DNA, 2874 bp, synthetic construct
  misc_feature 1..2874: note = Description of Artificial Sequence: Synthetic coding sequence
  source 1..2874: mol_type = other DNA
atgagcctggtgtcccagaacagcagaagaagaagaagaagagtggccaaggccacagcccacaacagctcctggggcgagatgcaggccccaaatgcccctggcctgcctgcagatgtgcccggcagtgatgtgccccagggccccagcgacagccagatcctgcagggcctgtgtgccagcgagggccccagcacctctgtgctgcccaccagcgctgagggccccagcacctttgtgccccccaccatcagcgaggccagcagcgccagcggccagcccaccatcagcgagggccctggcacctctgtgctgcccaccccatctgagggcctgagcaccagcggcccccccaccatcagcaagggcctgtgcacctctgtgaccctggccgccagcgagggcaggaacaccagcaggcctcccaccagcagcgaggagcccagcacctctgtgcccccaacagccagcgaggtgcccagcaccagcctgccccccaccccaggagagggcaccagcacctctgtgcccccaacagcctatgagggccccagcacctctgtggtgcccaccccagatgagggccccagcacctctgtgctgcccaccccaggagagggccctggcacctctgtgcccctggccgccacagagggcctgagcacctctgtgcaggccaccccagatgagggccccagcacctctgtgcccccaacagccacagagggcctgagcacccctgtgccccccaccagagatgagggccccagcacctctgtgcctgccaccccaggagagggccccagcacctctgtgctgcctgctgccagtgatggccagagcatcagcctggtgcccacccggggcaagggcagcagcacctctgtgcccccaacagccacagagggcctgagcacctctgtgcagcccacagctggggagggcagcagcacctctgtgccccccacccctgggggcggcctgagcacctctgtgcccccaacagccacagaggagctgagcacctctgtgccccccaccccaggagagggccccagcacctctgtgctgcccatccctggagagggcctgagcacctctgtgcccccaacagccagtgatggcagtgacacctctgtgccccccaccccaggagagggcgccagcaccctggtgcagcccacagccccagatggccctggcagctctgtgctgcccaaccctggagagggccccagcaccctcttcagcagcagcgcctctgtggacaggaaccccagcaagtgcagcctggtgctgcccagcccccgggtgaccaaggcctctgtggacagcgacagcgagggccccaagggagctgagggccccattgaatttgaggtgctgcgggactgtgagagccccaacagcatcagcatcatgggcctgaacaccagccgggtggccatcaccctgaagccccaggaccccatggagcagaatgtggccgagctgctgcagttcctgctggtgaaggaccagagcaagtaccccatccgggagagcgagatgagggagtacatcgtgaaggagtacagaaaccagtttcctgagatcctgcggcgggctgctgcccacctggagtgcatcttccgctttgagctgcgggagctggaccctgaggcccacacctacatcctgctgaacaagctgggccctgtgccctttgagggcctggaggagagccccaacggccccaagatgggcctgctgatgatgatcctgggccagatcttcctgaatggaaaccaggccaaggaggccgagatctgggagatgctgtggaggatgggcgtgcagcgggagcggcggctgagcatctttggaaaccccaagaggctgctgtctgtggagtttgtgtggcagcgctacctggactacagacctgtgacagactgcaagcctgtggagtatgagttcttctggggccccaggagccacctggagaccaccaagatgaagatcctgaagttcatggccaagatctacaacaaggaccccatggactggccagagaagtacaatgaggccctggaggaggatgctgcccgggcctttgctgagggctggcaggccctgccccacttccggcggcccttctttgaggaggccgctgctgaggtgcccagcccagacagcgaggtgagcagctacagcagcaaatatgccccccacagctggccagagagccggctggagagcaaggccaggaagctggtgcagctgttcctgctgatggacagcaccaagctgcccatccccaagaagggcatcctgtactacatcggccgggagtgcagcaaggtgtttcctgacctgctgaacagagctgcccggaccctgaaccacgtgtatggaacagagctggtggtgctggaccccaggaaccacagctacaccctgtacaacagaagagagatggaggagacagaggagatcgtggacagccccaacagacctggcaacaacttcctgatgcaggtgctgtccttcatcttcatcatgggcaaccacgcccgggagagcgctgtgtgggccttcctgcggggcctgggcgtgcaggccggcaggaagcacgtgatcacctgccgctacctgagccagcgctacatcgacagcctgcgggtgcctgacagcgaccctgtgcagtatgaatttgtgtggggcccccgggcccggctggagaccagcaagatgaaggccctgcgctacgtggcccgcatccacaggaaggagccccaggactggccccagcagtaccgggaggccatggaggatgaggccaacagagcagatgtgggccaccggcagatctttgtgcacaacttcagatag

SEQ ID NO: 159315 - DNA, 1572 bp, synthetic construct
  misc_feature 1..1572: note = Description of Artificial Sequence: Synthetic coding sequence
  source 1..1572: mol_type = other DNA
atgagcctggtgtcccagaatgcccggcactgcagcgctgagatcacagctgactatggagatggccgcggggagatccaggccaccaatgccagcggcagccccacctccatgctggtggtggatgccccccagtgcccccaggcccccatcaacagccagtgtgtgaacaccagccaggccgtgcaggaccccaatgacctggaggtgctgattgatgagcagagccggcggctgggcgccctgcgggtgcatgaccccctggaggacaggagcatcgccctggtgaacttcatgaggatgaagagccagacagagggcagcatccagcagagcgagatgctggagttcctgcgggagtacagcgaccagtttcctgagatcctgcggcgggccagcgcccacctggaccaggtgtttggcctgaacctgcgggtgattgacccccaggccgacacctacaacctggtgtccaagaggggcttccagatcacagacagaattgctgagagcctggacatgcccaaggccagcctgctggccctggtgctgggccacatcctgctgaatggaaacagagcccgggaggccagcatctgggacctgctgctgaaggtggacatgtgggacaagccccagaggatcaacaacctgtttggaaacaccaggaacctgctgaccacagactttgtgtgcatgaggttcctggagtactggcctgtgtatggcaccaaccccctggagtttgagttcctgtggggcagccgggcccaccgggagatcaccaagatggaggccctgaagtttgtgtctgatgcccatgatgaggagccctggagctggccagaggagtacaacaaggccctggagggggacaagaccaaggagaggagcctgacagctggcctggagttctggagcgaggacaccatgaatgacaaggccaatgacctggtgcagctggccatctctgtgacagaggagatgctgcccatccaccaggatgagctgctggcccacacaggcaaggagtttgaagatgtgttccccaacatcctgaacagagccaccctcatcctggacatgttctacggcctgagcctgattgaggtggacaccagcgagcacatctacctgctggtgcagcagcctgagagcgaggaggagcaggtgatgctggagagcctgggccggcccacccaggagtatgtgatgcccatcctgggcctcatcttcctgatgggcaacagagtgaaggaggccaacgtgtggaacctgctgcggcgcttctctgtggatgtgggcaggaagcacagcatcaccaggaagctgatgaggcagcgctacctggagtgccggcccctgagctacagcaaccctgtggagtatgagctgctgtggggcccccgggcccaccacgagaccatcaagatgaaggtgctggagtacatggcccggctgtacaggaagaggccccagaactggccagagcagtaccgggaggccgtggaggatgaggaggcccgggccaagtctgaggccaccatcatgttcttcctggaccccacctag

SEQ ID NO: 159316 - DNA, 924 bp, synthetic construct
  misc_feature 1..924: note = Description of Artificial Sequence: Synthetic coding sequence
  source 1..924: mol_type = other DNA
atgctgcagaccccagagagccggggcctgcctgtgccccaggccgagggggagaaggatggcggccatgatggagagacccgggcccccacagccagccaggagcggcccaaggaggagctgggcgccggccgggaggagggcgctgctgagcccgccctgaccaggaaaggagcccgggccctggccgccaaggccctggcccggcggcgggcctaccgccgcctgaacagaacagtggccgagctggtgcagttcctgctggtgaaggacaagaagaagagccccatcaccaggtctgagatggtgaagtatgtgattggagacctgaagatcctcttcccagacatcatcgcccgggctgctgagcacctgcgctacgtgtttggatttgagctgaagcagtttgacaggaagcaccacacctacatcctgatcaacaagctgaagcccctggaggaggaggaggaggaggacctgggcggagatggcccccggctgggcctgctgatgatgatcctgggcctcatctacatgaggggcaacagcgcccgggaggcccaggtgtgggagatgctgcggcggctgggcgtgcagcccagcaagtaccacttcctgtttggctaccccaagaggctcatcatggaggactttgtgcagcagcgctacctgagctacagaagagtgccccacaccaaccccccagaatatgagttctcctggggccccaggagcaacctggagatcagcaagatggaggtgctgggctttgtggccaagctgcacaagaaggagccccagcactggcctgtgcagtaccgggaggccctggctgatgaagctgaccgggcccgggccaaggcccgggcagaggcctccatgagggcccgggccagcgcccgggccggcatccacctgtggtag

SEQ ID NO: 159317 - DNA, 396 bp, synthetic construct
  misc_feature 1..396: note = Description of Artificial Sequence: Synthetic coding sequence
  source 1..396: mol_type = other DNA
atggcccggagcctggtgtgcctgggcgtcatcatcctgctgagcgccttcagcggccctggggtgcggggcggccccatgcccaagctggccgacaggaagctgtgtgccgaccaggagtgcagccaccccatctccatggctgtggccctgcaggactacatggccccagactgccgcttcctgaccatccaccggggccaggtggtgtatgtgttcagcaagctgaagggccggggccgcctcttctggggcggctctgtgcagggcgactactatggagacctggccgcccggctgggctacttccccagcagcatcgtgcgggaggaccagaccctgaagccaggcaaggtggatgtgaagacagacaagtgggacttctactgccagtag

SEQ ID NO: 159318 - DNA, 642 bp, synthetic construct
  misc_feature 1..642: note = Description of Artificial Sequence: Synthetic coding sequence
  source 1..642: mol_type = other DNA
atggccgagacctatgacttcctgttcaagttcctggtgattggcagcgctggcaccgggaagagctgcctgctgcaccagttcatcgagaacaagttcaagcaggacagcaaccacaccatcggcgtggagtttggcagccgggtggtgaatgtgggcggcaagacagtgaagctgcagatctgggacacagctggccaggagcgcttccgctctgtgaccaggagctactacagaggagctgctggggccctgctggtgtatgacatcaccagccgggagacctacaacagcctggccgcctggctgacagatgcccggaccctggccagccccaacatcgtggtgatcctgtgtggcaacaagaaggacctggaccctgagcgggaggtgaccttcctggaggccagcagatttgcccaggagaatgagctgatgttcctggagaccagcgccctgaccggggagaatgtggaggaggccttcctgaagtgtgcccggaccatcctgaacaagattgattctggagagctggaccctgagaggatgggcagcggcatccagtatggagatgccagcctgcggcagctgcggcagcccaggtctgcccaggccgtggccccccagccctgtggctgctag

SEQ ID NO: 159319 - DNA, 366 bp, synthetic construct
  misc_feature 1..366: note = Description of Artificial Sequence: Synthetic coding sequence
  source 1..366: mol_type = other DNA
atggccgagacctatgacttcctgttcaagttcctggtgattggcagcgctggcaccgggaagagctgcctgctgcaccagttcatcgagaacaagttcaagcaggacagcaaccacaccatcggcgtggagtttggcagccgggtggtgaatgtgggcggcaagacagtgaagctgcagatctgggacacagctggccaggagcgcttccgctctgtgaccaggagctactacagaggagctgctggggccctgctggtgtatgacatcaccagggcagatgtgcctggggaccagaggagccacagaagagagcggggcggcggcgtgccccaggtgtgcccccactacccccagcaggactag

SEQ ID NO: 159320 - DNA, 396 bp, synthetic construct
  misc_feature 1..396: note = Description of Artificial Sequence: Synthetic coding sequence
  source 1..396: mol_type = other DNA
atggcccggagcctggtgtgcctgggcgtcatcatcctgctgagcgccttcagcggccctggggtgcggggcggccccatgcccaagctggccgacaggaagctgtgtgccgaccaggagtgcagccaccccatctccatggctgtggccctgcaggactacatggccccagactgccgcttcctgaccatccaccggggccaggtggtgtatgtgttcagcaagctgaagggccggggccgcctcttctggggcggctctgtgcagggcgactactatggagacctggccgcccggctgggctacttccccagcagcatcgtgcgggaggaccagaccctgaagccaggcaaggtggatgtgaagacagacaccagcagcagcaacagctggtag

SEQ ID NO: 159321 - DNA, 2358 bp, synthetic construct
  misc_feature 1..2358: note = Description of Artificial Sequence: Synthetic coding sequence
  source 1..2358: mol_type = other DNA
atggattctgtgcctgccaccgtgcccagcattgctgccacccctggggaccctgagctggtgggccccctgtctgtgctgtatgctgccttcatcgccaagctgctggagctggtggccaccctgcctgatgatgtgcagcccggccctgacttctacggcctgccctggaagcctgtgttcatcacagccttcctgggcatcgccagctttgccatcttcctgtggaggacagtgctggtggtgacagacaccctggtgtctgtgacagagcagcagatcagcgagaagctgaagaccatcatgaaggagaacacagagctggtgcagaagctgagcaactatgagcagaagatcaaggagagcaagaagcacgtgcaggagaccaggaagcagaacatgatcctgagtgatgaggccatcaagtacaaggacaagatcaagaccctggagaagaaccaggagatcctggatgacacagccaagaacctgcgggtgatgctggagagcgagcgggagcagaatgtgaagaaccaggacctgatcagcgagaacaagaagagcattgagaagctgaaggatgtgatctccatgaatgccagcgagttcagcgaggtgcagatcgccctgaatgaggccaagctgtctgaggagaaggtgaagtctgagtgccaccgggtgcaggaggagaatgcccggctgaagaagaagaaggagcagctgcagcaggagattgaggactggagcaagctgcatgctgagctgtctgagcagatcaagagctttgagaagagccagaaggacctggaggtggccctgacccacaaggatgacaacatcaatgccctgaccaactgcatcacccagctgaacctgctggagtgtgagagcgagagcgagggccagaacaagggcggcaatgacagtgatgagctggccaacggggaggtgggcggggacagaaatgagaagatgaagaaccagatcaagcagatgatggatgtgtccaggacccagacagccatctctgtggtggaggaggacctgaagctgctgcagctgaagctgcgggcctctgtgtccaccaagtgcaacctggaggaccaggtgaagaagctggaggatgacaggaacagcctgcaggccgccaaggccggcctggaggatgagtgcaagaccctgcggcagaaggtggagatcctgaatgagctgtaccagcagaaggagatggccctgcagaagaagctgagccaggaggagtatgagcggcaggagcgggagcaccggctgtctgctgctgatgagaaggctgtgtctgctgctgaggaggtgaagacctacaagagaagaattgaggagatggaggatgagctgcagaagacagagaggagcttcaagaaccagatcgccacccatgagaagaaggcccacgagaactggctgaaggcccgggctgctgagcgggccatcgccgaggagaagcgggaggccgccaacctgcggcacaagctgctggagctgacccagaagatggccatgctgcaggaggagcccgtcatcgtgaagcccatgcctgggaagcccaacacccagaaccccccaagaagaggccccctgagccagaatggcagctttggccccagccctgtgtctggaggagagtgcagcccccccctgactgtggagccccctgtgcggcccctgagcgccaccctgaacagaagagacatgcccaggagtgaatttggatctgtggatggccccctgccccacccccgctggagcgctgaggccagcggcaagcccagccccagcgaccccggcagcggcacagccaccatgatgaacagcagcagccggggcagcagccccaccagggtgctggatgagggcaaggtgaacatggcccccaagggccccccacccttccctggggtgcccctgatgagcacccccatgggcggccctgtgcccccacccatccgctatggccccccaccccagctgtgtggccccttcggcccccggcccctgcccccacccttcggccctggcatgaggcctcccctgggcctgcgggagtttgcccctggggtgcccccaggaagaagagacctgcccctgcacccccggggcttcctgcccggccacgcccccttccggcccctgggcagcctgggcccccgggagtacttcatccctggcacccggctgcccccacccacccacggcccccaggagtacccacctcctcctgctgtgcgggacctgctgcccagcggcagcagagatgagcccccaccagccagccagagcaccagccaggactgcagccaggccctgaagcagagcccctag

SEQ ID NO: 159322 - DNA, 5547 bp, synthetic construct
  misc_feature 1..5547: note = Description of Artificial Sequence: Synthetic coding sequence
  source 1..5547: mol_type = other DNA
atggctgctgcccctggcctgctggtgtggctgctggtgctgcggctgccctggagggtgcccggccagctggaccccagcacaggccgccgcttcagcgagcacaagctgtgtgctgatgatgagtgcagcatgctgatgtacagaggagaggccctggaggacttcaccggccctgactgccgctttgtgaacttcaagaagggggaccctgtgtatgtgtactacaagctggcccggggctggccagaggtgtgggccggctctgtgggccgcaccttcggctacttccccaaggacctgatccaggtggtgcatgagtacaccaaggaggagctgcaggtgcccacagatgaaacagactttgtgtgctttgatggcggcagagatgacttccacaactacaacgtggaggagctgctgggcttcctggagctgtacaacagcgctgccacagacagcgagaaggctgtggagaagaccctgcaggacatggagaagaaccctgagctgagcaaggagcgggagcctgagcctgagcctgtggaggccaacagcgaggagagtgacagcgtcttctctgaaaatacagaggacctgcaggagcagttcaccacccagaagcaccacagccacgccaacagccaggccaaccacgcccagggcgagcaggccagctttgagagctttgaggagatgctgcaggacaagctgaaggtgcctgagagcgagaacaacaagaccagcaacagcagccaggtgtccaatgagcaggacaagattgatgcctacaagctgctgaagaaggagatgaccctggacctgaagaccaagtttggcagcacagcagatgccctggtgtctgatgatgagaccacccggctggtgaccagcctggaggatgactttgatgaggagctggacacagagtactatgctgtgggcaaggaggatgaggagaaccaggaggactttgatgagctgcccctgctgaccttcacagatggagaggacatgaagaccccagccaagtctggagtggagaagtaccccacagacaaggagcagaacagcaatgaggaggacaaggtgcagctgactgtgcccccaggcatcaagaatgatgacaagaacatcctgaccacctggggagacaccatcttcagcatcgtgactggaggagaggagacccgggacaccatggacctggagagcagcagcagcgaggaggagaaggaggatgatgatgatgccctggtgcctgacagcaagcagggcaagccccagagcgccacagactacagcgaccctgacaacgtggatgatggcctcttcatcgtggacatccccaagaccaacaatgacaaggaggtgaatgctgagcaccacatcaagggcaagggccggggcgtgcaggagagcaagaggggcctggtgcaggacaagacagagctggaggatgagaaccaggagggcatgacagtgcacagctctgtgcacagcaacaacctgaacagcatgcctgctgctgagaagggcaaggacaccctgaagagcgcctatgatgacacagaaaatgacctgaagggagctgccatccacatcagcaagggcatgctgcacgaggagaagccaggagagcagatcctggagggcggcagcgagagcgagagcgcccagaaggctgctggcaaccagatgaatgacaggaagatccagcaggagagcctgggcagcgcccccctgatgggagatgaccaccccaatgccagccgggacagcgtggagggagatgccctggtgaatggagccaagctgcacaccctgtctgtggagcaccagcgggaggagctgaaggaggagctggtgctgaagacccagaaccagccccgcttcagcagcccagatgaaattgacctgccccgggagctggaggatgaggtgcccatcctgggcaggaacctgccctggcagcaggagagagatgtggccgccacagccagcaagcagatgtctgagaagatccggctgtctgagggggaggccaaggaggacagcctggatgaggagttcttccaccacaaggccatgcagggcacagaggtgggccagacagaccagacagacagcactggaggccctgccttcctgagcaaggtggaggaggatgactaccccagcgaggagctgctggaggatgaaaatgccatcaatgccaagaggagcaaggagaagaaccctggcaaccagggccggcagtttgatgtgaacctgcaggtgcctgacagagctgtgctgggcaccatccacccagaccctgagattgaggagagcaagcaggagacctccatgatcctggacagcgagaagaccagcgagacagctgccaagggcgtgaacacaggaggccgggagcccaacaccatggtggagaaggagcggcccctggccgacaagaaggcccagaggccctttgagaggagtgacttcagtgacagcatcaagatccagaccccagagctgggggaggtgttccagaacaaggacagcgactacctgaagaatgacaaccctgaggagcacctgaagaccagcggcctggccggggagcctgagggggagctgagcaaggaggaccatgaaaatacagagaagtacatgggcacagagagccagggcagcgctgctgctgagccagaagatgacagcttccactggaccccccacacctctgtggagcccggccacagcgacaagcgggaggacctgctgatcatcagcagcttcttcaaggagcagcagagcctgcagcgcttccagaagtacttcaacgtgcatgagctggaggccctgctgcaggagatgagcagcaagctgaagagcgcccagcaggagagcctgccctacaacatggagaaggtgctggacaaggtgttccgggccagcgagagccagatcctgagcattgctgagaagatgctggacaccagggtggccgagaacagagacctgggcatgaatgaaaacaacatctttgaggaggccgctgtgctggatgacatccaggacctgatctactttgtgcgctacaagcacagcacagctgaggagacagccaccctggtgatggccccacccctggaggagggcctgggcggggccatggaggagatgcagcccctgcacgaggacaacttcagccgggagaagacagctgagctgaatgtgcaggtgcctgaggagcccacccacctggaccagagggtcatcggggacacccacgccagcgaggtgtcccagaagcccaacacagagaaggacctggaccccggccctgtgaccacagaggacacccccatggatgccattgatgccaacaagcagcctgagacagctgctgaggagcccgcctctgtgacccccctggagaatgccatcctgctgatctacagcttcatgttctacctgaccaagagcctggtggccaccctgcctgatgatgtgcagcccggccctgacttctacggcctgccctggaagcctgtgttcatcacagccttcctgggcatcgccagctttgccatcttcctgtggaggacagtgctggtggtgagcaacacagtgtactacgtgacagagcagcagatcagcgagaagctgaagaccatcatgaaggagaacacagagctggtgcagaagctgagcaactatgagcagaagatcaaggagagcaagaagcacgtgcaggagaccaggaagcagaacatgatcctgagtgatgaggccatcaagtacaaggacaagatcaagaccctggagaagaaccaggagatcctggatgacacagccaagaacctgcgggtgatgctggagagcgagcgggagcagaatgtgaagaaccaggacctgctgcagcaggagattgaggactggagcaagctgcacgccgagctgtctgagcagatcaagagctttgagaagagccagaaggacctggaggtggccctgacccacaaggatgacaacatcaatgccctgaccaactgcatcacccagctgaacctgctggagtgtgagagcgagagcgagggccagaacaagggcggcaatgacagtgatgagctggccaatggagaggtgggcggggacagaaatgagaagatgaagaaccagatcaagcagatgatggatgtgtccaggacccagacagccatctctgtggtggaggaggacctgaagctgctgcagctgaagctgcgggcctctgtgtccaccaagtgcaacctggaggaccaggtgaagaagctggaggatgacaggaacagcctgcaggccgccaaggccggcctggaggatgagtgcaagaccctgcggcagaaggtggagatcctgaatgagctgtaccagcagaaggagatggccctgcagaagaagctgagccaggaggagtatgaaaggcaggagcgggagcaccggctgtctgctgctgatgagaaggctgtgtctgctgctgaggaggtgaagacctacaagaggcgcatcgaggagatggaggatgagctgcagaagacagagaggagcttcaagaaccagatcgccacccatgagaagaaggcccacgagaactggctgaaggcccgggctgctgagcgggccatcgccgaggagaagcgggaggccgccaacctgcggcacaagctgctggagctgacccagaagatggccatgctgcaggaggagcctgtgattgtgaagcccatgcctgggaagcccaacacccagaaccccccccggcggggccccctgagccagaatggcagctttggccccagccctgtgtctggaggagaatgtagcccccccctgactgtggagccccctgtgcggcccctgagcgccaccctgaacagaagagacatgcccaggagtgaatttggatctgtggatggccccctgccccacccccgctggagcgctgaggccagcggcaagcccagccccagcgaccccggcagcggcacagccaccatgatgaacagcagcagccggggcagcagccccaccagggtgctggatgagggcaaggtgaacatggcccccaagggccccccacccttccctggggtgcccctgatgagcacccccatgggcggccctgtgcccccacccatccgctatggccccccaccccagctgtgtggccccttcggcccccggcccctgcccccaccatttggacctggcatgaggcctcccctgggcctgcgggagtttgcccctggggtgcccccaggccggcgggacctgcccctgcacccccggggcttcctgcccggccacgcccccttccggcccctgggcagcctgggcccccgggagtacttcatccctggcacccggctgcccccacccacccacggcccccaggagtacccacctcctcctgctgtgcgggacctgctgcccagcggcagcagagatgagcccccaccagccagccagagcaccagccaggactgcagccaggccctgaagcagagcccctag

SEQ ID NO: 159323 - DNA, 2358 bp, synthetic construct
  misc_feature 1..2358: note = Description of Artificial Sequence: Synthetic coding sequence
  source 1..2358: mol_type = other DNA
atggattctgtgcctgccaccgtgcccagcattgctgccacccctggggaccctgagctggtgggccccctgtctgtgctgtatgctgccttcatcgccaagctgctggagctggtggccaccctgcctgatgatgtgcagcccggccctgacttctacggcctgccctggaagcctgtgttcatcacagccttcctgggcatcgccagctttgccatcttcctgtggaggacagtgctggtggtgaaggacagagtgtaccaggtgacagagcagcagatcagcgagaagctgaagaccatcatgaaggagaacacagagctggtgcagaagctgagcaactatgagcagaagatcaaggagagcaagaagcacgtgcaggagaccaggaagcagaacatgatcctgagtgatgaggccatcaagtacaaggacaagatcaagaccctggagaagaaccaggagatcctggatgacacagccaagaacctgcgggtgatgctggagagcgagcgggagcagaatgtgaagaaccaggacctgatcagcgagaacaagaagagcattgagaagctgaaggatgtgatctccatgaatgccagcgagttcagcgaggtgcagatcgccctgaatgaggccaagctgtctgaggagaaggtgaagtctgagtgccaccgggtgcaggaggagaatgcccggctgaagaagaagaaggagcagctgcagcaggagattgaggactggagcaagctgcatgctgagctgtctgagcagatcaagagctttgagaagagccagaaggacctggaggtggccctgacccacaaggatgacaacatcaatgccctgaccaactgcatcacccagctgaacctgctggagtgtgagagcgagagcgagggccagaacaagggcggcaatgacagtgatgagctggccaacggggaggtgggcggggacagaaatgagaagatgaagaaccagatcaagcagatgatggatgtgtccaggacccagacagccatctctgtggtggaggaggacctgaagctgctgcagctgaagctgcgggcctctgtgtccaccaagtgcaacctggaggaccaggtgaagaagctggaggatgacaggaacagcctgcaggccgccaaggccggcctggaggatgagtgcaagaccctgcggcagaaggtggagatcctgaatgagctgtaccagcagaaggagatggccctgcagaagaagctgagccaggaggagtatgagcggcaggagcgggagcaccggctgtctgctgctgatgagaaggctgtgtctgctgctgaggaggtgaagacctacaagagaagaattgaggagatggaggatgagctgcagaagacagagaggagcttcaagaaccagatcgccacccatgagaagaaggcccacgagaactggctgaaggcccgggctgctgagcgggccatcgccgaggagaagcgggaggccgccaacctgcggcacaagctgctggagctgacccagaagatggccatgctgcaggaggagcccgtcatcgtgaagcccatgcctgggaagcccaacacccagaaccccccaagaagaggccccctgagccagaatggcagctttggccccagccctgtgtctggaggagagtgcagcccccccctgactgtggagccccctgtgcggcccctgagcgccaccctgaacagaagagacatgcccaggagtgaatttggatctgtggatggccccctgccccacccccgctggagcgctgaggccagcggcaagcccagccccagcgaccccggcagcggcacagccaccatgatgaacagcagcagccggggcagcagccccaccagggtgctggatgagggcaaggtgaacatggcccccaagggccccccacccttccctggggtgcccctgatgagcacccccatgggcggccctgtgcccccacccatccgctatggccccccaccccagctgtgtggccccttcggcccccggcccctgcccccacccttcggccctggcatgaggcctcccctgggcctgcgggagtttgcccctggggtgcccccaggaagaagagacctgcccctgcacccccggggcttcctgcccggccacgcccccttccggcccctgggcagcctgggcccccgggagtacttcatccctggcacccggctgcccccacccacccacggcccccaggagtacccacctcctcctgctgtgcgggacctgctgcccagcggcagcagagatgagcccccaccagccagccagagcaccagccaggactgcagccaggccctgaagcagagcccctag

SEQ ID NO: 159324 - DNA, 5724 bp, synthetic construct
  misc_feature 1..5724: note = Description of Artificial Sequence: Synthetic coding sequence
  source 1..5724: mol_type = other DNA
atggctgctgcccctggcctgctggtgtggctgctggtgctgcggctgccctggagggtgcccggccagctggaccccagcacaggccgccgcttcagcgagcacaagctgtgtgctgatgatgagtgcagcatgctgatgtacagaggagaggccctggaggacttcaccggccctgactgccgctttgtgaacttcaagaagggggaccctgtgtatgtgtactacaagctggcccggggctggccagaggtgtgggccggctctgtgggccgcaccttcggctacttccccaaggacctgatccaggtggtgcatgagtacaccaaggaggagctgcaggtgcccacagatgaaacagactttgtgtgctttgatggcggcagagatgacttccacaactacaacgtggaggagctgctgggcttcctggagctgtacaacagcgctgccacagacagcgagaaggctgtggagaagaccctgcaggacatggagaagaaccctgagctgagcaaggagcgggagcctgagcctgagcctgtggaggccaacagcgaggagagtgacagcgtcttctctgaaaatacagaggacctgcaggagcagttcaccacccagaagcaccacagccacgccaacagccaggccaaccacgcccagggcgagcaggccagctttgagagctttgaggagatgctgcaggacaagctgaaggtgcctgagagcgagaacaacaagaccagcaacagcagccaggtgtccaatgagcaggacaagattgatgcctacaagctgctgaagaaggagatgaccctggacctgaagaccaagtttggcagcacagcagatgccctggtgtctgatgatgagaccacccggctggtgaccagcctggaggatgactttgatgaggagctggacacagagtactatgctgtgggcaaggaggatgaggagaaccaggaggactttgatgagctgcccctgctgaccttcacagatggagaggacatgaagaccccagccaagtctggagtggagaagtaccccacagacaaggagcagaacagcaatgaggaggacaaggtgcagctgactgtgcccccaggcatcaagaatgatgacaagaacatcctgaccacctggggagacaccatcttcagcatcgtgactggaggagaggagacccgggacaccatggacctggagagcagcagcagcgaggaggagaaggaggatgatgatgatgccctggtgcctgacagcaagcagggcaagccccagagcgccacagactacagcgaccctgacaacgtggatgatggcctcttcatcgtggacatccccaagaccaacaatgacaaggaggtgaatgctgagcaccacatcaagggcaagggccggggcgtgcaggagagcaagaggggcctggtgcaggacaagacagagctggaggatgagaaccaggagggcatgacagtgcacagctctgtgcacagcaacaacctgaacagcatgcctgctgctgagaagggcaaggacaccctgaagagcgcctatgatgacacagaaaatgacctgaagggagctgccatccacatcagcaagggcatgctgcacgaggagaagccaggagagcagatcctggagggcggcagcgagagcgagagcgcccagaaggctgctggcaaccagatgaatgacaggaagatccagcaggagagcctgggcagcgcccccctgatgggagatgaccaccccaatgccagccgggacagcgtggagggagatgccctggtgaatggagccaagctgcacaccctgtctgtggagcaccagcgggaggagctgaaggaggagctggtgctgaagacccagaaccagccccgcttcagcagcccagatgaaattgacctgccccgggagctggaggatgaggtgcccatcctgggcaggaacctgccctggcagcaggagagagatgtggccgccacagccagcaagcagatgtctgagaagatccggctgtctgagggggaggccaaggaggacagcctggatgaggagttcttccaccacaaggccatgcagggcacagaggtgggccagacagaccagacagacagcactggaggccctgccttcctgagcaaggtggaggaggatgactaccccagcgaggagctgctggaggatgaaaatgccatcaatgccaagaggagcaaggagaagaaccctggcaaccagggccggcagtttgatgtgaacctgcaggtgcctgacagagctgtgctgggcaccatccacccagaccctgagattgaggagagcaagcaggagacctccatgatcctggacagcgagaagaccagcgagacagctgccaagggcgtgaacacaggaggccgggagcccaacaccatggtggagaaggagcggcccctggccgacaagaaggcccagaggccctttgagaggagtgacttcagtgacagcatcaagatccagaccccagagctgggggaggtgttccagaacaaggacagcgactacctgaagaatgacaaccctgaggagcacctgaagaccagcggcctggccggggagcctgagggggagctgagcaaggaggaccatgaaaatacagagaagtacatgggcacagagagccagggcagcgctgctgctgagccagaagatgacagcttccactggaccccccacacctctgtggagcccggccacagcgacaagcgggaggacctgctgatcatcagcagcttcttcaaggagcagcagagcctgcagcgcttccagaagtacttcaacgtgcatgagctggaggccctgctgcaggagatgagcagcaagctgaagagcgcccagcaggagagcctgccctacaacatggagaaggtgctggacaaggtgttccgggccagcgagagccagatcctgagcattgctgagaagatgctggacaccagggtggccgagaacagagacctgggcatgaatgaaaacaacatctttgaggaggccgctgtgctggatgacatccaggacctgatctactttgtgcgctacaagcacagcacagctgaggagacagccaccctggtgatggccccacccctggaggagggcctgggcggggccatggaggagatgcagcccctgcacgaggacaacttcagccgggagaagacagctgagctgaatgtgcaggtgcctgaggagcccacccacctggaccagagggtcatcggggacacccacgccagcgaggtgtcccagaagcccaacacagagaaggacctggaccccggccctgtgaccacagaggacacccccatggatgccattgatgccaacaagcagcctgagacagctgctgaggagcccgcctctgtgacccccctggagaatgccatcctgctgatctacagcttcatgttctacctgaccaagagcctggtggccaccctgcctgatgatgtgcagcccggccctgacttctacggcctgccctggaagcctgtgttcatcacagccttcctgggcatcgccagctttgccatcttcctgtggaggacagtgctggtggtgagcaacacagtgtactacgtgacagagcagcagatcagcgagaagctgaagaccatcatgaaggagaacacagagctggtgcagaagctgagcaactatgagcagaagatcaaggagagcaagaagcacgtgcaggagaccaggaagcagaacatgatcctgagtgatgaggccatcaagtacaaggacaagatcaagaccctggagaagaaccaggagatcctggatgacacagccaagaacctgcgggtgatgctggagagcgagcgggagcagaatgtgaagaaccaggacctgatcagcgagaacaagaagagcattgagaagctgaaggatgtgatctccatgaatgccagcgagttcagcgaggtgcagatcgccctgaatgaggccaagctgtctgaggagaaggtgaagtctgagtgccaccgggtgcaggaggagaatgcccggctgaagaagaagaaggagcagctgcagcaggagattgaggactggagcaagctgcatgctgagctgtctgagcagatcaagagctttgagaagagccagaaggacctggaggtggccctgacccacaaggatgacaacatcaatgccctgaccaactgcatcacccagctgaacctgctggagtgtgagagcgagagcgagggccagaacaagggcggcaatgacagtgatgagctggccaacggggaggtgggcggggacagaaatgagaagatgaagaaccagatcaagcagatgatggatgtgtccaggacccagacagccatctctgtggtggaggaggacctgaagctgctgcagctgaagctgcgggcctctgtgtccaccaagtgcaacctggaggaccaggtgaagaagctggaggatgacaggaacagcctgcaggccgccaaggccggcctggaggatgagtgcaagaccctgcggcagaaggtggagatcctgaatgagctgtaccagcagaaggagatggccctgcagaagaagctgagccaggaggagtatgagcggcaggagcgggagcaccggctgtctgctgctgatgagaaggctgtgtctgctgctgaggaggtgaagacctacaagagaagaattgaggagatggaggatgagctgcagaagacagagaggagcttcaagaaccagatcgccacccatgagaagaaggcccacgagaactggctgaaggcccgggctgctgagcgggccatcgccgaggagaagcgggaggccgccaacctgcggcacaagctgctggagctgacccagaagatggccatgctgcaggaggagcccgtcatcgtgaagcccatgcctgggaagcccaacacccagaaccccccaagaagaggccccctgagccagaatggcagctttggccccagccctgtgtctggaggagagtgcagcccccccctgactgtggagccccctgtgcggcccctgagcgccaccctgaacagaagagacatgcccaggagtgaatttggatctgtggatggccccctgccccacccccgctggagcgctgaggccagcggcaagcccagccccagcgaccccggcagcggcacagccaccatgatgaacagcagcagccggggcagcagccccaccagggtgctggatgagggcaaggtgaacatggcccccaagggccccccacccttccctggggtgcccctgatgagcacccccatgggcggccctgtgcccccacccatccgctatggccccccaccccagctgtgtggccccttcggcccccggcccctgcccccacccttcggccctggcatgaggcctcccctgggcctgcgggagtttgcccctggggtgcccccaggaagaagagacctgcccctgcacccccggggcttcctgcccggccacgcccccttccggcccctgggcagcctgggcccccgggagtacttcatccctggcacccggctgcccccacccacccacggcccccaggagtacccacctcctcctgctgtgcgggacctgctgcccagcggcagcagagatgagcccccaccagccagccagagcaccagccaggactgcagccaggccctgaagcagagcccctag

SEQ ID NO: 159325 - DNA, 1503 bp, synthetic construct
  misc_feature 1..1503: note = Description of Artificial Sequence: Synthetic coding sequence
  source 1..1503: mol_type = other DNA
atggctgctgcccctggcctgctggtgtggctgctggtgctgcggctgccctggagggtgcccggccagctggaccccagcacaggccgccgcttcagcgagcacaagctgtgtgctgatgatgagtgcagcatgctgatgtacagaggagaggccctggaggacttcaccggccctgactgccgctttgtgaacttcaagaagggggaccctgtgtatgtgtactacaagctggcccggggctggccagaggtgtgggccggctctgtgggccgcaccttcggctacttccccaaggacctgatccaggtggtgcatgagtacaccaaggaggagctgcaggtgcccacagatgaaacagactttgtgtgctttgatggcggcagagatgacttccacaactacaacgtggaggagctgctgggcttcctggagctgtacaacagcgctgccacagacagcgagaaggctgtggagaagaccctgcaggacatggagaagaaccctgagctgagcaaggagcgggagcctgagcctgagcctgtggaggccaacagcgaggagagtgacagcgtcttctctgaaaatacagaggacctgcaggagcagttcaccacccagaagcaccacagccacgccaacagccaggccaaccacgcccagggcgagcaggccagctttgagagctttgaggagatgctgcaggacaagctgaaggtgcctgagagcgagaacaacaagaccagcaacagcagccaggtgtccaatgagcaggacaagattgatgcctacaagctgctgaagaaggagatgaccctggacctgaagaccaagtttggcagcacagcagatgccctggtgtctgatgatgagaccacccggctggtgaccagcctggaggatgactttgatgaggagctggacacagagtactatgctgtgggcaaggaggatgaggagaaccaggaggactttgatgagctgcccctgctgaccttcacagatggagaggacatgaagaccccagccaagtctggagtggagaagtaccccacagacaaggagcagaacagcaatgaggaggacaaggtgcagctgactgtgcccccaggcatcaagaatgatgacaagaacatcctgaccacctggggagacaccatcttcagcatcgtgactggaggagaggagacccgggacaccatggacctggagagcagcagcagcgaggaggagaaggaggatgatgatgatgccctggtgcctgacagcaagcagggcaagccccagagcgccacagactacagcgaccctgacaacgtggatgatggcctcttcatcgtggacatccccaagaccaacaatgacaaggaggtgaatgctgagcaccacatcaagggcaagggccggggcgtgcaggagagcaagaggggcctggtgcaggacaagacagagctggaggatgagaaccaggagggcttcaagacagagcccatcaagctgtag

SEQ ID NO: 159326 - DNA, 5724 bp, synthetic construct
  misc_feature 1..5724: note = Description of Artificial Sequence: Synthetic coding sequence
  source 1..5724: mol_type = other DNA
atggctgctgcccctggcctgctggtgtggctgctggtgctgcggctgccctggagggtgcccggccagctggaccccagcacaggccgccgcttcagcgagcacaagctgtgtgctgatgatgagtgcagcatgctgatgtacagaggagaggccctggaggacttcaccggccctgactgccgctttgtgaacttcaagaagggggaccctgtgtatgtgtactacaagctggcccggggctggccagaggtgtgggccggctctgtgggccgcaccttcggctacttccccaaggacctgatccaggtggtgcatgagtacaccaaggaggagctgcaggtgcccacagatgaaacagactttgtgtgctttgatggcggcagagatgacttccacaactacaacgtggaggagctgctgggcttcctggagctgtacaacagcgctgccacagacagcgagaaggctgtggagaagaccctgcaggacatggagaagaaccctgagctgagcaaggagcgggagcctgagcctgagcctgtggaggccaacagcgaggagagtgacagcgtcttctctgaaaatacagaggacctgcaggagcagttcaccacccagaagcaccacagccacgccaacagccaggccaaccacgcccagggcgagcaggccagctttgagagctttgaggagatgctgcaggacaagctgaaggtgcctgagagcgagaacaacaagaccagcaacagcagccaggtgtccaatgagcaggacaagattgatgcctacaagctgctgaagaaggagatgaccctggacctgaagaccaagtttggcagcacagcagatgccctggtgtctgatgatgagaccacccggctggtgaccagcctggaggatgactttgatgaggagctggacacagagtactatgctgtgggcaaggaggatgaggagaaccaggaggactttgatgagctgcccctgctgaccttcacagatggagaggacatgaagaccccagccaagtctggagtggagaagtaccccacagacaaggagcagaacagcaatgaggaggacaaggtgcagctgactgtgcccccaggcatcaagaatgatgacaagaacatcctgaccacctggggagacaccatcttcagcatcgtgactggaggagaggagacccgggacaccatggacctggagagcagcagcagcgaggaggagaaggaggatgatgatgatgccctggtgcctgacagcaagcagggcaagccccagagcgccacagactacagcgaccctgacaacgtggatgatggcctcttcatcgtggacatccccaagaccaacaatgacaaggaggtgaatgctgagcaccacatcaagggcaagggccggggcgtgcaggagagcaagaggggcctggtgcaggacaagacagagctggaggatgagaaccaggagggcatgacagtgcacagctctgtgcacagcaacaacctgaacagcatgcctgctgctgagaagggcaaggacaccctgaagagcgcctatgatgacacagaaaatgacctgaagggagctgccatccacatcagcaagggcatgctgcacgaggagaagccaggagagcagatcctggagggcggcagcgagagcgagagcgcccagaaggctgctggcaaccagatgaatgacaggaagatccagcaggagagcctgggcagcgcccccctgatgggagatgaccaccccaatgccagccgggacagcgtggagggagatgccctggtgaatggagccaagctgcacaccctgtctgtggagcaccagcgggaggagctgaaggaggagctggtgctgaagacccagaaccagccccgcttcagcagcccagatgaaattgacctgccccgggagctggaggatgaggtgcccatcctgggcaggaacctgccctggcagcaggagagagatgtggccgccacagccagcaagcagatgtctgagaagatccggctgtctgagggggaggccaaggaggacagcctggatgaggagttcttccaccacaaggccatgcagggcacagaggtgggccagacagaccagacagacagcactggaggccctgccttcctgagcaaggtggaggaggatgactaccccagcgaggagctgctggaggatgaaaatgccatcaatgccaagaggagcaaggagaagaaccctggcaaccagggccggcagtttgatgtgaacctgcaggtgcctgacagagctgtgctgggcaccatccacccagaccctgagattgaggagagcaagcaggagacctccatgatcctggacagcgagaagaccagcgagacagctgccaagggcgtgaacacaggaggccgggagcccaacaccatggtggagaaggagcggcccctggccgacaagaaggcccagaggccctttgagaggagtgacttcagtgacagcatcaagatccagaccccagagctgggggaggtgttccagaacaaggacagcgactacctgaagaatgacaaccctgaggagcacctgaagaccagcggcctggccggggagcctgagggggagctgagcaaggaggaccatgaaaatacagagaagtacatgggcacagagagccagggcagcgctgctgctgagccagaagatgacagcttccactggaccccccacacctctgtggagcccggccacagcgacaagcgggaggacctgctgatcatcagcagcttcttcaaggagcagcagagcctgcagcgcttccagaagtacttcaacgtgcatgagctggaggccctgctgcaggagatgagcagcaagctgaagagcgcccagcaggagagcctgccctacaacatggagaaggtgctggacaaggtgttccgggccagcgagagccagatcctgagcattgctgagaagatgctggacaccagggtggccgagaacagagacctgggcatgaatgaaaacaacatctttgaggaggccgctgtgctggatgacatccaggacctgatctactttgtgcgctacaagcacagcacagctgaggagacagccaccctggtgatggccccacccctggaggagggcctgggcggggccatggaggagatgcagcccctgcacgaggacaacttcagccgggagaagacagctgagctgaatgtgcaggtgcctgaggagcccacccacctggaccagagggtcatcggggacacccacgccagcgaggtgtcccagaagcccaacacagagaaggacctggaccccggccctgtgaccacagaggacacccccatggatgccattgatgccaacaagcagcctgagacagctgctgaggagcccgcctctgtgacccccctggagaatgccatcctgctgatctacagcttcatgttctacctgaccaagagcctggtggccaccctgcctgatgatgtgcagcccggccctgacttctacggcctgccctggaagcctgtgttcatcacagccttcctgggcatcgccagctttgccatcttcctgtggaggacagtgctggtggtgaaggacagagtgtaccaggtgacagagcagcagatcagcgagaagctgaagaccatcatgaaggagaacacagagctggtgcagaagctgagcaactatgagcagaagatcaaggagagcaagaagcacgtgcaggagaccaggaagcagaacatgatcctgagtgatgaggccatcaagtacaaggacaagatcaagaccctggagaagaaccaggagatcctggatgacacagccaagaacctgcgggtgatgctggagagcgagcgggagcagaatgtgaagaaccaggacctgatcagcgagaacaagaagagcattgagaagctgaaggatgtgatctccatgaatgccagcgagttcagcgaggtgcagatcgccctgaatgaggccaagctgtctgaggagaaggtgaagtctgagtgccaccgggtgcaggaggagaatgcccggctgaagaagaagaaggagcagctgcagcaggagattgaggactggagcaagctgcatgctgagctgtctgagcagatcaagagctttgagaagagccagaaggacctggaggtggccctgacccacaaggatgacaacatcaatgccctgaccaactgcatcacccagctgaacctgctggagtgtgagagcgagagcgagggccagaacaagggcggcaatgacagtgatgagctggccaacggggaggtgggcggggacagaaatgagaagatgaagaaccagatcaagcagatgatggatgtgtccaggacccagacagccatctctgtggtggaggaggacctgaagctgctgcagctgaagctgcgggcctctgtgtccaccaagtgcaacctggaggaccaggtgaagaagctggaggatgacaggaacagcctgcaggccgccaaggccggcctggaggatgagtgcaagaccctgcggcagaaggtggagatcctgaatgagctgtaccagcagaaggagatggccctgcagaagaagctgagccaggaggagtatgagcggcaggagcgggagcaccggctgtctgctgctgatgagaaggctgtgtctgctgctgaggaggtgaagacctacaagagaagaattgaggagatggaggatgagctgcagaagacagagaggagcttcaagaaccagatcgccacccatgagaagaaggcccacgagaactggctgaaggcccgggctgctgagcgggccatcgccgaggagaagcgggaggccgccaacctgcggcacaagctgctggagctgacccagaagatggccatgctgcaggaggagcccgtcatcgtgaagcccatgcctgggaagcccaacacccagaaccccccaagaagaggccccctgagccagaatggcagctttggccccagccctgtgtctggaggagagtgcagcccccccctgactgtggagccccctgtgcggcccctgagcgccaccctgaacagaagagacatgcccaggagtgaatttggatctgtggatggccccctgccccacccccgctggagcgctgaggccagcggcaagcccagccccagcgaccccggcagcggcacagccaccatgatgaacagcagcagccggggcagcagccccaccagggtgctggatgagggcaaggtgaacatggcccccaagggccccccacccttccctggggtgcccctgatgagcacccccatgggcggccctgtgcccccacccatccgctatggccccccaccccagctgtgtggccccttcggcccccggcccctgcccccacccttcggccctggcatgaggcctcccctgggcctgcgggagtttgcccctggggtgcccccaggaagaagagacctgcccctgcacccccggggcttcctgcccggccacgcccccttccggcccctgggcagcctgggcccccgggagtacttcatccctggcacccggctgcccccacccacccacggcccccaggagtacccacctcctcctgctgtgcgggacctgctgcccagcggcagcagagatgagcccccaccagccagccagagcaccagccaggactgcagccaggccctgaagcagagcccctag

SEQ ID NO: 159327 - DNA, 3051 bp, synthetic construct
  misc_feature 1..3051: note = Description of Artificial Sequence: Synthetic coding sequence
  source 1..3051: mol_type = other DNA
tgactggtgcctgacagcaagcagggcaagccccagagcgccacagactacagcgaccctgacaacgtggatgatggcctcttcatcgtggacatccccaagaccaacaatgacaaggaggtgaatgctgagcaccacatcaagggcaagggccggggcgtgcaggagagcaagaggggcctggtgcaggacaagacagagctggaggatgagaaccaggagggcatgacagtgcacagctctgtgcacagcaacaacctgaacagcatgcctgctgctgagaagggcaaggacaccctgaagagcgcctatgatgacacagaaaatgacctgaagggggccgccatccacatcagcaagggcatgctgcacgaggagaagccaggagagcagatcctggagggcggcagcgagagcgagagcgcccagaaggccgccggcaaccagatgaatgacaggaagatccagcaggagagcctgggcagcgcccccctgatgggagatgaccaccccaatgccagccgggacagcgtggagggagatgccctggtgaatggagccaagctgcacaccctgtctgtggagcaccagcgggaggagctgaaggaggagctggtgctgaagacccagaaccagccccgcttcagcagcccagatgaaattgacctgccccgggagctggaggatgaggtgcccatcctgggcaggaacctgccctggcagcaggagagagatgtggccgccacagccagcaagcagatgtctgagaagatccggctgtctgagggggaggccaaggaggacagcctggatgaggagttcttccaccacaaggccatgcagggcacagaggtgggccagacagaccagacagacagcactggaggccctgccttcctgagcaaggtggaggaggatgactaccccagcgaggagctgctggaggatgaaaatgccatcaatgccaagaggagcaaggagaagaaccctggcaaccagggccggcagtttgatgtgaacctgcaggtgcctgacagagctgtgctgggcaccatccacccagaccctgagattgaggagagcaagcaggagacctccatgatcctggacagcgagaagaccagcgagacagctgccaagggcgtgaacacaggaggccgggagcccaacaccatggtggagaaggagcggcccctggccgacaagaaggcccagaggccctttgagaggagtgacttcagtgacagcatcaagatccagaccccagagctgggggaggtgttccagaacaaggacagcgactacctgaagaatgacaaccctgaggagcacctgaagaccagcggcctggccggggagcctgagggggagctgagcaaagaagatcatgagaacacagagaagtacatgggcacagagagccagggcagcgctgctgctgagccagaagatgacagcttccactggaccccccacacctctgtggagcccggccacagcgacaagcgggaggacctgctgatcatcagcagcttcttcaaggagcagcagagcctgcagcgcttccagaagtacttcaacgtgcatgagctggaggccctgctgcaggagatgagcagcaagctgaagagcgcccagcaggagagcctgccctacaacatggagaaggtgctggacaaggtgttccgggccagcgagagccagatcctgagcattgctgagaagatgctggacaccagggtggctgaaaatagagacctgggcatgaatgaaaacaacatctttgaggaggccgctgtgctggatgacatccaggacctgatctactttgtgcgctacaagcacagcacagctgaggagacagccaccctggtgatggccccacccctggaggagggcctgggcggggccatggaggagatgcagcccctgcacgaggacaacttcagccgggagaagacagctgagctgaatgtgcaggtgcctgaggagcccacccacctggaccagagggtgattggagacacccacgccagcgaggtgtcccagaagcccaacacagagaaggacctggaccccggccctgtgaccacagaggacacccccatggatgccattgatgccaacaagcagcctgagacagctgctgaggagcccgcctctgtgacccccctggagaatgccatcctgctgatctacagcttcatgttctacctgaccaagagcctggtggccaccctgcctgatgatgtgcagcccggccctgacttctacggcctgccctggaagcctgtgttcatcacagccttcctgggcatcgccagctttgccatcttcctgtggaggacagtgctggtggtgaaggacagagtgtaccaggtgacagagcagcagatcagcgagaagctgaagaccatcatgaaggaaaatacagagctggtgcagaagctgagcaactatgagcagaagatcaaggagagcaagaagcacgtgcaggagaccaggaagcagaacatgatcctgagtgatgaggccatcaagtacaaggacaagatcaagaccctggagaagaaccaggagatcctggatgacacagccaagaacctgcgggtgatgctggagagcgagcgggagcagaatgtgaagaaccaggacctgctgcagcaggagattgaggactggagcaagctgcatgctgagctgtctgagcagatcaagagctttgagaagagccagaaggacctggaggtggccctgacccacaaggatgacaacatcaatgccctgaccaactgcatcacccagctgaacctgctggagtgtgagagcgagagcgagggccagaacaagggcggcaatgacagtgatgagctggccaacggggaggtgggcggggacagaaatgagaagatgaagaaccagatcaagcagatgatggatgtgtccaggacccagacagccatctctgtggtggaggaggacctgaagctgctgcagctgaagctgcgggcctctgtgtccaccaagtgcaacctggaggaccaggtgtag

SEQ ID NO: 159328 - DNA, 324 bp, synthetic construct
  misc_feature 1..324: note = Description of Artificial Sequence: Synthetic coding sequence
  source 1..324: mol_type = other DNA
tgaagtgctgaggccagcggcaagcccagccccagcgaccccggcagcggcacagccaccatgatgaacagcagcagccggggcagcagccccaccagggtgctggatgagggcaaggtgaacatggcccccaagggccccccacccttccctggggtgcccctgatgagcacccccatgggcggccctgtgcccccacccatccgctatggccccccaccccagctgtgtggccccttcggcccccggcccctgcccccaccatttgacaaggatggccggcccggcaccgtggcccacgcctgcaaccccagcaccctgtag

SEQ ID NO: 159329 - DNA, 1803 bp, synthetic construct
  misc_feature 1..1803: note = Description of Artificial Sequence: Synthetic coding sequence
  source 1..1803: mol_type = other DNA
atgggcaagaagctggacctgagcaagctgacagatgaggaggcccagcacgtgctggaggtggtgcagagggactttgacctgcggaggaaggaggaggagcggctggaggccctgaagggcaagatcaagaaggagagcagcaagcgggagctgctgagtgacacagcccacctgaatgagacccactgtgcccgctgcctgcagccctaccagctgctggtgaacagcaagaggcagtgcctggagtgtggcctcttcacctgcaagagctgtggccgggtgcaccctgaggagcagggctggatctgtgacccctgccacctggcccgggtggtgaagattggcagcctggagtggtactatgagcacgtgaaggcccgcttcaagcgcttcggcagcgccaaggtgatccgcagcctgcacggccgcctgcagggcggggccggccctgagctgatcagcgaggagaggtctggggacagcgaccagacagatgaagatggagagcccggcagcgaggcccaggcccaggcccagcccttcggcagcaagaagaagaggctgctgtctgtgcatgactttgattttgaaggagacagtgatgacagcacccagccccagggccacagcctgcacctgagctctgtgcctgaggcccgggacagcccccagagcctgacagatgagagctgcagcgagaaggccgccccccacaaggccgagggcctggaggaggccgacacaggagccagcggctgccacagccaccctgaggagcagcccaccagcatcagccccagccgccacggggccctggccgagctgtgccccccaggcggcagccacaggatggccctgggcacagctgctgccctgggcagcaatgtcatcagaaatgagcagctgcccctgcagtacctggctgatgtggacaccagtgatgaggagagcatccgggcccacgtgatggccagccaccacagcaagagaagaggccgggccagcagcgagagccagatctttgagctgaacaagcacatctctgctgtggagtgcctgctgacctacctggagaacacagtggtgccccccctggccaagggcctgggcgctggggtgaggacagaagcagatgtggaggaggaggccctgcggaggaagctggaggagctgaccagcaatgtgtctgaccaggagaccagcagcgaggaggaggaggccaaggatgagaaggccgagcccaacagagacaagtctgtgggccccctgccccaggccgaccctgaggtgggcacagctgcccaccagaccaaccggcaggagaagagcccccaggaccccggggaccctgtgcagtacaacagaaccacagatgaggagctgtctgagctggaggacagagtggccgtgacagccagcgaggtgcagcaggccgagagcgaggtgtctgacatcgagagcagaattgctgccctgcgggccgccggcctgactgtgaagcccagcggcaagcccaggaggaagagcaacctgcccatcttcctgccccgggtggccggcaagctgggcaagaggcctgaggaccccaatgctgaccccagcagcgaggccaaggccatggctgtgccctacctgctgcggaggaagttcagcaacagcctgaagagccagggcaaggatgatgacagctttgacaggaagtctgtgtaccggggcagcctgacccagaggaaccccaatgccaggaagggcatggccagccacacctttgccaagcctgtggtggcccaccagagctag

SEQ ID NO: 159330 - DNA, 1719 bp, synthetic construct
  misc_feature 1..1719: note = Description of Artificial Sequence: Synthetic coding sequence
  source 1..1719: mol_type = other DNA
atgggcaagaagctggacctgagcaagctgacagatgaggaggcccagcacgtgctggaggtggtgcagagggactttgacctgcggaggaaggaggaggagcggctggaggccctgaagggcaagatcaagaaggagagcagcaagcgggagctgctgagtgacacagcccacctgaatgagacccactgtgcccgctgcctgcagccctaccagctgctggtgaacagcaagaggcagtgcctggagtgtggcctcttcacctgcaagagctgtggccgggtgcaccctgaggagcagggctggatctgtgacccctgccacctggcccgggtggtgaagattggcagcctggagtggtactatgagcacgtgaaggcccgcttcaagcgcttcggcagcgccaaggtgatccgcagcctgcacggccgcctgcagggcggggccggccctgagctgatcagcgaggagaggtctggggacagcgaccagacagatgaagatggagagcccggcagcgaggcccaggcccaggcccagcccttcggcagcaagaagaagaggctgctgtctgtgcatgactttgattttgaaggagacagtgatgacagcacccagccccagggccacagcctgcacctgagctctgtgcctgaggcccgggacagcccccagagcctgacagatgagagctgcagcgagaaggccgccccccacaaggccgagggcctggaggaggccgacacaggagccagcggctgccacagccaccctgaggagcagcccaccagcatcagccccagccgccacggggccctggccgagctgtgccccccaggcggcagccacaggatggccctgggcacagctgctgccctgggcagcaatgtcatcagaaatgagcagctgcccctgcagtacctggctgatgtggacaccagtgatgaggagagcatccgggcccacgtgatggccagccaccacagcaagagaagaggccgggccagcagcgagagccagggcctgggcgctggggtgaggacagaagcagatgtggaggaggaggccctgcggaggaagctggaggagctgaccagcaatgtgtctgaccaggagaccagcagcgaggaggaggaggccaaggatgagaaggccgagcccaacagagacaagtctgtgggccccctgccccaggccgaccctgaggtgggcacagctgcccaccagaccaaccggcaggagaagagcccccaggaccccggggaccctgtgcagtacaacagaaccacagatgaggagctgtctgagctggaggacagagtggccgtgacagccagcgaggtgcagcaggccgagagcgaggtgtctgacatcgagagcagaattgctgccctgcgggccgccggcctgactgtgaagcccagcggcaagcccaggaggaagagcaacctgcccatcttcctgccccgggtggccggcaagctgggcaagaggcctgaggaccccaatgctgaccccagcagcgaggccaaggccatggctgtgccctacctgctgcggaggaagttcagcaacagcctgaagagccagggcaaggatgatgacagctttgacaggaagtctgtgtaccggggcagcctgacccagaggaaccccaatgccaggaagggcatggccagccacacctttgccaagcctgtggtggcccaccagagctag

SEQ ID NO: 159331 - DNA, 396 bp, synthetic construct
  misc_feature 1..396: note = Description of Artificial Sequence: Synthetic coding sequence
  source 1..396: mol_type = other DNA
atgggcaagaagctggacctgagcaagctgacagatgaggaggcccagcacgtgctggaggtggtgcagagggactttgacctgcggaggaaggaggaggagcggctggaggccctgaagggcaagatcaagaaggagagcagcaagcgggagctgctgagtgacacagcccacctgaatgagacccactgtgcccgctgcctgcagccctaccagctgctggtgaacagcaagaggcagtgcctggagtgtggcctcttcacctgcaagagctgtggccgggtgcaccctgaggagcagggctggatctgtgacccctgccacctggcccgggtggtgaagattggcagcctggagtggtactatgagcacgtgaaggcccgcttcaagaggtag

SEQ ID NO: 159332 - DNA, 213 bp, synthetic construct
  misc_feature 1..213: note = Description of Artificial Sequence: Synthetic coding sequence
  source 1..213: mol_type = other DNA
atgggcaagaagctggacctgagcaagctgacagatgaggaggcccagcacgtgctggaggtggtgcagagggactttgacctgcggaggaaggaggaggagcggctggaggccctgaagggcaagatcaagaaggagagcagcaagcgggagctgctgagtgacacagcccacctgaatgagacccactgtgcccgctgcctgcagccctag

SEQ ID NO: 159333 - DNA, 1656 bp, synthetic construct
  misc_feature 1..1656: note = Description of Artificial Sequence: Synthetic coding sequence
  source 1..1656: mol_type = other DNA
atgggcaagaagctggacctgagcaagctgacagatgaggaggcccagcacgtgctggaggtggtgcagagggactttgacctgcggaggaaggaggaggagcggctggaggccctgaagggcaagatcaagaaggagagcagcaagcgggagctgctgagtgacacagcccacctgaatgagacccactgtgcccgctgcctgcagccctaccagctgctggtgaacagcaagaggcagtgcctggagtgtggcctcttcacctgcaagagctgtggccgggtgcaccctgaggagcagggctggatctgtgacccctgccacctggcccgggtggtgaagattggcagcctggagtggtactatgagcacgtgaaggcccgcttcaagcgcttcggcagcgccaaggtgatccgcagcctgcacggccgcctgcagggcggggccggccctgagctgatcagcgaggagaggtctggggacagcgaccagacagatgaagatggagagcccggcagcgaggcccaggcccaggcccagcccttcggcagcaagaagaagaggctgctgtctgtgcatgactttgattttgaaggagacagtgatgacagcacccagccccagggccacagcctgcacctgagctctgtgcctgaggcccgggacagcccccagagcctgacagatgagagctgcagcgagaaggccgccccccacaaggccgagggcctggaggaggccgacacaggagccagcggctgccacagccaccctgaggagcagcccaccagcatcagccccagccgccacggggccctggccgagctgtgccccccaggcggcagccacaggatggccctgggcacagctgctgccctgggcagcaatgtcatcagaaatgagcagctgcccctgcagtacctggctgatgtggacaccagtgatgaggagagcatccgggcccacgtgatggccagccaccacagcaagagaagaggccgggccagcagcgagagccagatctttgagctgaacaagcacatctctgctgtggagtgcctgctgacctacctggagaacacagtggtgccccccctggccaagggcctgggcgctggggtgaggacagaagcagatgtggaggaggaggccctgcggaggaagctggaggagctgaccagcaatgtgtctgaccaggagaccagcagcgaggaggaggaggccaaggatgagaaggccgagcccaacagagacaagtctgtgggccccctgccccaggccgaccctgaggtgggcacagctgcccaccagaccaaccggcaggagaagagcccccaggaccccggggaccctgtgcagtacaacagaaccacagatgaggagctgtctgagctggaggacagagtggccgtgacagccagcgaggtgcagcaggccgagagcgaggtgtctgacatcgagagcagaattgctgccctgcgggccgccggcctgactgtgaagcccagcggcaagcccaggaggaagagcaacctgcctgccctgtatgagggcaccctgagcctgtgcagcgaggacctgaagcacacccacccagacagcgtgaagagcaagaggagccggctgaaccacgtggccagctgtggcaacccctag

SEQ ID NO: 159334 - DNA, 675 bp, synthetic construct
  misc_feature 1..675: note = Description of Artificial Sequence: Synthetic coding sequence
  source 1..675: mol_type = other DNA
atgggcctgcgggactggctgaggacagtgtgctgctgctgcggctgtgaatgtctggaggagcgggccctgcctgagaaggagcccctggtgtctgacaacaacccctacagcagctttggagccaccctggtgagagatgatgagaagaacctgtggagcatgcctcatgatgtgagccacacagaagcagatgatgacaggaccctgtacaacctgattgtcatccggaaccagcaggccaaggacagcgaggagtggcagaagctgaactatgacatccacaccctgcggcaggtgagaagagaggtgaggaaccgctggaagtgcatcctggaggacctgggcttccagaaggaggccgacagcctgctgtctgtgaccaagctgagcaccatcagtgacagcaagaacaccaggaaggcccgggagatgctgctgaagctggccgaggagaccaacatcttccccacctcctgggagctgtctgagcgctacctgtttgtggtggacaggctcatcgccctggatgctgctgaggagttcttcaagctggcccggaggacctaccccaagaagccaggagtgccctgcctggctgatggccagaaggagctgcacctgtggggagacctgagctgccgcctggcccacatgcagggcgtgctgcactag

SEQ ID NO: 159335 - DNA, 645 bp, synthetic construct
  misc_feature 1..645: note = Description of Artificial Sequence: Synthetic coding sequence
  source 1..645: mol_type = other DNA
atgggcctgcgggactggctgaggacagtgtgctgctgctgcggctgtgaatgtctggaggagcgggccctgcctgagaaggagcccctggtgtctgacaacaacccctacagcagctttggagccaccctggtgagagatgatgagaagaacctgtggagcatgcctcatgatgtgagccacacagaagcagatgatgacaggaccctgtacaacctgattgtcatccggaaccagcaggccaaggacagcgaggagtggcagaagctgaactatgacatccacaccctgcggcaggtgagaagagaggtgaggaaccgctggaagtgcatcctggaggacctgggcttccagaaggaggccgacagcctgctgtctgtgaccaagctgagcaccatcagtgacagcaagaacaccaggaaggcccgggagatgctgctgaagctggccgaggagaccaacatcttccccacctcctgggagctgtctgagcgctacctgtttgtggtggacaggctcatcgccctggatgctgctgaggagttcttcaagctggcccggaggacctaccccaagaagccaggagtgccctgcctggctgatggccagaaggagctgcactacctgcccttccccagcccctag

SEQ ID NO: 159336 - DNA, 645 bp, synthetic construct; identical to SEQ ID NO: 159335
  misc_feature 1..645: note = Description of Artificial Sequence: Synthetic coding sequence
  source 1..645: mol_type = other DNA

SEQ ID NO: 159337 - DNA, 1053 bp, synthetic construct
  misc_feature 1..1053: note = Description of Artificial Sequence: Synthetic coding sequence
  source 1..1053: mol_type = other DNA
atgcagggcaatggcagcgccctgcccaatgccagccagcctgtgctgcggggagatggagcccggcccagctggctggccagcgccctggcctgtgtgctgatcttcaccatcgtggtggacatcctgggcaacctgctggtgatcctgtctgtgtacagaaacaagaagctgagaaatgccggcaacatctttgtggtgtccctggccgtggccgacctggtggtggccatctacccctaccccctggtgctgatgagcatcttcaacaacggctggaacctgggctacctgcactgccaggtgtctggcttcctgatgggcctgagcgtcatcggcagcatcttcaacatcactggaattgccatcaaccgctactgctacatctgccacagcctgaagtatgacaagctgtacagcagcaagaacagcctgtgctacgtgctgctgatctggctgctgaccctggccgctgtgctgcccaacctgcgggccggcaccctgcagtatgacccccgcatctacagctgcacctttgcccagagcgtgtcctctgcctacaccatcgctgtggtggtgttccacttcctggtgcccatgatcatcgtcatcttctgctacctgcgcatctggatcctggtgctgcaggtgcggcagagggtgaagccagacaggaagcccaagctgaagccccaggacttcaggaactttgtgaccatgtttgtggtgtttgtgctgtttgccatctgctgggcccccctgaacttcatcggcctggccgtggccagtgaccctgcctccatggtgccccgcatccctgagtggctgtttgtggccagctactacatggcctacttcaacagctgcctgaatgccatcatctacggcctgctgaaccagaacttcaggaaggagtaccgccgcatcatcgtgtccctgtgcacagcccgggtcttctttgtggacagcagcaatgatgtggccgacagagtgaagtggaagcccagccccctgatgaccaacaacaacgtggtgaaggtggacagcgtgtag

SEQ ID NO: 159338 - DNA, 1089 bp, synthetic construct
  misc_feature 1..1089: note = Description of Artificial Sequence: Synthetic coding sequence
  source 1..1089: mol_type = other DNA
atgtctgaaaatggcagctttgccaactgctgtgaggccggcggctgggccgtgcggcccggctggagcggggccggcagcgcccggcccagcaggaccccccggcccccctgggtggccccagccctgtctgctgtgctgattgtgaccacagctgtggatgtggtgggcaacctgctggtgatcctgtctgtgctgaggaacaggaagctgagaaatgccggcaacctcttcctggtgtccctggccctggccgacctggtggtggccttctacccctaccccctcatcctggtggccatcttctatgatggctgggccctgggggaggagcactgcaaggccagcgcctttgtgatgggcctgtctgtgattggctctgtgttcaacatcacagccatcgccatcaaccgctactgctacatctgccacagcatggcctaccaccgcatctaccgccgctggcacacccccctgcacatctgcctgatctggctgctgactgtggtggccctgctgcccaacttctttgtgggcagcctggagtatgacccccgcatctacagctgcaccttcatccagacagccagcacccagtacacagctgctgtggtggtgatccacttcctgctgcccatcgctgtggtgtccttctgctacctgcgcatctgggtgctggtgctgcaggcccggaggaaggccaagccagagagccggctgtgcctgaagcccagcgacctgcgctccttcctgaccatgtttgtggtgtttgtgatctttgccatctgctgggcccccctgaactgcatcggcctggccgtggccatcaacccccaggagatggccccccagatccctgagggcctgtttgtgaccagctacctgctggcctacttcaacagctgcctgaatgccatcgtgtatggcctgctgaaccagaacttccggcgggagtacaagaggatcctgctggccctgtggaaccccaggcactgcatccaggatgccagcaagggcagccacgccgagggcctgcagagccctgccccacccatcattggagtgcagcaccaggctgatgccctgtag

SEQ ID NO: 159339 - DNA, 3864 bp, synthetic construct
  misc_feature 1..3864: note = Description of Artificial Sequence: Synthetic coding sequence
  source 1..3864: mol_type = other DNA
atgagcaaggtgatccagaagaagaaccactggaccagccgggtgcatgaatgtactgtgaagaggggcccccagggcgagctgggcgtgacagtgctgggcggcgctgagcacggggagttcccctacgtgggcgctgtggccgctgtggaggccgccggcctgcccggcggcggggagggcccccggctgggggagggggagctgctgctggaggtgcagggcgtgcgggtgtctggcctgcccaggtatgatgtgctgggcgtcatcgacagctgcaaggaggccgtgaccttcaaggctgtgcggcagggcggccgcctgaacaaggacctgcggcacttcctgaaccagcgcttccagaagggcagcccagaccacgagctgcagcagaccatccgggacaacctgtacagacatgctgtgccctgcaccaccaggagcccccgggagggggaggtgcctggggtggactacaacttcctgactgtgaaggagttcctggacctggagcagagcggcaccctgctggaggtgggcacctatgagggcaactactacggcacccccaagccacccagccagcctgtgtctgggaaggtgatcaccacagatgccctgcacagcctgcagagcggcagcaagcagagcacccccaagaggaccaagagctacaatgacatgcagaatgccggcatcgtgcatgctgaaaatgaggaggaggatgatgtgcctgagatgaacagcagcttcaccgctgacagcggggagcaggaggagcacaccctgcaggagacagccctgccccctgtgaacagcagcatcatcgccgcccccatcacagaccccagccagaagttcccccagtacctgcccctgtctgctgaggacaacctgggccccctgcctgagaactgggagatggcctacacagaaaatggagaggtgtacttcatcgaccacaacaccaagaccacctcctggctggacccccgctgcctgaacaagcagcagaagcccctggaggagtgtgaagatgatgaaggagtgcacacagaggagctggacagcgagctggagctgcctgctggctgggagaagattgaagatcctgtgtatggcatctactacgtggaccacatcaacaggaagacccagtatgagaaccctgtgctggaggccaagaggaagaagcagctggagcagcagcagcagcagcagcagcagcagcagcagcagcagcagcagcagcagcagcagcagacagaggagtggacagaggaccacagcgccctggtgccccctgtgatccccaaccacccccccagcaaccctgagcccgcccgggaggtgcccctgcagggcaagcccttcttcaccaggaaccccagcgagctgaagggcaagttcatccacaccaagctgaggaagagcagccggggcttcggcttcaccgtggtgggcggagatgagccagatgagttcctgcagatcaagagcctggtgctggatggccctgctgccctggatggcaagatggagactggagatgtgattgtgtctgtgaatgacacctgtgtgctgggccacacccacgcccaggtggtgaagatcttccagagcatccccatcggggcctctgtggacctggagctgtgccggggctaccccctgccctttgatcctgatgaccccaacaccagcctggtgacctctgtggccatcctggacaaggagcccatcatcgtgaatggccaggagacctatgacagccctgccagccacagcagcaagacaggcaaggtgaatggcatgaaggatgcccggcccagcagccctgcagatgtggccagcaacagcagccacggctacccaaatgacacagtgtccctggccagcagcatcgccacccagcctgagctgatcaccgtgcacatcgtgaagggccccatgggcttcggcttcaccatcgctgacagccctgggggcggcggccagagggtgaagcagatcgtggacagcccccgctgccggggcctgaaggagggggacctgattgtggaggtgaacaagaagaatgtgcaggccctgacccacaaccaggtggtggacatgctggtggagtgccccaagggcagcgaggtgaccctgctggtgcagaggggcggcctgcctgtgcccaagaagagccccaagagccagcccctggagaggaaggacagccagaacagcagccagcacagcgtgagcagccacaggagcctgcacacagccagccccagccacagcacccaggtgctgcctgagttccccccagctgaggcccaggccccagaccagacagacagcagcggccagaagaagccagaccccttcaagatctgggcccagagccgctccatgtatgaaaatcggcccatgagccccagccctgccagcggcctgagcaaaggagagcgggagcgggagatcaacagcaccaactttggagaatgtcccatcccagactaccaggagcaggacatcttcctgtggaggaaggagactggatttggcttccgcatcctgggcggcaatgaacctggagagcccatctacatcggccacatcgtgcccctgggcgctgctgacacagatggccgcctgcggtctggagatgagctgatctgtgtggatggcacccctgtgattggcaagagccaccagctggtggtgcagctgatgcagcaggccgccaagcagggccacgtgaacctgactgtgcggaggaaggtggtgtttgctgtgcccaagacagaaaatgaggtgcccagccctgccagcagccaccacagcagcaaccagcctgccagcctgacagaggagaagaggaccccccagggcagccagaacagcctgaacacagtgagcagcggcagcggcagcaccagcggcatcggcagcggcggcggcggcggcagcggcgtggtgtccacagtggtgcagccctatgatgtggagatcagaagaggagaaaatgaaggatttggatttgtgattgtgtcctctgtgtccaggcctgaggccggcaccacctttggaaatgcctgtgtggccatgccccacaagattggccgcatcatcgagggcagccctgctgacagatgtgggaagctgaaggtgggggaccgcatcctggccgtgaatggctgcagcatcaccaacaagagccacagcgacatcgtgaacctgatcaaggaggccggcaacacagtgaccctgcgcatcatccctggagatgagagcagcaatgccaccctgctgaccaatgctgagaagatcgccaccatcaccaccacccacacccccagccagcagggcacccaggagaccaggaacaccaccaagcccaagcaggagagccagtttgagttcaaggccccccaggccacccaggagcaggacttctacacagtggagctggagcggggggccaagggcttcggcttcagcctgcggggcggccgggagtacaacatggacctgtatgtgctgcggctggccgaggatggccctgctgagcgctgtgggaagatgagaattggagatgagatcctggagatcaacggggagaccaccaagaacatgaagcacagccgggccatcgagctgatcaagaatggaggaagaagagtgcggctcttcctgaagagaggagatggctctgtgcctgaatatgccatgatcccccccaacattgctgcctgcatgagaaatgagaagctgggggaggcctgcttctacctgatgggccacaaccagaccaccaccccagctgccacagccacagcccctcctcctgtgcacaaggtgttcaggaagtag

SEQ ID NO: 159340 - DNA, 4389 bp, synthetic construct
  misc_feature 1..4389: note = Description of Artificial Sequence: Synthetic coding sequence
  source 1..4389: mol_type = other DNA
atgagcaaggtgatccagaagaagaaccactggaccagccgggtgcatgaatgtactgtgaagaggggcccccagggcgagctgggcgtgacagtgctgggcggcgctgagcacggggagttcccctacgtgggcgctgtggccgctgtggaggccgccggcctgcccggcggcggggagggcccccggctgggggagggggagctgctgctggaggtgcagggcgtgcgggtgtctggcctgcccaggtatgatgtgctgggcgtcatcgacagctgcaaggaggccgtgaccttcaaggctgtgcggcagggcggccgcctgaacaaggacctgcggcacttcctgaaccagcgcttccagaagggcagcccagaccacgagctgcagcagaccatccgggacaacctgtacagacatgctgtgccctgcaccaccaggagcccccgggagggggaggtgcctggggtggactacaacttcctgactgtgaaggagttcctggacctggagcagagcggcaccctgctggaggtgggcacctatgagggcaactactacggcacccccaagccacccagccagcctgtgtctgggaaggtgatcaccacagatgccctgcacagcctgcagagcggcagcaagcagagcacccccaagaggaccaagagctacaatgacatgcagaatgccggcatcgtgcatgctgaaaatgaggaggaggatgatgtgcctgagatgaacagcagcttcaccgctgacagcggggagcaggaggagcacaccctgcaggagacagccctgccccctgtgaacagcagcatcatcgccgcccccatcacagaccccagccagaagttcccccagtacctgcccctgtctgctgaggacaacctgggccccctgcctgagaactgggagatggcctacacagaaaatggagaggtgtacttcatcgaccacaacaccaagaccacctcctggctggacccccgctgcctgaacaagcagcagaagcccctggaggagtgtgaagatgatgaaggagtgcacacagaggagctggacagcgagctggagctgcctgctggctgggagaagattgaagatcctgtgtatggcatctactacgtggaccacatcaacaggaagacccagtatgagaaccctgtgctggaggccaagaggaagaagcagctggagcagcagcagcagcagcagcagcagcagcagcagcagcagcagcagcagcagcagcagcagacagaggagtggacagaggaccacagcgccctggtgccccctgtgatccccaaccacccccccagcaaccctgagcccgcccgggaggtgcccctgcagggcaagcccttcttcaccaggaaccccagcgagctgaagggcaagttcatccacaccaagctgaggaagagcagccggggcttcggcttcaccgtggtgggcggagatgagccagatgagttcctgcagatcaagagcctggtgctggatggccctgctgccctggatggcaagatggagactggagatgtgattgtgtctgtgaatgacacctgtgtgctgggccacacccacgcccaggtggtgaagatcttccagagcatccccatcggggcctctgtggacctggagctgtgccggggctaccccctgccctttgatcctgatgaccccaacaccagcctggtgacctctgtggccatcctggacaaggagcccatcatcgtgaatggccaggagacctatgacagccctgccagccacagcagcaagacaggcaaggtgaatggcatgaaggatgcccggcccagcagccctgcagatgtggccagcaacagcagccacggctacccaaatgacacagtgtccctggccagcagcatcgccacccagcctgagctgatcaccgtgcacatcgtgaagggccccatgggcttcggcttcaccatcgctgacagccctgggggcggcggccagagggtgaagcagatcgtggacagcccccgctgccggggcctgaaggagggggacctgattgtggaggtgaacaagaagaatgtgcaggccctgacccacaaccaggtggtggacatgctggtggagtgccccaagggcagcgaggtgaccctgctggtgcagaggggcggcctgcctgtgcccaagaagagccccaagagccagcccctggagaggaaggacagccagaacagcagccagcacagcgtgagcagccacaggagcctgcacacagccagccccagccacagcacccaggtgctgcctgagttccccccagctgaggcccaggccccagaccagacagacagcagcggccagaagaagccagaccccttcaagatctgggcccagagccgctccatgtatgaaaatcggctgcctgactaccaggagcaggacatcttcctgtggaggaaggagactggatttggcttccgcatcctgggcggcaatgaacctggagagcccatctacatcggccacatcgtgcccctgggcgctgctgacacagatggccgcctgcggtctggagatgagctgatctgtgtggatggcacccctgtgattggcaagagccaccagctggtggtgcagctgatgcagcaggccgccaagcagggccacgtgaacctgactgtgcggaggaaggtggtgtttgctgtgcccaagacagaaaatgaggtgcccagccctgccagcagccaccacagcagcaaccagcctgccagcctgacagaggagaagaggaccccccagggcagccagaacagcctgaacacagtgagcagcggcagcggcagcaccagcggcatcggcagcggcggcggcggcggcagcggcgtggtgtccacagtggtgcagccctatgatgtggagatcagaagaggagaaaatgaaggatttggatttgtgattgtgtcctctgtgtccaggcctgaggccggcaccacctttggaaatgcctgtgtggccatgccccacaagattggccgcatcatcgagggcagccctgctgacagatgtgggaagctgaaggtgggggaccgcatcctggccgtgaatggctgcagcatcaccaacaagagccacagcgacatcgtgaacctgatcaaggaggccggcaacacagtgaccctgcgcatcatccctggagatgagagcagcaatgccaccctgctgaccaatgctgagaagatcgccaccatcaccaccacccacacccccagccagcagggcacccaggagaccaggaacaccaccaagcccaagcaggagagccagtttgagttcaaggccccccaggccacccaggagcaggacttctacacagtggagctggagcggggggccaagggcttcggcttcagcctgcggggcggccgggagtacaacatggacctgtatgtgctgcggctggccgaggatggccctgctgagcgctgtgggaagatgagaattggagatgagatcctggagatcaacggggagaccaccaagaacatgaagcacagccgggccatcgagctgatcaagaatggaggaagaagagtgcggctcttcctgaagagaggagatggctctgtgcctgaatatgaccccagcagtgacagacatggccctgccaccggcccccagggcgtgcctgaggtgcgggccggccctgaccggcggcagcaccccagcctggagagcagctaccccccagacctgcacaagagcagcccccacggggagaagagggcccacgcccgggaccccaagggcagccgggagtacagccggcagcccaatgagcaccacacctggaatggcaccagcaggaagccagattctggggcctgccggcccaaggaccgggcccctgagggcagaagagatgcccaggccgagagagctgctgctgccaacggccccaagaggaggagccctgagaagaggcgggagggcaccaggtctgctgacaacaccctggagcggcgggagaagcatgagaagagaagagatgtgtccccagagcggcggcgggagaggagccccaccaggagaagagatggcagccccagcagaagaagaagaagcctggagcggctgctggagcagaggaggagccctgagaggagaagaggaggcagccctgagcggcgggccaagagcacagacagaagaagagcccggagccctgagcggcggcgggagaggagcctggacaagaggaacagagaagatcgggccagccaccgggagcgggaggaggccaacctgaagcaggatgctggccgcagcagccgccaccccccagagcagaggcggcggccctacaaggaatgttccacagacctgagcatctag

SEQ ID NO: 159341 - DNA, 3552 bp, synthetic construct
  misc_feature 1..3552: note = Description of Artificial Sequence: Synthetic coding sequence
  source 1..3552: mol_type = other DNA
gggggccgcctgaacaaggacctgcggcacttcctgaaccagcgcttccagaagggcagcccagaccacgagctgcagcagaccatccgggacaacctgtacagacatgctgtgccctgcaccaccaggagcccccgggagggggaggtgcctggggtggactacaacttcctgactgtgaaggagttcctggacctggagcagagcggcaccctgctggaggtgggcacctatgagggcaactactacggcacccccaagccacccagccagcctgtgtctgggaaggtgatcaccacagatgccctgcacagcctgcagagcggcagcaagcagagcacccccaagaggaccaagagctacaatgacatgcagaatgccggcatcgtgcatgctgaaaatgaggaggaggatgatgtgcctgagatgaacagcagcttcaccgctgacagcggggagcaggaggagcacaccctgcaggagacagccctgccccctgtgaacagcagcatcatcgccgcccccatcacagaccccagccagaagttcccccagtacctgcccctgtctgctgaggacaacctgggccccctgcctgagaactgggagatggcctacacagaaaatggagaggtgtacttcatcgaccacaacaccaagaccacctcctggctggacccccgctgcctgaacaagcagcagaagcccctggaggagtgtgaagatgatgaaggagtgcacacagaggagctggacagcgagctggagctgcctgctggctgggagaagattgaagatcctgtgtatggcatctactacgtggaccacatcaacaggaagacccagtatgagaaccctgtgctggaggccaagaggaagaagcagctggagcagcagcagcagcagcagcagcagcagcagcagcagcagcagcagcagcagcagcagcagacagaggagtggacagaggaccacagcgccctggtgccccctgtgatccccaaccacccccccagcaaccctgagcccgcccgggaggtgcccctgcagggcaagcccttcttcaccaggaaccccagcgagctgaagggcaagttcatccacaccaagctgaggaagagcagccggggcttcggcttcaccgtggtgggcggagatgagccagatgagttcctgcagatcaagagcctggtgctggatggccctgctgccctggatggcaagatggagactggagatgtgattgtgtctgtgaatgacacctgtgtgctgggccacacccacgcccaggtggtgaagatcttccagagcatccccatcggggcctctgtggacctggagctgtgccggggctaccccctgccctttgatcctgatgaccccaacaccagcctggtgacctctgtggccatcctggacaaggagcccatcatcgtgaatggccaggagacctatgacagccctgccagccacagcagcaagacaggcaaggtgaatggcatgaaggatgcccggcccagcagccctgcagatgtggccagcaacagcagccacggctacccaaatgacacagtgtccctggccagcagcatcgccacccagcctgagctgatcaccgtgcacatcgtgaagggccccatgggcttcggcttcaccatcgctgacagccctgggggcggcggccagagggtgaagcagatcgtggacagcccccgctgccggggcctgaaggagggggacctgattgtggaggtgaacaagaagaatgtgcaggccctgacccacaaccaggtggtggacatgctggtggagtgccccaagggcagcgaggtgaccctgctggtgcagaggggcggcctgcctgtgcccaagaagagccccaagagccagcccctggagaggaaggacagccagaacagcagccagcacagcgtgagcagccacaggagcctgcacacagccagccccagccacagcacccaggtgctgcctgagttccccccagctgaggcccaggccccagaccagacagacagcagcggccagaagaagccagaccccttcaagatctgggcccagagccgctccatgtatgaaaatcggcccatgagccccagccctgccagcggcctgagcaaaggagagcgggagcgggagatcaacagcaccaactttggagaatgtcccatcccagactaccaggagcaggacatcttcctgtggaggaaggagactggatttggcttccgcatcctgggcggcaatgaacctggagagcccatctacatcggccacatcgtgcccctgggcgctgctgacacagatggccgcctgcggtctggagatgagctgatctgtgtggatggcacccctgtgattggcaagagccaccagctggtggtgcagctgatgcagcaggccgccaagcagggccacgtgaacctgactgtgcggaggaaggtggtgtttgctgtgcccaagacagaaaatgaggtgcccagccctgccagcagccaccacagcagcaaccagcctgccagcctgacagaggagaagaggaccccccagggcagccagaacagcctgaacacagtgagcagcggcagcggcagcaccagcggcatcggcagcggcggcggcggcggcagcggcgtggtgtccacagtggtgcagccctatgatgtggagatcagaagaggagaaaatgaaggatttggatttgtgattgtgtcctctgtgtccaggcctgaggccggcaccacctttggaaatgcctgtgtggccatgccccacaagattggccgcatcatcgagggcagccctgctgacagatgtgggaagctgaaggtgggggaccgcatcctggccgtgaatggctgcagcatcaccaacaagagccacagcgacatcgtgaacctgatcaaggaggccggcaacacagtgaccctgcgcatcatccctggagatgagagcagcaatgccaccctgctgaccaatgctgagaagatcgccaccatcaccaccacccacacccccagccagcagggcacccaggagaccaggaacaccaccaagcccaagcaggagagccagtttgagttcaaggccccccaggccacccaggagcaggacttctacacagtggagctggagcggggggccaagggcttcggcttcagcctgcggggcggccgggagtacaacatggacctgtatgtgctgcggctggccgaggatggccctgctgagcgctgtgggaagatgagaattggagatgagatcctggagatcaacggggagaccaccaagaacatgaagcacagccgggccatcgagctgatcaagaatggaggaagaagagtgcggctcttcctgaagagaggagatggctctgtgcctgaatatgccatgatcccccccaacattgctgcctgcatgagaaatgagaagctgggggaggcctgcttctacctgatgggccacaaccagaccaccaccccagctgccacagccacagcccctcctcctgtgcacaaggtgttcaggaagtag

SEQ ID NO: 159342 - DNA, 3771 bp, synthetic construct
  misc_feature 1..3771: note = Description of Artificial Sequence: Synthetic coding sequence
  source 1..3771: mol_type = other DNA
atgagcaaggtgatccagaagaagaaccactggaccagccgggtgcatgaatgtactgtgaagaggggcccccagggcgagctgggcgtgacagtgctgggcggcgctgagcacggggagttcccctacgtgggcgctgtggccgctgtggaggccgccggcctgcccggcggcggggagggcccccggctgggggagggggagctgctgctggaggtgcagggcgtgcgggtgtctggcctgcccaggtatgatgtgctgggcgtcatcgacagctgcaaggaggccgtgaccttcaaggctgtgcggcagggcggccgcctgaacaaggacctgcggcacttcctgaaccagcgcttccagaagggcagcccagaccacgagctgcagcagaccatccgggacaacctgtacagacatgctgtgccctgcaccaccaggagcccccgggagggggaggtgcctggggtggactacaacttcctgactgtgaaggagttcctggacctggagcagagcggcaccctgctggaggtgggcacctatgagggcaactactacggcacccccaagccacccagccagcctgtgtctgggaaggtgatcaccacagatgccctgcacagcctgcagagcggcagcaagcagagcacccccaagaggaccaagagctacaatgacatgcagaatgccggcatcgtgcatgctgaaaatgaggaggaggatgatgtgcctgagatgaacagcagcttcaccgctgacagcggggagcaggaggagcacaccctgcaggagacagccctgccccctgtgaacagcagcatcatcgccgcccccatcacagaccccagccagaagttcccccagtacctgcccctgtctgctgaggacaacctgggccccctgcctgagaactgggagatggcctacacagaaaatggagaggtgtacttcatcgaccacaacaccaagaccacctcctggctggacccccgctgcctgaacaagcagcagaagcccctggaggagtgtgaagatgatgaaggagtgcacacagaggagctggacagcgagctggagctgcctgctggctgggagaagattgaagatcctgtgtatggcatctactacgtggaccacatcaacaggaagacccagtatgagaaccctgtgctggaggccaagaggaagaagcagctggagcagcagcagcagcagcagcagcagcagcagcagcagcagcagcagcagcagcagcagcagacagaggagtggacagaggaccacagcgccctggtgccccctgtgatccccaaccacccccccagcaaccctgagcccgcccgggaggtgcccctgcagggcaagcccttcttcaccaggaaccccagcgagctgaagggcaagttcatccacaccaagctgaggaagagcagccggggcttcggcttcaccgtggtgggcggagatgagccagatgagttcctgcagatcaagagcctggtgctggatggccctgctgccctggatggcaagatggagactggagatgtgattgtgtctgtgaatgacacctgtgtgctgggccacacccacgcccaggtggtgaagatcttccagagcatccccatcggggcctctgtggacctggagctgtgccggggctaccccctgccctttgatcctgatgaccccaacaccagcctggtgacctctgtggccatcctggacaaggagcccatcatcgtgaatggccaggagacctatgacagccctgccagccacagcagcaagacaggcaaggtgaatggcatgaaggatgcccggcccagcagccctgcagatgtggccagcaacagcagccacggctacccaaatgacacagtgtccctggccagcagcatcgccacccagcctgagctgatcaccgtgcacatcgtgaagggccccatgggcttcggcttcaccatcgctgacagccctgggggcggcggccagagggtgaagcagatcgtggacagcccccgctgccggggcctgaaggagggggacctgattgtggaggtgaacaagaagaatgtgcaggccctgacccacaaccaggtggtggacatgctggtggagtgccccaagggcagcgaggtgaccctgctggtgcagaggggcggcctgcctgtgcccaagaagagccccaagagccagcccctggagaggaaggacagccagaacagcagccagcacagcgtgagcagccacaggagcctgcacacagccagccccagccacagcacccaggtgctgcctgagttccccccagctgaggcccaggccccagaccagacagacagcagcggccagaagaagccagaccccttcaagatctgggcccagagccgctccatgtatgaaaatcggcccatgagccccagccctgccagcggcctgagcaaaggagagcgggagcgggagatcaacagcaccaactttggagaatgtcccatcccagactaccaggagcaggacatcttcctgtggaggaaggagactggatttggcttccgcatcctgggcggcaatgaacctggagagcccatctacatcggccacatcgtgcccctgggcgctgctgacacagatggccgcctgcggtctggagatgagctgatctgtgtggatggcacccctgtgattggcaagagccaccagctggtggtgcagctgatgcagcaggccgccaagcagggccacgtgaacctgactgtgcggaggaaggtggtgtttgctgtgcccaagacagaaaatgaggtgcccagccctgccagcagccaccacagcagcaaccagcctgccagcctgacagaggagaagaggaccccccagggcagccagaacagcctgaacacagtgagcagcggcagcggcagcaccagcggcatcggcagcggcggcggcggcggcagcggcgtggtgtccacagtggtgcagccctatgatgtggagatcagaagaggagaaaatgaaggatttggatttgtgattgtgtcctctgtgtccaggcctgaggccggcaccacctttgctggaaatgcctgtgtggccatgccccacaagattggccgcatcatcgagggcagccctgctgacagatgtgggaagctgaaggtgggggaccgcatcctggccgtgaatggctgcagcatcaccaacaagagccacagcgacatcgtgaacctgatcaaggaggccggcaacacagtgaccctgcgcatcatccctggagatgagagcagcaatgccaccctgctgaccaatgctgagaagatcgccaccatcaccaccacccacacccccagccagcagggcacccaggagaccaggaacaccaccaagcccaagcaggagagccagtttgagttcaaggccccccaggccacccaggagcaggacttctacacagtggagctggagcggggggccaagggcttcggcttcagcctgcggggcggccgggagtacaacatggacctgtatgtgctgcggctggctgaagatggccctgctgagcgctgtgggaagatgagaattggagatgagatcctggagatcaatggagagaccaccaagaacatgaagcacagccgggccatcgagctgatcaagaatggaggccggcgggtgcggctcttcctgaagagaggagatggctctgtgcctgaatatggaggcagcaactatgagaacatccccagcttccctggcatgaccccctag

SEQ ID NO: 159343 - DNA, 1488 bp, synthetic construct
  misc_feature 1..1488: note = Description of Artificial Sequence: Synthetic coding sequence
  source 1..1488: mol_type = other DNA
atggctgctgagccccagcccagcagcctgagctaccgcaccaccggcagcacctacctgcaccccctgtctgagctgctgggcatccccctggaccaggtgaactttgtggtgtgccagctggtggccctgtttgctgccttctggttccgcatctacctgcggcccggcaccaccagcagtgatgtgagacatgctgtggccaccatcttcggcatctactttgtgatcttctgcttcggctggtacagcgtgcacctgtttgtgctggtgctgatgtgctacgccatcatggtgacagcctctgtgagcaacatccaccgctacagcttctttgtggccatgggctacctgaccatctgccacatcagccgcatctacatcttccactacggcatcctgaccacagacttcagcggccccctgatgattgtgacccagaagatcaccaccctggccttccaggtgcatgatggcctgggccggcgggcagaggacctgtctgctgagcagcaccggctggccatcaaggtgaagcccagcttcctggagtacctgagctacctgctgaacttcatgtctgtgattgctggcccctgcaacaacttcaaggactacatcgccttcatcgagggcaagcacatccacatgaagctgctggaggtgaactggaagaggaagggcttccacagcctgcctgagcccagccccaccggggccgtcatccacaagctgggcatcaccctggtgtccctgctgctcttcctgaccctgaccaagaccttccctgtgacctgcctggtggatgactggtttgtgcacaaggccagcttccctgcccggctgtgctacctgtatgtggtgatgcaggccagcaagcccaagtactactttgcctggaccctggctgatgctgtgaacaatgctgctggcttcggcttctctggagtggacaagaatggaaacttctgctgggacctgctgagcaacctgaacatctggaagattgaaacagccaccagcttcaagatgtacctggagaactggaacatccagacagccacctggctgaagtgtgtgtgctaccagagggtgccctggtaccccaccgtgctgaccttcatcctgagcgccctgtggcatggagtgtacccaggctactacttcaccttcctgaccggcatcctggtgaccctggccgcccgggctgtgaggaacaactaccgccactacttcctgagcagccgggccctgaaggctgtgtatgatgctggcacctgggccgtgacccagctggccgtgtcctacacagtggccccctttgtgatgctggccgtggagcccaccatcagcctgtacaagtccatgtacttctacctgcacatcatcagcctgctgatcatcctcttcctgcccatgaagccccaggcccacacccagaggcggccccagaccctgaacagcatcaacaagaggaagacagactag

SEQ ID NO: 159344 - DNA, 726 bp, synthetic construct
  misc_feature 1..726: note = Description of Artificial Sequence: Synthetic coding sequence
  source 1..726: mol_type = other DNA
atggctgctgagccccagcccagcagcctgagctaccgcaccaccggcagcacctacctgcaccccctgtctgagctgctgggcatccccctggaccaggtgaactttgtggtgtgccagctggtggccctgtttgctgccttctggttccgcatctacctgcggcccggcaccaccagcagtgatgtgagacatgctgtggccaccatcttcggcatctactttgtgatcttctgcttcggctggtacagcgtgcacctgtttgtgctggtgctgatgtgctacgccatcatggtgacagcctctgtgagcaacatccaccgctacagcttctttgtggccatgggctacctgaccatctgccacatcagccgcatctacatcttccactacggcatcctgaccacagacttcagcggccccctgatgattgtgacccagaagatcaccaccctggccttccaggtgcatgatggcctgggccggcgggcagaggacctgtctgctgagcagcaccggctggccatcaaggtgaagcccagcttcctggagtacctgagctacctgctgaacttcatgtctgtgattgctggcccctgcaacaacttcaaggactacatcgccttcatcgagggcaagcacatccacatgaagctgctggaggtgaactggaagaggaagggcttccacagcctgcctgagcccagccccaccggccacctgtag

SEQ ID NO: 159345 - DNA, 1041 bp, synthetic construct
  misc_feature 1..1041: note = Description of Artificial Sequence: Synthetic coding sequence
  source 1..1041: mol_type = other DNA
atggagttcagcctgcgcatcttcctgggcctgggcagaagagctgaggacctgtctgctgagcagcaccggctggccatcaaggtgaagcccagcttcctggagtacctgagctacctgctgaacttcatgtctgtgattgctggcccctgcaacaacttcaaggactacatcgccttcatcgagggcaagcacatccacatgaagctgctggaggtgaactggaagaggaagggcttccacagcctgcctgagcccagccccactggagctgtgatccacaagctgggcatcaccctggtgtccctgctgctcttcctgaccctgaccaagaccttccctgtgacctgcctggtggatgactggtttgtgcacaaggccagcttccctgcccggctgtgctacctgtatgtggtgatgcaggccagcaagcccaagtactactttgcctggaccctggctgatgctgtgaacaatgctgctggcttcggcttcagcggcgtggacaagaatggaaacttctgctgggacctgctgagcaacctgaacatctggaagattgaaacagccaccagcttcaagatgtacctggagaactggaacatccagacagccacctggctgaagtgtgtgtgctaccagagggtgccctggtaccccaccgtgctgaccttcatcctgagcgccctgtggcacggcgtgtacccaggctactacttcaccttcctgaccggcatcctggtgaccctggccgcccgggctgtgaggaacaactaccgccactacttcctgagcagccgggccctgaaggctgtgtatgatgctggcacctgggccgtgacccagctggccgtgtcctacacagtggccccctttgtgatgctggccgtggagcccaccatcagcctgtacaagtccatgtacttctacctgcacatcatcagcctgctgatcatcctcttcctgcccatgaagccccaggcccacacccagaggcggccccagaccctgaacagcatcaacaagaggaagacagactag

SEQ ID NO: 159346 - DNA, 1563 bp, synthetic construct
  misc_feature 1..1563: note = Description of Artificial Sequence: Synthetic coding sequence
  source 1..1563: mol_type = other DNA
atggccaccaccagcaccaccggcagcaccctgctgcagcccctgagcaatgctgtgcagctgcccatcgaccaggtgaactttgtggtgtgccagctgtttgccctgctggccgccatctggttccgcacctacctgcacagcagcaagaccagcagcttcatcagacatgtggtggccaccctgctgggcctgtacctggccctcttctgcttcggctggtacgccctgcacttcctggtgcagagcggcatctcctactgcatcatgatcatcattggagtggagaacatgcacaactactgctttgtgtttgccctgggctacctgactgtgtgccaggtgaccagggtgtacatctttgattatggccagtacagcgctgacttcagcggccccatgatgatcatcacccagaagatcaccagcctggcctgtgagatccatgatggcatgttcaggaaggatgaggagctgaccagcagccagagggacctggccgtgcggaggatgcccagcctgctggagtacctgagctacaactgcaacttcatgggcatcctggccggccccctgtgcagctacaaggactacatcaccttcatcgagggccgcagctaccacatcacccagagcggggagaatggcaaggaggagacccagtatgaaagaacagagcccagccccaacacagctgtggtgcagaagctgctggtgtgtggcctgagcctgctcttccacctgaccatctgcaccaccctgcctgtggagtacaacattgatgagcacttccaggccacagcctcctggcccaccaagatcatctacctgtacatcagcctgctggccgcccggcccaagtactactttgcctggaccctggctgatgccatcaacaatgctgctggcttcggcttccggggctatgatgaaaatggagctgcccgctgggacctgatcagcaacctgcgcatccagcagatcgagatgagcaccagcttcaagatgttcctggacaactggaacatccagacagccctgtggctgaagagggtgtgctatgaaagaaccagcttcagccccaccatccagaccttcatcctgagcgccatctggcatggagtgtacccaggctactacctgaccttcctgactggagtgctgatgaccctggccgcccgggccatgaggaacaacttccgccactacttcatcgagcccagccagctgaagctgttctatgatgtgatcacctggatcgtgacccaggtggccatctcctacacagtggtgccctttgtgctgctgagcatcaagcccagcctgaccttctacagctcctggtactactgcctgcacatcctgggcatcctggtgctgctgctgctgcctgtgaagaagacccagaggaggaagaacacccatgagaacatccagctgagccagagcaagaagtttgatgaaggagagaacagcctgggccagaacagcttcagcaccaccaacaacgtgtgcaaccagaaccaggagatcgccagccgccacagcagcctgaagcagtag

SEQ ID NO: 159347 - DNA, 1308 bp, synthetic construct
  misc_feature 1..1308: note = Description of Artificial Sequence: Synthetic coding sequence
  source 1..1308: mol_type = other DNA
atggagtggctgtggctgttcttcctgcaccccatctccttctaccagggcgccgccttcccctttgccctgctcttcaactacctgtgcatcatggacagcttcagcacccgggcccgctacctgttcctgctgaccggcggcggggccctggccgtggccgccatgggcagctatgctgtgctggtgttcaccccagctgtgtgtgctgtggccctgctgtgcagcctggccccccagcaggtgcaccgctggaccttctgcttccagatgtcctggcagaccctgtgccacctgggcctgcactacacagagtactacctgcacgagcccccatctgtgcgcttctgcatcaccctgagcagcctgatgctgctgacccagagggtgaccagcctgagcctggacatctgtgagggcaaggtgaaggccgccagcggcggcttccgcagccgcagcagcctgtctgagcacgtgtgcaaggccctgccctacttctcctacctgctcttcttccctgccctgctgggcggcagcctgtgcagcttccagcgcttccaggcccgggtgcagggcagcagcgccctgcaccccaggcacagcttctgggccctgtcctggaggggcctgcagatcctgggcctggagtgcctgaatgtggccgtgtcccgggtggtggatgctggggccggcctgacagactgccagcagtttgagtgcatctacgtggtgtggaccacagctggcctcttcaagctgacctactacagccactggatcctggatgacagcctgctgcacgccgccggctttggacctgagctgggccagagccctggagaggagggctacgtgcctgatgctgacatctggaccctggagaggacccaccgcatcagcgtcttcagcaggaagtggaaccagagcacagcccgctggctgcggcggctggtgttccagcacagccgggcctggcccctgctgcagacctttgccttcagcgcctggtggcacggcctgcaccctggccaggtgtttggatttgtgtgctgggccgtgatggtggaggccgactacctgatccacagctttgccaatgagttcatccgctcctggcccatgaggctcttctaccgcaccctgacctgggcccacacccagctgatcatcgcctacatcatgctggccgtggaggtgcgcagcctgagcagcctgtggctgctgtgcaacagctacaacagcgtcttccccatggtgtactgcatcctgctgctgctgctggccaagaggaagcacaagtgcaactag

SEQ ID NO: 159348 - DNA, 1341 bp, synthetic construct
  misc_feature 1..1341: note = Description of Artificial Sequence: Synthetic coding sequence
  source 1..1341: mol_type = other DNA
atgaccctgaaggccagcgagggggagagcggcggctccatgcacacagccctgagtgacctgtacctggagcacctgctgcagaagaggagcaggcctgaggccgtgagccaccccctgaacacagtgacagaggacatgtacaccaacggcagccctgcccctggcagccctgcccaggtgaagggccaggaggtgaggaaggtgcggctcatccagtttgagaaggtgacagaggagcccatgggcatcaccctgaagctgaatgagaagcagagctgcaccgtggcccgcatcctgcatggaggcatgatccaccggcagggcagcctgcacgtgggagatgagatcctggagatcaatggcaccaacgtgaccaaccacagcgtggaccagctgcagaaggccatgaaggagaccaagggcatgatcagcctgaaggtgatccccaaccagcagagccggctgcctgccctgcaggaggccggcctgaagtttgccaccggggacatcatccagatcatcaacaaggatgacagcaactggtggcagggccgggtggagggcagcagcaaggagagcgctggcctcatccccagccctgagctgcaggagtggagggtggcctccatggcccagagcgcccccagcgaggcccccagctgcagcccctttgggaagaagaagaagtacaaggacaagtacctggccaagcacagcagcatctttgaccagctggatgtggtgtcctatgaggaggtggtgcggctgcctgccttcaagaggaagaccctggtgctgattggagccagcggcgtgggccgcagccacatcaagaatgccctgctgagccagaaccctgagaagtttgtgtaccctgtgccctacaccacccggccccccaggaagtctgaggaggatggcaaggagtaccacttcatcagcacagaggagatgaccaggaacatcagcgccaatgagttcctggagtttggcagctaccagggcaacatgtttggcaccaagtttgaaacagtgcaccagatccacaagcagaacaagatcgccatcctggacatcgagccccagaccctgaagatcgtgaggacagctgagctgagccccttcatcgtgttcatcgcccccacagaccagggcacccagacagaggccctgcagcagctgcagaaggacagcgaggccatccgcagccagtatgcccactactttgacctgagcctggtgaacaatggagtggatgagaccctgaagaagctgcaggaggcctttgaccaggcctgcagcagcccccagtgggtgcctgtgtcctgggtgtactag

SEQ ID NO: 159349 - DNA, 1401 bp, synthetic construct
  misc_feature 1..1401: note = Description of Artificial Sequence: Synthetic coding sequence
  source 1..1401: mol_type = other DNA
atgaccctgaaggccagcgagggggagagcggcggctccatgcacacagccctgagtgacctgtacctggagcacctgctgcagaagaggagcaggcctgaggccgtgagccaccccctgaacacagtgacagaggacatgtacaccaacggcagccctgcccctggcagccctgcccaggtgaagggccaggaggtgaggaaggtgcggctcatccagtttgagaaggtgacagaggagcccatgggcatcaccctgaagctgaatgagaagcagagctgcaccgtggcccgcatcctgcatggaggcatgatccaccggcagggcagcctgcacgtgggagatgagatcctggagatcaatggcaccaacgtgaccaaccacagcgtggaccagctgcagaaggccatgaaggagaccaagggcatgatcagcctgaaggtgatccccaaccagcagagccggctgcctgccctgcagatgttcatgagggcccagtttgattatgaccccaagaaggacaacctgatcccctgcaaggaggccggcctgaagtttgccaccggggacatcatccagatcatcaacaaggatgacagcaactggtggcagggccgggtggagggcagcagcaaggagagcgctggcctcatccccagccctgagctgcaggagtggagggtggcctccatggcccagagcgcccccagcgaggcccccagctgcagcccctttgggaagaagaagaagtacaaggacaagtacctggccaagcacagcagcatctttgaccagctggatgtggtgtcctatgaggaggtggtgcggctgcctgccttcaagaggaagaccctggtgctgattggagccagcggcgtgggccgcagccacatcaagaatgccctgctgagccagaaccctgagaagtttgtgtaccctgtgccctacaccacccggccccccaggaagtctgaggaggatggcaaggagtaccacttcatcagcacagaggagatgaccaggaacatcagcgccaatgagttcctggagtttggcagctaccagggcaacatgtttggcaccaagtttgaaacagtgcaccagatccacaagcagaacaagatcgccatcctggacatcgagccccagaccctgaagatcgtgaggacagctgagctgagccccttcatcgtgttcatcgcccccacagaccagggcacccagacagaggccctgcagcagctgcagaaggacagcgaggccatccgcagccagtatgcccactactttgacctgagcctggtgaacaatggagtggatgagaccctgaagaagctgcaggaggcctttgaccaggcctgcagcagcccccagtgggtgcctgtgtcctgggtgtactag

SEQ ID NO: 159350 - DNA, 1311 bp, synthetic construct
  misc_feature 1..1311: note = Description of Artificial Sequence: Synthetic coding sequence
  source 1..1311: mol_type = other DNA
atggagagctgggccgtgagccaccccctgaacacagtgacagaggacatgtacaccaacggcagccctgcccctggcagccctgcccaggtgaagggccaggaggtgaggaaggtgcggctcatccagtttgagaaggtgacagaggagcccatgggcatcaccctgaagctgaatgagaagcagagctgcaccgtggcccgcatcctgcatggaggcatgatccaccggcagggcagcctgcacgtgggagatgagatcctggagatcaatggcaccaacgtgaccaaccacagcgtggaccagctgcagaaggccatgaaggagaccaagggcatgatcagcctgaaggtgatccccaaccagcagagccggctgcctgccctgcagatgttcatgagggcccagtttgattatgaccccaagaaggacaacctgatcccctgcaaggaggccggcctgaagtttgccaccggggacatcatccagatcatcaacaaggatgacagcaactggtggcagggccgggtggagggcagcagcaaggagagcgctggcctcatccccagccctgagctgcaggagtggagggtggcctccatggcccagagcgcccccagcgaggcccccagctgcagcccctttgggaagaagaagaagtacaaggacaagtacctggccaagcacagcagcatctttgaccagctggatgtggtgtcctatgaggaggtggtgcggctgcctgccttcaagaggaagaccctggtgctgattggagccagcggcgtgggccgcagccacatcaagaatgccctgctgagccagaaccctgagaagtttgtgtaccctgtgccctacaccacccggccccccaggaagtctgaggaggatggcaaggagtaccacttcatcagcacagaggagatgaccaggaacatcagcgccaatgagttcctggagtttggcagctaccagggcaacatgtttggcaccaagtttgaaacagtgcaccagatccacaagcagaacaagatcgccatcctggacatcgagccccagaccctgaagatcgtgaggacagctgagctgagccccttcatcgtgttcatcgcccccacagaccagggcacccagacagaggccctgcagcagctgcagaaggacagcgaggccatccgcagccagtatgcccactactttgacctgagcctggtgaacaatggagtggatgagaccctgaagaagctgcaggaggcctttgaccaggcctgcagcagcccccagtgggtgcctgtgtcctgggtgtactag

SEQ ID NO: 159351 - DNA, 1659 bp, synthetic construct
  misc_feature 1..1659: note = Description of Artificial Sequence: Synthetic coding sequence
  source 1..1659: mol_type = other DNA
atgcctgtggccgccaccaacagcgagacagccatgcagcaggtgctggacaacctgggcagcctgcccagcgccaccggggctgctgagctggacctgatcttcctgcggggcatcatggagagccccatcgtgcgcagcctggccaaggcccacgagcggctggaggagaccaagctggaggccgtgcgggacaacaacctggagctggtgcaggagatcctgcgggacctggcccacgtggccgagcagagcagcacagctgctgagctggcccacatcctgcaggagccccacttccagagcctgctggagacccatgattctgtggccagcaagacctatgagaccccaccacccagccctggcctggaccccaccttcagcaaccagcctgtgcccccagatgctgtgaggatggtgggcatcaggaagacagctggggagcacctgggcgtgaccttccgggtggagggcggggagctggtgattgcccgcatcctgcatggaggcatggtggcccagcagggcctgctgcacgtgggggacatcatcaaggaggtgaatggccagcctgtgggcagtgacccccgggccctgcaggagctgctgagaaatgccagcggcagcgtcatcctgaagatcctgcccagctaccaggagccccacctgccccggcaggtgtttgtgaagtgccactttgattatgaccctgcccgggacagcctcatcccctgcaaggaggccggcctgcgcttcaatgctggggacctgctgcagatcgtgaaccaggatgatgccaactggtggcaggcctgccacgtggagggcggcagcgctggcctcatccccagccagctgctggaggagaagaggaaggcctttgtgaagagggacctggagctgacccccaacagcggcaccctgtgtggcagcctgagcggcaagaagaagaagaggatgatgtacctgaccaccaagaatgctgagtttgacagacatgagctgctgatctatgaggaggtggccaggatgccacccttccggaggaagaccctggtgctgattggagcccagggcgtgggcagaagaagcctgaagaacaagctgatcatgtgggaccctgacagatatggcaccaccgtgccctacaccagcagaagacccaaggacagcgagcgggagggccagggctacagctttgtgtccagaggagagatggaggctgatgtgcgggccggccgctacctggagcacggggagtatgagggcaacctgtatggcaccagaattgacagcatccggggcgtggtggccgccggcaaggtgtgtgtgctggatgtgaacccccaggccgtgaaggtgctgaggacagctgagtttgtgccctacgtggtgttcatcgaggccccagactttgagaccctgcgggccatgaacagagctgccctggagagcggcatcagcaccaagcagctgacagaggccgacctgcggaggacagtggaggagagcagccgcatccagaggggctacggccactactttgacctgtgcctggtgaacagcaacctggagaggaccttccgggagctgcagacagccatggagaagctgaggacagagccccagtgggtgcctgtgtcctgggtgtactag

SEQ ID NO: 159352 - DNA, 1731 bp, synthetic construct
  misc_feature 1..1731: note = Description of Artificial Sequence: Synthetic coding sequence
  source 1..1731: mol_type = other DNA
atgcctgtggccgccaccaacagcgagacagccatgcagcaggtgctggacaacctgggcagcctgcccagcgccaccggggctgctgagctggacctgatcttcctgcggggcatcatggagagccccatcgtgcgcagcctggccaaggtgatcatggtgctgtggttcatgcagcagaatgtgtttgtgcccatgaagtacatgctgaagtactttggagcccacgagcggctggaggagaccaagctggaggccgtgcgggacaacaacctggagctggtgcaggagatcctgcgggacctggcccacgtggccgagcagagcagcacagctgctgagctggcccacatcctgcaggagccccacttccagagcctgctggagacccatgattctgtggccagcaagacctatgagaccccaccacccagccctggcctggaccccaccttcagcaaccagcctgtgcccccagatgctgtgaggatggtgggcatcaggaagacagctggggagcacctgggcgtgaccttccgggtggagggcggggagctggtgattgcccgcatcctgcatggaggcatggtggcccagcagggcctgctgcacgtgggggacatcatcaaggaggtgaatggccagcctgtgggcagtgacccccgggccctgcaggagctgctgagaaatgccagcggcagcgtcatcctgaagatcctgcccagctaccaggagccccacctgccccggcaggtgtttgtgaagtgccactttgattatgaccctgcccgggacagcctcatcccctgcaaggaggccggcctgcgcttcaatgctggggacctgctgcagatcgtgaaccaggatgatgccaactggtggcaggcctgccacgtggagggcggcagcgctggcctcatccccagccagctgctggaggagaagaggaaggcctttgtgaagagggacctggagctgacccccaacagcggcaccctgtgtggcagcctgagcggcaagaagaagaagaggatgatgtacctgaccaccaagaatgctgagtttgacagacatgagctgctgatctatgaggaggtggccaggatgccacccttccggaggaagaccctggtgctgattggagcccagggcgtgggcagaagaagcctgaagaacaagctgatcatgtgggaccctgacagatatggcaccaccgtgccctacaccagcagaagacccaaggacagcgagcgggagggccagggctacagctttgtgtccagaggagagatggaggctgatgtgcgggccggccgctacctggagcacggggagtatgagggcaacctgtatggcaccagaattgacagcatccggggcgtggtggccgccggcaaggtgtgtgtgctggatgtgaacccccaggccgtgaaggtgctgaggacagctgagtttgtgccctacgtggtgttcatcgaggccccagactttgagaccctgcgggccatgaacagagctgccctggagagcggcatcagcaccaagcagctgacagaggccgacctgcggaggacagtggaggagagcagccgcatccagaggggctacggccactactttgacctgtgcctggtgaacagcaacctggagaggaccttccgggagctgcagacagccatggagaagctgaggacagagccccagtgggtgcctgtgtcctgggtgtactag

SEQ ID NO: 159353 - DNA, 96 bp, synthetic construct
  misc_feature 1..96: note = Description of Artificial Sequence: Synthetic coding sequence
  source 1..96: mol_type = other DNA
atgcctgtggccgccaccaacagcgagacagccatgcagcaggtgctggacaacctgggcagcctgcccagcgccaccggggctgctgagctgtag

SEQ ID NO: 159354 - DNA, 456 bp, synthetic construct
  misc_feature 1..456: note = Description of Artificial Sequence: Synthetic coding sequence
  source 1..456: mol_type = other DNA
atgcctgtggccgccaccaacagcgagacagccatgcagcaggtgctggacaacctgggcagcctgcccagcgccaccggggctgctgagctggacctgatcttcctgcggggcatcatggagagccccatcgtgcgcagcctggccaaggcccacgagcggctggaggagaccaagctggaggccgtgcgggacaacaacctggagctggtgcaggagatcctgcgggacctggcccacgtggccgagcagagcagcacagctgctgagctggcccacatcctgcaggagccccacttccagagcctgctggagacccatgattctgtggccagcaagacctatgagaccccaccacccagccctggcctggaccccaccttcagcaaccagcctgtgcccccagatgctgtgaggatggtgggcatcaggaagacagctggggagcacctgtag

SEQ ID NO: 159355 - DNA, 381 bp, synthetic construct
  misc_feature 1..381: note = Description of Artificial Sequence: Synthetic coding sequence
  source 1..381: mol_type = other DNA
atgcctgtggccgccaccaacagcgagacagccatgcagcaggtgctggacaacctgggcagcctgcccagcgccaccggggctgctgagctggacctgatcttcctgcggggcatcatggagagccccatcgtgcgcagcctggccaaggcccacgagcggctggaggagaccaagctggaggccgtgcgggacaacaacctggagctggtgcaggagatcctgcgggacctggcccacgtggccgagcagagcagcacagctgctgagctggcccacatcctgcaggagccccacttccagagcctgctggagacccatgattctgtggccagcaagacctatgagaccccaccacccagccctggcctggacccctag

SEQ ID NO: 159356 - DNA, 222 bp, synthetic construct
  misc_feature 1..222: note = Description of Artificial Sequence: Synthetic coding sequence
  source 1..222: mol_type = other DNA
atgcctgtggccgccaccaacagcgagacagccatgcagcaggtgctggacaacctgggcagcctgcccagcgccaccggggctgctgagctggacctgatcttcctgcggggcatcatggagagccccatcgtgcgcagcctggccaaggcccacgagcggctggaggagaccaagctggaggccgtgcgggacaacaacctggagctggtgcaggagtag

SEQ ID NO: 159357 - DNA, 447 bp, synthetic construct
  misc_feature 1..447: note = Description of Artificial Sequence: Synthetic coding sequence
  source 1..447: mol_type = other DNA
atgcctgtggccgccaccaacagcgagacagccatgcagcaggtgctggacaacctgggcagcctgcccagcgccaccggggctgctgagctggacctgatcttcctgcggggcatcatggagagccccatcgtgcgcagcctggccaaggcccacgagcggctggaggagaccaagctggaggccgtgcgggacaacaacctggagctggtgcaggagatcctgcgggacctggcccacgtggccgagcagagcagcacagctgctgagctggcccacatcctgcaggagccccacttccagagcctgctggagacccatgattctgtggccagcaagacctatgagaccccaccacccagccctggcctggaccccaccttcagcaaccagcctgtgcccccagatgctgtgaggatggtgggcatcaggaagacagctggatag

SEQ ID NO: 159358 - DNA, 1626 bp, synthetic construct
  misc_feature 1..1626: note = Description of Artificial Sequence: Synthetic coding sequence
  source 1..1626: mol_type = other DNA
atgcagcaggtgctggacaacctgggcagcctgcccagcgccactggagctgctgagctggacctgatcttcctgcggggcatcatggagagccccatcgtgcgcagcctggccaaggcccacgagcggctggaggagaccaagctggaggccgtgcgggacaacaacctggagctggtgcaggagatcctgcgggacctggcccacgtggccgagcagagcagcacagctgctgagctggcccacatcctgcaggagccccacttccagagcctgctggagacccatgacagcgtggccagcaagacctatgagaccccaccacccagccctggcctggaccccaccttcagcaaccagcctgtgcccccagatgctgtgaggatggtgggcatcaggaagacagctggggagcacctgggcgtgaccttccgggtggagggcggggagctggtgattgcccgcatcctgcacggcggcatggtggcccagcagggcctgctgcacgtgggggacatcatcaaggaggtgaatggccagcctgtgggcagtgacccccgggccctgcaggagctgctgagaaatgccagcggcagcgtcatcctgaagatcctgcccagctaccaggagccccacctgccccggcaggtgtttgtgaagtgccactttgattatgaccctgcccgggacagcctcatcccctgcaaggaggccggcctgcgcttcaatgctggggacctgctgcagatcgtgaaccaggatgatgccaactggtggcaggcctgccacgtggagggcggcagcgctggcctcatccccagccagctgctggaggagaagaggaaggcctttgtgaagagggacctggagctgacccccaacagcggcaccctgtgtggcagcctgagcggcaagaagaagaagaggatgatgtacctgaccaccaagaatgctgagtttgacagacatgagctgctgatctatgaggaggtggccaggatgccacccttccggaggaagaccctggtgctgattggagcccagggcgtgggccgccgcagcctgaagaacaagctgatcatgtgggaccctgacagatatggcaccaccgtgccctacaccagccggcggcccaaggacagcgagcgggagggccagggctacagctttgtgtccagaggagagatggaggctgatgtgcgggccggccgctacctggagcacggggagtatgagggcaacctgtatggcaccagaattgacagcatccggggcgtggtggccgccggcaaggtgtgtgtgctggatgtgaacccccaggccgtgaaggtgctgaggacagctgagtttgtgccctacgtggtgttcatcgaggccccagactttgagaccctgcgggccatgaacagagctgccctggagagcggcatcagcaccaagcagctgacagaagctgacctgcggaggacagtggaggagagcagccgcatccagaggggctacggccactactttgacctgtgcctggtgaacagcaacctggagaggaccttccgggagctgcagacagccatggagaagctgaggacagagccccagtgggtgcctgtgtcctgggtgtactag

SEQ ID NO: 159359 - DNA, 1167 bp, synthetic construct
  misc_feature 1..1167: note = Description of Artificial Sequence: Synthetic coding sequence
  source 1..1167: mol_type = other DNA
atggagctgcagtacccacctcctccacccagcccccgcatctgccgggagaggtctggaggagacaatgcctccatgcctgtgctgtctgaagattctggcctgcacgagaccctggccctgctgaccagccagctgcggccagacagcaaccacaaggaggagatgggcttcctgagagatgtgttcagcgagaagagcctgagctacctgatgaagatccacgagaagctgcgctactatgagcggcagagccccacccctgtgctgcacagcgctgtggccctggccgaggatgtgatggaggagctgcaggccgcctctgtgcacagtgatgagcgggagctgctgcagctgctgagcaccccccacctgcgggctgtgctgatggtgcatgacacagtggcccagaagaactttgatcctgtgctgccccccctgcctgacaacattgatgaagattttgatgaggagagcgtgaagatcgtgcggctggtgaagaacaaggagcccctgggcgccaccatcagaagagatgagcacagcggggctgtggtggtggcccgcatcatgagaggaggagctgctgacagaagtggcctggtgcacgtgggagatgagctgcgggaggtgaatggaattgctgtgctgcacaagaggccagatgagatcagccagatcctggcccagagccagggcagcatcaccctgaagatcatcccagccacccaggaggaggaccggctgaaggagagcaaggtgttcatgagggccctcttccactacaacccccgggaggaccgggccatcccctgccaggaggccggcctgcccttccagaggcggcaggtgctggaggtggtgtcccaggatgaccccacctggtggcaggccaagagggtgggggacaccaacctgcgggccggcctcatccccagcaagggcttccaggagcggcggctgagctaccgccgggcctacggcacccccatcagcccccagttcagccagcccaagcaggagctgagcctgcccaggcactgggcccccacccagctgctgcccagctgtggggcccactgccctgggggcaagggcacccacacccccaccctcatccccatcctgctgagccccagcctgcagctggagttcatccagtactag

SEQ ID NO: 159360 - DNA, 1758 bp, synthetic construct
  misc_feature 1..1758: note = Description of Artificial Sequence: Synthetic coding sequence
  source 1..1758: mol_type = other DNA
atgcctgtgctgtctgaggacagcggcctgcacgagaccctggccctgctgaccagccagctgcggccagacagcaaccacaaggaggagatgggcttcctgagagatgtgttttctgagaagagcctgagctacctgatgaagatccacgagaagctgcgctactatgaaaggcagagccccacccctgtgctgcacagcgctgtggccctggctgaagatgtgatggaggagctgcaggccgcctctgtgcacagtgatgagcgggagctgctgcagctgctgagcaccccccacctgcgggctgtgctgatggtgcatgacacagtggcccagaagaactttgatcctgtgctgccccccctgcctgacaacattgatgaggactttgatgaggagagcgtgaagatcgtgcggctggtgaagaacaaggagcccctgggcgccaccatcagaagagatgagcacagcggggctgtggtggtggcccgcatcatgaggggcggcgctgctgacaggagcggcctggtgcacgtgggagatgagctgcgggaggtgaatggaattgctgtgctgcacaagaggccagatgagatcagccagatcctggcccagagccagggcagcatcaccctgaagatcatcccagccacccaggaggaggaccggctgaaggagagcaaggtgttcatgagggccctcttccactacaaccccagagaagatcgggccatcccctgccaggaggccggcctgcccttccagaggcggcaggtgctggaggtggtgtcccaggatgaccccacctggtggcaggccaagagggtgggggacaccaacctgcgggccggcctcatccccagcaagggcttccaggagcggcggctgagctacagaagagctgctggcaccctgcccagcccccagagcctgaggaagccaccctatgaccagccctgtgacaaggagacctgtgactgtgagggctacctgaagggccactacgtggccggcctgcggcgctccttccggctgggctgccgggagcggctgggcggcagccaggagggcaagatgagcagtggagctgagagccctgagctgctgacctatgaggaggtggcccgctaccagcaccagcctggagagcggccccggctggtggtgctgattggcagcctgggcgcccggctgcacgagctgaagcagaaggtggtggccgagaacccccagcactttggagtggccgtgccccacaccacccggcccaggaagagccatgagaaggagggcgtggagtaccactttgtgtccaagcaggcctttgaggccgacctgcaccacaacaagttcctggagcacggggagtacaaggagaacctgtatggcaccagcctggaggccatccaggccgtgatggccaagaacaaggtgtgcctggtggatgtggagcctgaggccctgaagcagctgcggaccagcgagttcaagccctacatcatctttgtgaagccagccatccaggagaagaggaagaccccacccatgagccctgcctgtgaggacacagctgccccctttgatgagcagcagcaggagatggccgccagcgctgccttcatcgacagacactacggccacctggtggatgctgtgctggtgaaggaggacctgcagggcgcctacagccagctgaaggtggtgctggagaagctgagcaaggacacccactgggtgcctgtgtcctgggtgaggtag

SEQ ID NO: 159361 - DNA, 1833 bp, synthetic construct
  misc_feature 1..1833: note = Description of Artificial Sequence: Synthetic coding sequence
  source 1..1833: mol_type = other DNA
atggagctgcagtacccacctcctccacccagcccccgcatctgccgggagaggtctggaggagacaatgcctccatgcctgtgctgtctgaagattctggcctgcacgagaccctggccctgctgaccagccagctgcggccagacagcaaccacaaggaggagatgggcttcctgagagatgtgttcagcgagaagagcctgagctacctgatgaagatccacgagaagctgcgctactatgagcggcagagccccacccctgtgctgcacagcgctgtggccctggccgaggatgtgatggaggagctgcaggccgcctctgtgcacagtgatgagcgggagctgctgcagctgctgagcaccccccacctgcgggctgtgctgatggtgcatgacacagtggcccagaagaactttgatcctgtgctgccccccctgcctgacaacattgatgaagattttgatgaggagagcgtgaagatcgtgcggctggtgaagaacaaggagcccctgggcgccaccatcagaagagatgagcacagcggggctgtggtggtggcccgcatcatgagaggaggagctgctgacagaagtggcctggtgcacgtgggagatgagctgcgggaggtgaatggaattgctgtgctgcacaagaggccagatgagatcagccagatcctggcccagagccagggcagcatcaccctgaagatcatcccagccacccaggaggaggaccggctgaaggagagcaaggtgttcatgagggccctcttccactacaacccccgggaggaccgggccatcccctgccaggaggccggcctgcccttccagaggcggcaggtgctggaggtggtgtcccaggatgaccccacctggtggcaggccaagagggtgggggacaccaacctgcgggccggcctcatccccagcaagggcttccaggagcggcggctgagctaccgccgggctgctggcaccctgcccagcccccagagcctgaggaagccaccctatgaccagccctgtgacaaggagacctgtgactgtgagggctacctgaagggccactacgtggccggcctgcggcgctccttccggctgggctgccgggagcggctgggcggcagccaggagggcaagatgagcagcggggctgagagccctgagctgctgacctatgaggaggtggcccgctaccagcaccagcccggggagcggccccggctggtggtgctgattggcagcctgggcgcccggctgcacgagctgaagcagaaggtggtggccgagaacccccagcactttggagtggccgtgccccacaccacccggcccaggaagagccatgagaaggagggcgtggagtaccactttgtgtccaagcaggcctttgaagctgacctgcaccacaacaagttcctggagcacggggagtacaaggagaacctgtatggcaccagcctggaggccatccaggccgtgatggccaagaacaaggtgtgcctggtggatgtggagcctgaggccctgaagcagctgcggaccagcgagttcaagccctacatcatctttgtgaagccagccatccaggagaagaggaagaccccacccatgagccctgcctgtgaggacacagctgccccctttgatgagcagcagcaggagatggccgccagcgctgccttcatcgacagacactacggccacctggtggatgctgtgctggtgaaggaggacctgcagggcgcctacagccagctgaaggtggtgctggagaagctgagcaaggacacccactgggtgcctgtgtcctgggtgaggtag

SEQ ID NO: 159362 - DNA, 1782 bp, synthetic construct
  misc_feature 1..1782: note = Description of Artificial Sequence: Synthetic coding sequence
  source 1..1782: mol_type = other DNA
atgatccagagcgacaagggagctgaccccccagacaagaaggacatgaagctgagcacagccaccaacccccagaatggcctgagccagatcctgcggctggtgctgcaggagctgagcctcttctacggcagagatgtgaatggagtgtgcctgctgtatgacctgctgcacagcccctggctgcaggccctgctgaagatctatgactgcctgcaggagttcaaggagaagaagctggtgcctgccaccccccacgcccaggtgctgtcctatgaggtggtggagctgctgcgggagacccccaccagccctgagatccaggagctgcggcagatgctgcaggccccccacttcaaggccctgctgagcgcccatgacaccatcgcccagaaggactttgagcccctgctgccccccctgcctgacaacatccctgagagcgaggaggccatgagaattgtgtgcctggtgaagaaccagcagcccctgggcgccaccatcaagagacatgagatgaccggggacatcctggtggcccgcatcatccacggcggcctggccgagaggagcggcctgctgtatgctggggacaagctggtggaggtgaatggagtgtctgtggagggcctggaccctgagcaggtgatccacatcctggccatgagccggggcaccatcatgttcaaggtggtgcctgtgtctgacccccctgtgaacagccagcagatggaccctgacatcccctgcatggatgctggcctgcccttccagaagggggacatcctgcagatcgtggaccagaatgatgccctgtggtggcaggccaggaagatcagtgaccctgccacctgtgccggcctggtgcccagcaaccacctgctgaagaggaagcagcgggagttctggtggagccagccctaccagccccacacctgcctgaagagcaccctgtacaaggaggagtttgtgggctacggccagaagttcttcatcgccggcttccgccgctccatgaggctgtgcaggaggaagagccacctgagccccctgcacgcctctgtgtgctgcaccggcagctgctacagcgctgtgggcgccccctatgaggaggtggtgcgctaccagaggcggcccagcgacaagtaccgcctcatcgtgctgatgggccccagcggcgtgggcgtgaatgagctgcggcggcagctgattgagttcaaccccagccacttccagagcgctgtgccccacaccaccaggaccaagaagagctatgagatgaatggccgggagtaccactacgtgtccaaggagacctttgaaaatctcatctacagccacaggatgctggagtatggagagtacaagggccacctgtatggcacctctgtggatgctgtgcagacagtgctggtggagggcaagatctgtgtgatggacctggagccccaggacatccagggcgtgaggacccatgagctgaagccctacgtgatcttcatcaagcccagcaacatgcgctgcatgaagcagagcaggaagaatgccaaggtgatcacagactactacgtggacatgaagttcaaggatgaggacctgcaggagatggagaacctggcccagaggatggagacccagtttggccagttctttgaccacgtgattgtgaatgacagcctgcatgatgcctgtgcccagctgctgagcgccatccagaaggcccaggaggagccccagtgggtgcctgccacctggatcagcagtgacacagagagccagtag

SEQ ID NO: 159363 - DNA, 1809 bp, synthetic construct
  misc_feature 1..1809: note = Description of Artificial Sequence: Synthetic coding sequence
  source 1..1809: mol_type = other DNA
atgatccagagcgacaagggagctgaccccccagacaagaaggacatgaagctgagcacagccaccaacccccagaatggcctgagccagatcctgcggctggtgctgcaggagctgagcctcttctacggcagagatgtgaatggagtgtgcctgctgtatgacctgctgcacagcccctggctgcaggccctgctgaagatctatgactgcctgcaggagttcaaggagaagaagctggtgcctgccaccccccacgcccaggtgctgtcctatgaggtggtggagctgctgcgggagacccccaccagccctgagatccaggagctgcggcagatgctgcaggccccccacttcaagggggccaccatcaagagacatgagatgaccggggacatcctggtggcccgcatcatccacggcggcctggccgagaggagcggcctgctgtatgctggggacaagctggtggaggtgaatggagtgtctgtggagggcctggaccctgagcaggtgatccacatcctggccatgagccggggcaccatcatgttcaaggtggtgcctgtgtctgacccccctgtgaacagccagcagatggtgtatgtgcgggccatgacagagtactggccccaggaggaccctgacatcccctgcatggatgctggcctgcccttccagaagggggacatcctgcagatcgtggaccagaatgatgccctgtggtggcaggccaggaagatcagtgaccctgccacctgtgccggcctggtgcccagcaaccacctgctgaagcgctggagctttgccctggtggcccaggccggcgtgcagtggcactacctggacagcctgcagcccctgcccccaggcttcaagcgcttcagctgcctgagcctgcccaggtcctgggactacattgaagatgacatgaagattgatgagaagtgtgtggaggccgagaaggagagcattgaaacagacaaggaggagtttgtgggctacggccagaagttcttcatcgccggcttcagaagatccatgaggctgtgcaggaggaagagccacctgagccccctgcacgcctctgtgtgctgcaccggcagctgctacagcgctgtgggcgccccctatgaggaggtggtgcgctaccagaggcggcccagcgacaagtaccgcctgattgtgctgatgggccccagcggcgtgggcgtgaatgagctgcggcggcagctgattgagttcaaccccagccacttccagagcgctgtgccccacaccaccaggaccaagaagagctatgagatgaatggccgggagtaccactacgtgtccaaggagacctttgagaacctgatctacagccacaggatgctggagtatggagagtacaagggccacctgtatggcacctctgtggatgctgtgcagacagtgctggtggagggcaagatctgtgtgatggacctggagccccaggacatccagggcgtgaggacccatgagctgaagccctacgtgatcttcatcaagcccagcaacatgcgctgcatgaagcagagcaggaagaatgccaaggtgatcacagactactacgtggacatgaagttcaaggatgaggacctgcaggagatggagaacctggcccagaggatggagacccagtttggccagttctttgaccacgtgattgtgaatgacagcctgcatgatgcctgtgcccagctgctgagcgccatccagaaggcccaggaggagccccagtgggtgcctgccacctggatcagcagtgacacagagagccagtag

SEQ ID NO: 159364 - DNA, 1914 bp, synthetic construct
  misc_feature 1..1914: note = Description of Artificial Sequence: Synthetic coding sequence
  source 1..1914: mol_type = other DNA
atgatccagagcgacaagggagctgaccccccagacaagaaggacatgaagctgagcacagccaccaacccccagaatggcctgagccagatcctgcggctggtgctgcaggagctgagcctcttctacggcagagatgtgaatggagtgtgcctgctgtatgacctgctgcacagcccctggctgcaggccctgctgaagatctatgactgcctgcaggagttcaaggagaagaagctggtgcctgccaccccccacgcccaggtgctgtcctatgaggtggtggagctgctgcgggagacccccaccagccctgagatccaggagctgcggcagatgctgcaggccccccacttcaaggccctgctgagcgcccatgacaccatcgcccagaaggactttgagcccctgctgccccccctgcctgacaacatccctgagagcgaggaggccatgagaattgtgtgcctggtgaagaaccagcagcccctgggcgccaccatcaagagacatgagatgaccggggacatcctggtggcccgcatcatccacggcggcctggccgagaggagcggcctgctgtatgctggggacaagctggtggaggtgaatggagtgtctgtggagggcctggaccctgagcaggtgatccacatcctggccatgagccggggcaccatcatgttcaaggtggtgcctgtgtctgacccccctgtgaacagccagcagatggtgtatgtgcgggccatgacagagtactggccccaggaggaccctgacatcccctgcatggatgctggcctgcccttccagaagggggacatcctgcagatcgtggaccagaatgatgccctgtggtggcaggccaggaagatcagtgaccctgccacctgtgccggcctggtgcccagcaaccacctgctgaagaggaagcagcgggagttctggtggagccagccctaccagccccacacctgcctgaagagcaccctgagcatcagcctgaagggggaggatgacatgaagattgatgagaagtgtgtggaggccgagaacagcacagctgagagcgaggagctgaacagcgacaaggaggagtttgtgggctacggccagaagttcttcatcgccggcttccgccgctccatgaggctgtgcaggaggaagagccacctgagccccctgcacgcctctgtgtgctgcaccggcagctgctacagcgctgtgggcgccccctatgaggaggtggtgcgctaccagaggcggcccagcgacaagtaccgcctcatcgtgctgatgggccccagcggcgtgggcgtgaatgagctgcggcggcagctgattgagttcaaccccagccacttccagagcgctgtgccccacaccaccaggaccaagaagagctatgagatgaatggccgggagtaccactacgtgtccaaggagacctttgaaaatctcatctacagccacaggatgctggagtatggagagtacaagggccacctgtatggcacctctgtggatgctgtgcagacagtgctggtggagggcaagatctgtgtgatggacctggagccccaggacatccagggcgtgaggacccatgagctgaagccctacgtgatcttcatcaagcccagcaacatgcgctgcatgaagcagagcaggaagaatgccaaggtgatcacagactactacgtggacatgaagttcaaggatgaggacctgcaggagatggagaacctggcccagaggatggagacccagtttggccagttctttgaccacgtgattgtgaatgacagcctgcatgatgcctgtgcccagctgctgagcgccatccagaaggcccaggaggagccccagtgggtgcctgccacctggatcagcagtgacacagagagccagtag

SEQ ID NO: 159365 - DNA, 1701 bp, synthetic construct
  misc_feature 1..1701: note = Description of Artificial Sequence: Synthetic coding sequence
  source 1..1701: mol_type = other DNA
atgatccagagcgacaagggagctgaccccccagacaagaaggacatgaagctgagcacagccaccaacccccagaatggcctgagccagatcctgcggctggtgctgcaggagctgagcctcttctacggcagagatgtgaatggagtgtgcctgctgtatgacctgctgcacagcccctggctgcaggccctgctgaagatctatgactgcctgcaggagttcaaggagaagaagctggtgcctgccaccccccacgcccaggtgctgtcctatgagggcgccaccatcaagagacatgagatgactggagacatcctggtggcccgcatcatccatggaggcctggccgagaggagcggcctgctgtatgctggggacaagctggtggaggtgaatggagtgtctgtggagggcctggaccctgagcaggtgatccacatcctggccatgagccggggcaccatcatgttcaaggtggtgcctgtgtctgacccccctgtgaacagccagcagatggtgtatgtgcgggccatgacagagtactggccccaggaggaccctgacatcccctgcatggatgctggcctgcccttccagaagggggacatcctgcagatcgtggaccagaatgatgccctgtggtggcaggccaggaagatcagtgaccctgccacctgtgccggcctggtgcccagcaaccacctgctgaagaggaagcagcgggagttctggtggagccagccctaccagccccacacctgcctgaagagcaccctgagcatcagcctgaagggagaagatgacatgaagattgatgagaagtgtgtggaggccgagaacagcacagctgagagcgaggagctgaacagcgacaaggaggagtttgtgggctacggccagaagttcttcatcgccggcttcagaagatccatgaggctgtgcaggaggaagagccacctgagccccctgcacgcctctgtgtgctgcaccggcagctgctacagcgctgtgggcgccccctatgaggaggtggtgcgctaccagaggcggcccagcgacaagtaccgcctgattgtgctgatgggccccagcggcgtgggcgtgaatgagctgcggcggcagctgattgagttcaaccccagccacttccagagcgctgtgccccacaccaccaggaccaagaagagctatgagatgaatggccgggagtaccactacgtgtccaaggagacctttgagaacctgatctacagccacaggatgctggagtatggagagtacaagggccacctgtatggcacctctgtggatgctgtgcagacagtgctggtggagggcaagatctgtgtgatggacctggagccccaggacatccagggcgtgaggacccatgagctgaagccctacgtgatcttcatcaagcccagcaacatgcgctgcatgaagcagagcaggaagaatgccaaggtgatcacagactactacgtggacatgaagttcaaggatgaggacctgcaggagatggagaacctggcccagaggatggagacccagtttggccagttctttgaccacgtgattgtgaatgacagcctgcatgatgcctgtgcccagctgctgagcgccatccagaaggcccaggaggagccccagtgggtgcctgccacctggatcagcagtgacacagagagccagtag

SEQ ID NO: 159366 - DNA, 1914 bp, synthetic construct
  misc_feature 1..1914: note = Description of Artificial Sequence: Synthetic coding sequence
  source 1..1914: mol_type = other DNA
atgatccagagcgacaagggagctgaccccccagacaagaaggacatgaagctgagcacagccaccaacccccagaatggcctgagccagatcctgcggctggtgctgcaggagctgagcctcttctacggcagagatgtgaatggagtgtgcctgctgtatgacctgctgcacagcccctggctgcaggccctgctgaagatctatgactgcctgcaggagttcaaggagaagaagctggtgcctgccaccccccacgcccaggtgctgtcctatgaggtggtggagctgctgcgggagacccccaccagccctgagatccaggagctgcggcagatgctgcaggccccccacttcaaggccctgctgagcgcccatgacaccatcgcccagaaggactttgagcccctgctgccccccctgcctgacaacatccctgagagcgaggaggccatgagaattgtgtgcctggtgaagaaccagcagcccctgggcgccaccatcaagagacatgagatgaccggggacatcctggtggcccgcatcatccacggcggcctggccgagaggagcggcctgctgtatgctggggacaagctggtggaggtgaatggagtgtctgtggagggcctggaccctgagcaggtgatccacatcctggccatgagccggggcaccatcatgttcaaggtggtgcctgtgtctgacccccctgtgaacagccagcagatggtgtatgtgcgggccatgacagagtactggccccaggaggaccctgacatcccctgcatggatgctggcctgcccttccagaagggggacatcctgcagatcgtggaccagaatgatgccctgtggtggcaggccaggaagatcagtgaccctgccacctgtgccggcctggtgcccagcaaccacctgctgaagaggaagcagcgggagttctggtggagccagccctaccagccccacacctgcctgaagagcaccctgagcatctccatggaggaggaggatgacatgaagattgatgagaagtgtgtggaggctgatgaggagacctttgaaagtgaggagctgtctgaggacaaggaggagtttgtgggctacggccagaagttcttcatcgccggcttccgccgctccatgaggctgtgcaggaggaagagccacctgagccccctgcacgcctctgtgtgctgcaccggcagctgctacagcgctgtgggcgccccctatgaggaggtggtgcgctaccagaggcggcccagcgacaagtaccgcctcatcgtgctgatgggccccagcggcgtgggcgtgaatgagctgcggcggcagctgattgagttcaaccccagccacttccagagcgctgtgccccacaccaccaggaccaagaagagctatgagatgaatggccgggagtaccactacgtgtccaaggagacctttgaaaatctcatctacagccacaggatgctggagtatggagagtacaagggccacctgtatggcacctctgtggatgctgtgcagacagtgctggtggagggcaagatctgtgtgatggacctggagccccaggacatccagggcgtgaggacccatgagctgaagccctacgtgatcttcatcaagcccagcaacatgcgctgcatgaagcagagcaggaagaatgccaaggtgatcacagactactacgtggacatgaagttcaaggatgaggacctgcaggagatggagaacctggcccagaggatggagacccagtttggccagttctttgaccacgtgattgtgaatgacagcctgcatgatgcctgtgcccagctgctgagcgccatccagaaggcccaggaggagccccagtgggtgcctgccacctggatcagcagtgacacagagagccagtag

SEQ ID NO: 159367 - DNA, 2028 bp, synthetic construct
  misc_feature 1..2028: note = Description of Artificial Sequence: Synthetic coding sequence
  source 1..2028: mol_type = other DNA
atgaccaccagccacatgaatggacatgtgacagaggagagtgacagcgaggtgaagaatgtggacctggccagccctgaggagcaccagaagcaccgggagatggctgtggactgccctggggacctgggcaccaggatgatgcccatcagaagaagtgcccagctggagcgcatccggcagcagcaggaggacatgagaagaagaagagaggaggagggcaagaagcaggagctggacctgaacagctccatgaggctgaagaagctggcccagatcccccccaagacaggaattgacaaccccatgtttgacacagaggagggcatcgtgctggagagcccccactatgctgtgaagatcctggagattgaagatctcttcagcagcctgaagcacatccagcacaccctggtggacagccagagccaggaggacatcagcctgctgctgcagctggtgcagaacaaggacttccagaatgccttcaagatccacaatgccatcaccgtgcacatgaacaaggccagcccccccttccccctcatcagcaatgcccaggacctggcccaggaggtgcagacagtgctgaagcctgtgcaccacaaggagggccaggagctgacagccctgctgaacaccccccacatccaggccctgctgctggcccatgacaaggtggccgagcaggagatgcagctggagcccatcacagatgagcgggtgtatgagagcatcggccagtatggaggagaaacagtgaagatcgtgagaattgagaaggcccgggacatccccctgggcgccaccgtgagaaatgagatggattctgtcatcatcagcagaattgtgaagggcggcgctgctgagaagagcggcctgctgcacgagggagatgaggtgctggagatcaatggaattgagatccggggcaaggatgtgaatgaggtgtttgacctgctgagtgacatgcacggcaccctgacctttgtgctgatccccagccagcagatcaagcccccaccagccaaggagaccgtcatccacgtgaaggcccactttgattatgaccccagtgatgacccctacgtgccctgccgggagctgggcctgtccttccagaagggggacatcctgcacgtgatcagccaggaggaccccaactggtggcaggcctaccgggagggagatgaggacaaccagcccctggccggcctggtgcctgggaagagcttccagcagcagcgggaggccatgaagcagaccatcgaggaggacaaggagcctgagaagagcggcaagctgtggtgtgccaagaagaacaagaagaagaggaagaaggtgctgtacaatgccaacaagaatgatgattatgacaatgaggagatcctgacctatgaggagatgagcctgtaccaccagcctgccaacaggaagaggcccatcatcctgattggcccccagaactgtggccagaatgagctgcggcagaggctgatgaacaaggagaaggacagatttgccagcgctgtgccccacaccaccaggagccggcgggaccaggaggtggccggccgggactaccactttgtgtcccggcaggcctttgaggccgacattgctgctgggaagttcatcgagcacggggagtttgagaagaacctgtatggcaccagcattgacagcgtgcggcaggtgatcaacagcggcaagatctgcctgctgagcctgcggacccagagcctgaagaccctgaggaacagcgacctgaagccctacatcatcttcatcgccccacccagccaggagcggctgcgggccctgctggccaaggagggcaagaaccccaagccagaggagctgcgggagatcatcgagaagacccgggagatggagcagaacaacggccactactttgacacagccatcgtgaacagcgacctggacaaggcctaccaggagctgctgcggctcatcaacaagctggacacagagccccagtgggtgcccagcacctggctgaggtag

SEQ ID NO: 159368 - DNA, 1926 bp, synthetic construct
  misc_feature 1..1926: note = Description of Artificial Sequence: Synthetic coding sequence
  source 1..1926: mol_type = other DNA
atggctgtggactgccctggggacctgggcaccaggatgatgcccatcagaagaagtgcccagctggagcgcatccggcagcagcaggaggacatgagaagaagaagagaggaggagggcaagaagcaggagctggacctgaacagctccatgaggctgaagaagctggcccagatcccccccaagacaggaattgacaaccccatgtttgacacagaggagggcatcgtgctggagagcccccactatgctgtgaagatcctggagattgaagatctcttcagcagcctgaagcacatccagcacaccctggtggacagccagagccaggaggacatcagcctgctgctgcagctggtgcagaacaaggacttccagaatgccttcaagatccacaatgccatcaccgtgcacatgaacaaggccagcccccccttccccctcatcagcaatgcccaggacctggcccaggaggtgcagacagtgctgaagcctgtgcaccacaaggagggccaggagctgacagccctgctgaacaccccccacatccaggccctgctgctggcccatgacaaggtggccgagcaggagatgcagctggagcccatcacagatgagcgggtgtatgagagcatcggccagtatggaggagaaacagtgaagatcgtgagaattgagaaggcccgggacatccccctgggcgccaccgtgagaaatgagatggattctgtcatcatcagcagaattgtgaagggcggcgctgctgagaagagcggcctgctgcacgagggagatgaggtgctggagatcaatggaattgagatccggggcaaggatgtgaatgaggtgtttgacctgctgagtgacatgcacggcaccctgacctttgtgctgatccccagccagcagatcaagcccccaccagccaaggagaccgtcatccacgtgaaggcccactttgattatgaccccagtgatgacccctacgtgccctgccgggagctgggcctgtccttccagaagggggacatcctgcacgtgatcagccaggaggaccccaactggtggcaggcctaccgggagggagatgaggacaaccagcccctggccggcctggtgcctgggaagagcttccagcagcagcgggaggccatgaagcagaccatcgaggaggacaaggagcctgagaagagcggcaagctgtggtgtgccaagaagaacaagaagaagaggaagaaggtgctgtacaatgccaacaagaatgatgattatgacaatgaggagatcctgacctatgaggagatgagcctgtaccaccagcctgccaacaggaagaggcccatcatcctgattggcccccagaactgtggccagaatgagctgcggcagaggctgatgaacaaggagaaggacagatttgccagcgctgtgccccacaccaccaggagccggcgggaccaggaggtggccggccgggactaccactttgtgtcccggcaggcctttgaggccgacattgctgctgggaagttcatcgagcacggggagtttgagaagaacctgtatggcaccagcattgacagcgtgcggcaggtgatcaacagcggcaagatctgcctgctgagcctgcggacccagagcctgaagaccctgaggaacagcgacctgaagccctacatcatcttcatcgccccacccagccaggagcggctgcgggccctgctggccaaggagggcaagaaccccaagccagaggagctgcgggagatcatcgagaagacccgggagatggagcagaacaacggccactactttgacacagccatcgtgaacagcgacctggacaaggcctaccaggagctgctgcggctcatcaacaagctggacacagagccccagtgggtgcccagcacctggctgaggtag

SEQ ID NO: 159369 - DNA, 15 bp, synthetic construct
  misc_feature 1..15: note = Description of Artificial Sequence: Synthetic coding sequence
  source 1..15: mol_type = other DNA
atggctgtggactag

SEQ ID NO: 159370 - DNA, 450 bp, synthetic construct
  misc_feature 1..450: note = Description of Artificial Sequence: Synthetic coding sequence
  source 1..450: mol_type = other DNA
atggctgtggactgccctggggacctgggcaccaggatgatgcccatcagaagaagtgcccagctggagcgcatccggcagcagcaggaggacatgagaagaagaagagaggaggagggcaagaagcaggagctggacctgaacagctccatgaggctgaagaagctggcccagatcccccccaagacaggaattgacaaccccatgtttgacacagaggagggcatcgtgctggagagcccccactatgctgtgaagatcctggagattgaagatctcttcagcagcctgaagcacatccagcacaccctggtggacagccagagccaggaggacatcagcctgctgctgcagctggtgcagaacaaggacttccagaatgccttcaagatccacaatgccatcaccgtgcacatgaacaaggccagcccccccttccccctcatctag

SEQ ID NO: 159371 - DNA, 870 bp, synthetic construct
  misc_feature 1..870: note = Description of Artificial Sequence: Synthetic coding sequence
  source 1..870: mol_type = other DNA
atgactggagtgtttgacagaagagtgcccagcatccgcagcggggacttccaggcccccttccagaccagcgctgccatgcaccaccccagccaggagagccccaccctgcctgagagcagcgccacagacagcgactactacagccccactggaggagccccccacggctactgcagccccaccagcgccagctatggcaaggccctgaacccctaccagtaccagtaccacggcgtgaatggatctgctggcagctacccagccaaggcctatgctgactacagctatgccagcagctaccaccagtatggaggagcctacaacagagtgcccagcgccaccaaccagcctgagaaggaggtgacagagcctgaggtgaggatggtgaatggcaagcccaagaaggtgaggaagcccaggaccatctacagcagcttccagctggccgccctgcagaggcgcttccagaagacccagtacctggccctgcctgagcgggcagagctggccgccagcctgggcctgacccagacccaggtgaagatctggttccagaacaagaggagcaagatcaagaagatcatgaagaatggagagatgcctcctgagcacagccccagcagcagtgaccccatggcctgcaacagcccccagagccctgctgtgtgggagccccagggcagcagccgcagcctgagccaccacccccacgcccacccccccaccagcaaccagagccctgccagcagctacctggagaacagcgcctcctggtacaccagcgctgccagcagcatcaacagccacctgcccccacctggcagcctgcagcaccccctggccctggccagcggcaccctgtactag

SEQ ID NO: 159372 - DNA, 1623 bp, synthetic construct
  misc_feature 1..1623: note = Description of Artificial Sequence: Synthetic coding sequence
  source 1..1623: mol_type = other DNA
atgcagcaggtgctggagaacctgacagagctgcccagcagcactggagctgaggagattgacctgatcttcctgaagggcatcatggagaaccccatcgtgaagagcctggccaaggcccacgagcggctggaggacagcaagctggaggccgtgtctgacaacaacctggagctggtgaatgagatcctggaggacatcacccccctcatcaacgtggatgaaaatgtggccgagctggtgggcatcctgaaggagccccacttccagagcctgctggaggcccatgacatcgtggccagcaagtgctatgacagcccccccagcagccctgagatgaacaacagcagcatcaacaaccagctgctgcctgtggatgccatccgcatcctgggcatccacaagagagctggggagcccctgggcgtgaccttccgggtggagaacaatgacctggtgattgcccgcatcctgcatggaggcatgattgaccggcagggcctgctgcacgtgggggacatcatcaaggaggtgaatggacatgaggtgggcaacaaccccaaggagctgcaggagctgctgaagaacatcagcggctctgtgaccctgaagatcctgcccagctacagagacaccatcaccccccagcaggtgtttgtgaagtgccactttgactacaacccctacaatgacaacctgatcccctgcaaggaggccggcctgaagttcagcaaaggagagatcctgcagatcgtgaaccgggaggaccccaactggtggcaggccagccacgtgaaggagggcggcagcgctggcctcatccccagccagttcctggaggagaagaggaaggcctttgtgcggcgggactgggacaacagcggccccttctgtggcaccatcagcagcaagaagaagaagaagatgatgtacctgaccaccagaaatgctgagtttgacagacatgagatccagatctatgaggaggtggccaagatgccacccttccagaggaagaccctggtgctgattggagcccagggcgtgggcagaagaagcctgaagaaccgcttcatcgtgctgaaccccacccgcttcggcaccaccgtgcccttcaccagcaggaagcccagagaagatgagaaggatggccaggcctacaagtttgtgagccgctctgagatggaggccgacatcaaggccggcaagtacctggagcacggggagtatgagggcaacctgtatggcaccaagattgacagcatcctggaggtggtgcagacaggccgcacctgcatcctggatgtgaacccccaggccctgaaggtgctgcggaccagcgagttcatgccctacgtggtgttcatcgccgcccctgagctggagaccctgcgggccatgcacaaggctgtggtggatgctggcatcaccaccaagctgctgacagacagcgacctgaagaagacagtggatgaaagtgcccgcatccagagggcctacaaccactactttgacctgatcatcatcaatgacaacctggacaaggcctttgagaagctgcagacagccatcgagaagctgaggatggagccccagtgggtgcccatctcctgggtgtactag

SEQ ID NO: 159373 - DNA, 1287 bp, synthetic construct
  misc_feature 1..1287: note = Description of Artificial Sequence: Synthetic coding sequence
  source 1..1287: mol_type = other DNA
atgaacaacagcagcatcaacaaccagctgctgcctgtggatgccatccgcatcctgggcatccacaagagagctggggagcccctgggcgtgaccttccgggtggagaacaatgacctggtgattgcccgcatcctgcatggaggcatgattgaccggcagggcctgctgcacgtgggggacatcatcaaggaggtgaatggacatgaggtgggcaacaaccccaaggagctgcaggagctgctgaagaacatcagcggctctgtgaccctgaagatcctgcccagctacagagacaccatcaccccccagcaggtgtttgtgaagtgccactttgactacaacccctacaatgacaacctgatcccctgcaaggaggccggcctgaagttcagcaaaggagagatcctgcagatcgtgaaccgggaggaccccaactggtggcaggccagccacgtgaaggagggcggcagcgctggcctcatccccagccagttcctggaggagaagaggaaggcctttgtgcggcgggactgggacaacagcggccccttctgtggcaccatcagcagcaagaagaagaagaagatgatgtacctgaccaccagaaatgctgagtttgacagacatgagatccagatctatgaggaggtggccaagatgccacccttccagaggaagaccctggtgctgattggagcccagggcgtgggcagaagaagcctgaagaaccgcttcatcgtgctgaaccccacccgcttcggcaccaccgtgcccttcaccagcaggaagcccagagaagatgagaaggatggccaggcctacaagtttgtgagccgctctgagatggaggccgacatcaaggccggcaagtacctggagcacggggagtatgagggcaacctgtatggcaccaagattgacagcatcctggaggtggtgcagacaggccgcacctgcatcctggatgtgaacccccaggccctgaaggtgctgcggaccagcgagttcatgccctacgtggtgttcatcgccgcccctgagctggagaccctgcgggccatgcacaaggctgtggtggatgctggcatcaccaccaagctgctgacagacagcgacctgaagaagacagtggatgaaagtgcccgcatccagagggcctacaaccactactttgacctgatcatcatcaatgacaacctggacaaggcctttgagaagctgcagacagccatcgagaagctgaggatggagccccagtgggtgcccatctcctgggtgtactag

SEQ ID NO: 159374 - DNA, 924 bp, synthetic construct
  misc_feature 1..924: note = Description of Artificial Sequence: Synthetic coding sequence
  source 1..924: mol_type = other DNA
atgcagcaggtgctggagaacctgacagagctgcccagcagcactggagctgaggagattgacctgatcttcctgaagggcatcatggagaaccccatcgtgaagagcctggccaaggcccacgagcggctggaggacagcaagctggaggccgtgtctgacaacaacctggagctggtgaatgagatcctggaggacatcacccccctcatcaacgtggatgaaaatgtggccgagctggtgggcatcctgaaggagccccacttccagagcctgctggaggcccatgacatcgtggccagcaagtgctatgacagcccccccagcagccctgagatgaacaacagcagcatcaacaaccagctgctgcctgtggatgccatccgcatcctgggcatccacaagagagctggggagcccctgggcgtgaccttccgggtggagaacaatgacctggtgattgcccgcatcctgcatggaggcatgattgaccggcagggcctgctgcacgtgggggacatcatcaaggaggtgaatggacatgaggtgggcaacaaccccaaggagctgcaggagctgctgaagaacatcagcggctctgtgaccctgaagatcctgcccagctacagagacaccatcaccccccagcaggtgtttgtgaagtgccactttgactacaacccctacaatgacaacctgatcccctgcaaggaggccggcctgaagttcagcaaaggagagatcctgcagatcgtgaaccgggaggaccccaactggtggcaggccagccacgtgaaggagggcggcagcgctggcctcatccccagccagttcctggaggagaagaggaaggcctttgtgcggcgggactgggacaacagcggccccttctgtggcaccatcagcagcaagaagaagaagtag

SEQ ID NO: 159375 - DNA, 654 bp, synthetic construct
  misc_feature 1..654: note = Description of Artificial Sequence: Synthetic coding sequence
  source 1..654: mol_type = other DNA
atgcagcaggtgctggagaacctgacagagctgcccagcagcactggagctgaggagattgacctgatcttcctgaagggcatcatggagaaccccatcgtgaagagcctggccaaggcccacgagcggctggaggacagcaagctggaggccgtgtctgacaacaacctggagctggtgaatgagatcctggaggacatcacccccctcatcaacgtggatgaaaatgtggccgagctggtgggcatcctgaaggagccccacttccagagcctgctggaggcccatgacatcgtggccagcaagtgctatgacagcccccccagcagccctgagatgaacaacagcagcatcaacaaccagctgctgcctgtggatgccatccgcatcctgggcatccacaagagagctggggagcccctgggcgtgaccttccgggtggagaacaatgacctggtgattgcccgcatcctgcatggaggcatgattgaccggcagggcctgctgcacgtgggggacatcatcaaggaggtgaatggacatgaggtgggcaacaaccccaaggagctgcaggagctgctgaagaacatcagcggctctgtgaccctgaagatcctgcccagctacagagacaccatcaccccccagcagtag

SEQ ID NO: 159376 - DNA, 1731 bp, synthetic construct
  misc_feature 1..1731: note = Description of Artificial Sequence: Synthetic coding sequence
  source 1..1731: mol_type = other DNA
atgcctgccctgagcacaggcagcggcagtgacaccggcctgtatgagctgctggccgccctgcctgcccagctgcagccccacgtggacagccaggaggacctgaccttcctgtgggacatgtttggagagaagagcctgcacagcctggtgaagatccacgagaagctgcactactatgagaagcagagccctgtgcccatcctgcacggggctgctgccctggctgatgacctggccgaggagctgcagaacaagcccctgaacagcgagatccgggagctgctgaagctgctgagcaagcccaacgtgaaggccctgctgtctgtgcatgacacagtggcccagaagaactatgaccctgtgctgccccccatgcctgaggacattgatgatgaggaggacagcgtgaagatcatccggctggtgaagaaccgggagcccctgggcgccaccatcaagaaggatgagcagacaggagccatcatcgtggcccgcatcatgaggggcggcgctgctgacaggagcggcctcatccacgtgggagatgagctgcgggaggtgaatggcatccctgtggaggacaagaggcctgaggagatcatccagatcctggcccagagccagggcgccatcaccttcaagatcatccctggcagcaaggaggagacccccagcaaggagggcaagatgttcatcaaggccctgtttgactacaaccccaatgaagacaaggccatcccctgcaaggaggccggcctgtccttcaagaagggggacatcctgcagatcatgagccaggatgatgccacctggtggcaggccaagcatgaagcagatgccaaccccagggctggcctcatccccagcaagcacttccaggagcggcggctggccctgcggcggcctgagatcctggtgcagcccctgaaggtgagcaacaggaagagcagcggcttcaggaagagcttccggctgagcaggaaggacaagaagaccaacaagtccatgtatgagtgcaagaagagtgaccagtatgacacagcagatgtgcccacctatgaggaggtgaccccctaccgccggcagaccaatgagaagtaccgcctggtggtgctggtgggccctgtgggcgtgggcctgaatgagctgaagaggaagctgctgatcagtgacacccagcactacggcgtgacagtgccccacaccacccgggcccggcgcagccaggagagtgatggagtggagtacatcttcatcagcaagcacctgtttgaaacagatgtgcagaacaacaagttcattgaatatggagagtacaagaacaactactacggcaccagcattgattctgtgcgctctgtgctggccaagaacaaggtgtgcctgctggatgtgcagccccacacagtgaagcacctgcggaccctggagttcaagccctacgtgatcttcatcaagccacccagcattgagcggctgcgggagaccaggaagaatgccaagatcatcagcagcagagatgaccagggcgccgccaagcccttcacagaggaggacttccaggagatgatcaagagcgcccagatcatggagagccagtatggccacctgtttgacaagatcatcatcaatgatgacctgactgtggccttcaatgagctgaagaccacctttgacaagctggagacagagacccactgggtgcctgtgtcctggctgcacagctag

SEQ ID NO: 159377 - DNA, 1731 bp, synthetic construct; identical to SEQ ID NO: 159376
  misc_feature 1..1731: note = Description of Artificial Sequence: Synthetic coding sequence
  source 1..1731: mol_type = other DNA

SEQ ID NO: 159378 - DNA, 1731 bp, synthetic construct; identical to SEQ ID NO: 159376
  misc_feature 1..1731: note = Description of Artificial Sequence: Synthetic coding sequence
  source 1..1731: mol_type = other DNA

SEQ ID NO: 159379 - DNA, 939 bp, synthetic construct
  misc_feature 1..939: note = Description of Artificial Sequence: Synthetic coding sequence
  source 1..939: mol_type = other DNA
atgcctgccctgagcacaggcagcggcagtgacaccggcctgtatgagctgctggccgccctgcctgcccagctgcagccccacgtggacagccaggaggacctgaccttcctgtgggacatgtttggagagaagagcctgcacagcctggtgaagcacttccaggagcggcggctggccctgcggcggcctgagatcctggtgcagcccctgaaggtgagcaacaggaagagcagcggcttcaggaagagcttccggctgagcaggaaggacaagaagaccaacaagtccatgtatgagtgcaagaagagtgaccagtatgacacagcagatgtgcccacctatgaggaggtgaccccctaccgccggcagaccaatgagaagtaccgcctggtggtgctggtgggccctgtgggcgtgggcctgaatgagctgaagaggaagctgctgatcagtgacacccagcactatggagtgacagtgccccacaccacccgggcccggcgcagccaggagagtgatggagtggagtacatcttcatcagcaagcacctgtttgaaacagatgtgcagaacaacaagttcatcgagtatggagagtacaagaacaactactacggcaccagcattgacagcgtgcgctctgtgctggccaagaacaaggtgtgcctgctggatgtgcagccccacacagtgaagcacctgcggaccctggagttcaagccctacgtgatcttcatcaagcccccatccattgaaaggctgcgggagaccaggaagaatgccaagatcatcagcagcagagatgaccagggcgccgccaagcccttcacagaggaggacttccaggagatgatcaagagcgcccagatcatggagagccagtatggccacctgtttgacaagatcatcatcaatgatgacctgactgtggcctag

SEQ ID NO: 159380 - DNA, 1125 bp, synthetic construct
  misc_feature 1..1125: note = Description of Artificial Sequence: Synthetic coding sequence
  source 1..1125: mol_type = other DNA
atgccagaagatattgatgatgaagaagattctgtgaagatcatccggctggtgaagaaccgggagcccctgggcgccaccatcaagaaggatgagcagacaggagccatcatcgtggcccgcatcatgagaggaggagctgctgacagaagtggcctcatccacgtgggagatgagctgcgggaggtgaatggcatccctgtggaggacaagaggcctgaggagatcatccagatcctggcccagagccagggcgccatcaccttcaagatcatccctggcagcaaggaggagacccccagcaaggagggcaagatgttcatcaaggccctgtttgactacaaccccaatgaagacaaggccatcccctgcaaggaggccggcctgtccttcaagaagggggacatcctgcagatcatgagccaggatgatgccacctggtggcaggccaagcatgaagcagatgccaacccccgggccggcctcatccccagcaagcacttccaggagcggcggctggccctgcggcggcctgagatcctggtgcagcccctgaaggtgagcaacaggaagagcagcggcttcaggaagagcttccggctgagcaggaaggacaagaagaccaacaagtccatgtatgagtgcaagaagagtgaccagtatgacacagcagatgtgcccacctatgaggaggtgaccccctaccgccggcagaccaatgagaagtaccgcctggtggtgctggtgggccctgtgggcgtgggcctgaatgagctgaagaggaagctgctgatcagtgacacccagcactatggagtgacagtgccccacaccacccgggcccggcgcagccaggagagtgatggagtggagtacatcttcatcagcaagcacctgtttgaaacagatgtgcagaacaacaagttcatcgagtatggagagtacaagaacaactactacggcaccagcattgacagcgtgcgctctgtgctggccaagaacaaggtgtgcctgctggatgtgcagccccacggcccctggttcctgctgcccctgatggctgtgccctggggcgccaagcccccaaatgccaggatgacctgtggcagccccctggacctgtag

SEQ ID NO: 159381 - DNA, 1731 bp, synthetic construct; identical to SEQ ID NO: 159376
  misc_feature 1..1731: note = Description of Artificial Sequence: Synthetic coding sequence
  source 1..1731: mol_type = other DNA

SEQ ID NO: 159382 - DNA, 870 bp, synthetic construct
  misc_feature 1..870: note = Description of Artificial Sequence: Synthetic coding sequence
  source 1..870: mol_type = other DNA
atgctgggctggtgtgaggccatcgccaggaacccccaccgcatccccaacaacaccaggaccccagagatcagcggggacctggctgatgccagccagaccagcaccctgaatgagaagagccctggccgcagcgccagccgcagcagcaacatcagcaaggccagcagccccaccaccggcacagcccccaggagccagagccggctgtctgtgtgccccagcacccaggacatctgccgcatctgccactgtgaaggagatgaggagagccccctcatcaccccctgccgctgcaccggcaccctgcgctttgtgcaccagagctgcctgcaccagtggatcaagagcagtgacacccgctgctgtgagctgtgcaagtatgacttcatcatggagaccaagctgaagcccctgaggaagtgggagaagctgcagatgaccaccagcgagaggaggaagatcttctgcagcgtgaccttccacgtgattgccatcacctgtgtggtgtggagcctgtatgtgctgattgacagaacagctgaggagatcaagcagggcaatgacaacggggtgctggagtggcccttctggaccaagctggtggtggtggccatcggcttcaccggcggcctggtgttcatgtatgtgcagtgcaaggtgtatgtgcagctgtggaggcggctgaaggcctacaacagagtcatctttgtgcagaactgcccagacacagccaagaagctggagaagaacttcagctgcaatgtgaacacagacatcaaggatgctgtggtggtgcctgtgccccagacaggagccaacagcctgcccagcgctgagggcggccccccagaggtggtgtctgtgtag

SEQ ID NO: 159383 - DNA, 819 bp, synthetic construct
  misc_feature 1..819: note = Description of Artificial Sequence: Synthetic coding sequence
  source 1..819: mol_type = other DNA
atgaccagcagccacgtgtgctgcaacttcctgaacatgtggaagaagagcaagatcagcaccatgtactacctgaaccaggatgccaagctgagcaacctcttcctgcaggccagcagccccaccactggaacagcccccaggagccagagccggctgtctgtgtgccccagcacccaggacatctgccgcatctgccactgtgaaggagatgaggagagccccctcatcaccccctgccgctgcaccggcaccctgcgctttgtgcaccagagctgcctgcaccagtggatcaagagcagtgacacccgctgctgtgagctgtgcaagtatgacttcatcatggagaccaagctgaagcccctgaggaagtgggagaagctgcagatgaccaccagcgagaggaggaagatcttctgcagcgtgaccttccacgtgattgccatcacctgtgtggtgtggagcctgtatgtgctgattgacagaacagctgaggagatcaagcagggcaatgacaatggagtgctggagtggcccttctggaccaagctggtggtggtggccatcggcttcaccggcggcctggtgttcatgtatgtgcagtgcaaggtgtatgtgcagctgtggaggcggctgaaggcctacaacagagtcatctttgtgcagaactgcccagacacagccaagaagctggagaagaacttcagctgcaatgtgaacacagacatcaaggatgctgtggtggtgcctgtgccccagacaggagccaacagcctgcccagcgctgagggcggccccccagaggtggtgtctgtgtag

SEQ ID NO: 159384 - DNA, 870 bp, synthetic construct; identical to SEQ ID NO: 159382
  misc_feature 1..870: note = Description of Artificial Sequence: Synthetic coding sequence
  source 1..870: mol_type = other DNA

SEQ ID NO: 159385 - DNA, 426 bp, synthetic construct
  misc_feature 1..426: note = Description of Artificial Sequence: Synthetic coding sequence
  source 1..426: mol_type = other DNA
atgctgggctggtgtgaggccatcgccaggaacccccaccgcatccccaacaacaccaggaccccagagatcagcggggacctggctgatgccagccagaccagcaccctgaatgagaagagccctggccgcagcgccagccgcagcagcaacatcagcaaggccagcagccccaccaccggcacagcccccaggagccagagccggctgtctgtgtgccccagcacccaggacatctgccgcatctgccactgtgaaggagatgaggagagccccctcatcaccccctgccgctgcaccggcaccctgcgctttgtgcaccagagctgcctgcaccagtggatcaagagcagtgacacccgctgctgtgagctgtgcaagtatgacttcatcatggagaccaagctgaagcccctgaggaagtag

SEQ ID NO: 159386 - DNA, 2427 bp, synthetic construct
  misc_feature 1..2427: note = Description of Artificial Sequence: Synthetic coding sequence
  source 1..2427: mol_type = other DNA
atgctgcatgatgcccgggaccggcagaagttcttcagtgatgtgcagtacctgcgggacatgcagcacaaggtggacagcgagtaccaggcctgcctgcggcggcaggagtacagaagagaccccaatgagaagaagagggaccagttctggggccaggagaccagctttgagaggagccgcttcagcagccgcagcagcagcaagcagagcagcagtgaagaagatgccctgacagagcccaggagcagcatcaagatcagcgccttcaagtgtgacagcaagctgcctgccatcgaccagacctctgtgaagcagaagcacaagagcaccatgacagtgaggaaggccgagaaggtggaccccagcgagcccagccctgctgaccaggcccccatggtgctgctgaggaagaggaagcccaacctgcggcgcttcaccgtgtccccagagagccacagcccccgggccagcggggacaggagccggcagaagcagcagtggccagccaaggtgcctgtgcccagaggagctgaccaggtggtgcagcaggagggcctgatgtgcaacaccaagctgaagaggcccaaccaggagaggaggaacctggtgcccagcagccagcccatgacagaaaatgccccagaccgggccaagaagggggaccccagcgcccccagccagagcgagctgcacccagccctgagccaggccttccagggcaagaacagcccccaggtgctgtctgagttcagcggcccccccctgacccccaccaccgtgggcggccccaggaaggccagcttccgcttcagagatgaggacttctacagcatcctgagcctgaacagcagaagagaaagtgatgacacagaggaggagacccagagtgaagaatgtctgtgggtgggcgtgcgcagcccctgcagccccagccaccacaagaggagcagatttggaggcaccagcaccccccaggccaagaacaagaactttgaggagaatgctgagaactgccggggccacagcagcagaagaagtgagcccagccacggcagcctgcgcatcagcaatgccatggagcccgccacagagcggcccagcgctggccagaggctgagccaggaccccggcctgcctgaccgggagagcgccacagagaaggacagaggaggctctgaaaatgccaagaagagccccctgtcctgggacaccaagtctgagccccggcaggaggtgggcgtgaatgcagaaaatgtgtggagcgactgcatctctgtggagcacaggcctggcacccatgacagcgagggctactggaaggactacctgaacagcagccagaacagcctggactacttcatcagcggccggcccatcagccccaggagctctgtgaacagcagctacaaccccccagccagcttcatgcacagcgccctgagagatgacatccctgtggacctgtccatgagcagcacctctgtgcacagcagtgacagcgagggcaacagcggcttccacgtgtgccagcccctgagccccatccggaacagaacaccatttgccagcgctgagaaccacaactacttccctgtgaacagcgcccatgaatttgctgtgcgggaggccgaggacaccaccctgaccagccagccccagggcgcccccctgtacacagacctgctgctgaacccccagggcaacctgagcctggtggacagcagcagcagcagccccagcaggatgaacagcgagggccacctgcacgtgtctggcagcctgcaggagaacacccccttcaccttctttgctgtgagccacttccccaaccagaatgacaatggcagcaggatggccgccagcggcttcacagatgagaaggagaccagcaagatcaaggctgaccctgagaagctgaagaagctgcaggagagcctgctggaggaggacagcgaggaggagggggacctgtgccgcatctgccagattgctgggggcagccccagcaaccccctgctggagccctgtggctgtgtgggcagcctgcagtttgtgcaccaggagtgcctgaagaagtggctgaaggtgaagatcaccagcggggctgacctgggcgctgtgaagacctgtgagatgtgcaagcagggcctgctggtggacctgggggacttcaacatgattgagttctaccagaagcaccagcagagccaggcccagaatgagctgatgaacagcggcctgtacctggtgctgctgctgcacctgtatgagcagagatttgctgagctgatgaggctgaaccacaaccaggtggagcgggagcggctgagcaggaactacccccagcccaggacagaggagaatgaaaacagcgagctgggagatggaaatgaaggcagcatcagccagagccaggtggtgtag

SEQ ID NO: 159387 - DNA, 2427 bp, synthetic construct; identical to SEQ ID NO: 159386
  misc_feature 1..2427: note = Description of Artificial Sequence: Synthetic coding sequence
  source 1..2427: mol_type = other DNA

SEQ ID NO: 159388 - DNA, 2400 bp, synthetic construct
  misc_feature 1..2400: note = Description of Artificial Sequence: Synthetic coding sequence
  source 1..2400: mol_type = other DNA
atgctgcatgatgcccgggaccggcagaagttcttcagtgatgtgcagtacctgcgggacatgcagcacaaggtggacagcgagtaccaggcctgcctgcggcggcaggagtacagaagagaccccaatgagaagaagagggaccagttctggggccaggagaccagctttgagaggagccgcttcagcagccgcagcagcagcaagcagagcagcagtgaagaagatgccctgacagagcccaggagcagcatcaagatcagcgccttcaagtgtgacagcaagctgcctgccatcgaccagacctctgtgaagcagaagcacaagagcaccatgacagtgaggaaggccgagaaggtggaccccagcgagcccagcccagaccaggcccccatggtgctgctgaggaagaggaagcccaacctgcggcgcttcaccgtgtccccagagagccacagcccccgggccagcggggacaggagccggcagaagcagcagtggccagccaaggtgcctgtgcccagaggagctgaccaggtggtgcagcaggagggcctgatgtgcaacaccaagctgaagaggcccaaccaggagaggaggaacctggtgcccagcagccagcccatgacagaaaatgccccagaccgggccaagaagggggaccccagcgcccccagccagagcgagctgcacccagccctgagccaggccttccagggcaagaacagcccccaggtgctgtctgagttcagcggcccccccctgacccccaccaccgtgggcggccccaggaaggccagcttccgcttcagagatgaggacttctacagcatcctgagcctgaacagccggcgggagagtgatgacacagaggaggagacccagagcgaggagtgcctgtgggtgggcgtgcgcagcccctgcagccccagccaccacaagaggagcagatttggaggcaccagcaccccccaggccaagaacaagaactttgaagaaaatgctgagaactgccggggccacagcagccgccgctctgagcccagccacggcagcctgcgcatcagcaatgccatggagcccgccacagagcggcccagcgctggccagaggctgagccaggaccccggcctgcctgaccgggagagcgccacagagaaggaccggggcggctctgaaaatgccaagaagagccccctgtcctgggacaccaagtctgagccccggcaggaggtgggcgtgaatgcagaaaatgtgtggagcgactgcatctctgtggagcaccggcccggcacccatgattctgagggctactggaaggactacctgaacagcagccagaacagcctggactacttcatcagcggccggcccatcagccccaggagctctgtgaacagcagctacaaccccccagccagcttcatgcacagcgccctgagagatgacatccctgtggacctgtccatgagcagcacctctgtgcacagcagtgacagcgagggcaacagcggcttccacgtgtgccagcccctgagccccatccggaacagaacaccatttgccagcgctgagaaccacaactacttccctgtgaacagcgcccacgagtttgctgtgcgggaggccgaggacaccaccctgaccagccagccccagggcgcccccctgtacacagacctgctgctgaacccccagggcaacctgagcctggtggacagcagcagcagcagccccagcaggatgaacagcgagggccacctgcacgtgtctggcagcctgcaggagaacacccccttcaccttctttgctgtgagccacttccccaaccagaatgacaatggcagcaggatggccgccagcggcttcacagatgagaaggagaccagcaagatcaaggctgaccctgagaagctgaagaagctgcaggagagcctgctggaggaggacagcgaggaggagggggacctgtgccgcatctgccagattgctgggggcagccccagcaaccccctgctggagccctgtggctgtgtgggcagcctgcagtttgtgcaccaggagtgcctgaagaagtggctgaaggtgaagatcaccagcggggctgacctgggcgctgtgaagacctgtgagatgtgcaagcagggcctgctggtggacctgggggacttcaacatgattgagttctaccagaagcaccagcagagccaggcccagaatgagctgatgaacagcggcctgtacctggtgctgctgctgcacctgtatgagcagagatttgctgagctgatgaggctgaaccacaaccaggtggagcgggagcggctgagcaggaactacccccagcccaggacagaagaaaatgaaagccgcttctggggccctgtgctgcccttctag

SEQ ID NO: 159389 - DNA, 1209 bp, synthetic construct
  misc_feature 1..1209: note = Description of Artificial Sequence: Synthetic coding sequence
  source 1..1209: mol_type = other DNA
atgagctttgaaggaggccatggaggcagccgctgcagaggagctgagagcggagatgctgagcccccaccccagcccccacctcctcctccacccaccccacctcctggagagcccgcccctgtgcctgctgccccccgctacctgccccccctgcctgccagccctgagaccccagagagagctgctggccccagcgagcccctgggggaggtggccccccgctgcagaggagcagatgagctgcccccaccacccctgcccctgcagcctgctggccaggaggtggccgctgctggggacagcggggagggcccccggcggctgcctgaggccgccgccgccaagggcggccctggagagagcgaggccggggccggcggggagcgggagaggagaggagctggggaccagcctgagaccaggtctgtgtgcagcagccgcagcagcagcagcggcggcggggaccagagagctggccaccagcaccagcaccaccagcccatctgcaagatctgcttccagggcgctgagcagggcgagctgctgaacccctgccgctgtgatggctctgtgcgctacacccaccagctgtgcctgctgaagtggatcagcgagcggggctcctggacctgtgagctgtgctgctaccgctaccacgtgattgccatcaagatgaagcagccctgccagtggcagagcatcagcatcaccctggtggagaaggtgcagatgattgctgtgatcctgggcagcctcttcctgattgcctctgtgacctggctgctgtggagcgccttcagcccctatgctgtgtggcagaggaaggacatcctcttccagatctgctacggcatgtatggcttcatggacctggtgtgcatcggcctcatcgtgcatgagggcgctgctgtgtacagagtcttcaagcgctggagggctgtgaacctgcactgggatgtgctgaactatgacaaggccacagacatcgaggagagcagcagaggagagagcagcaccagcaggaccctgtggctgcccctgacagccctgaggaacagaaacctggtgcaccccacccagctgaccagcccccgcttccagtgtggctacgtgctgctgcacctgttcaacaggatgaggcctcatgaggacctgtctgaggacaacagcagcggggaggtggtgatgagggtgacctctgtgtag

SEQ ID NO: 159390 - DNA, 1818 bp, synthetic construct
  misc_feature 1..1818: note = Description of Artificial Sequence: Synthetic coding sequence
  source 1..1818: mol_type = other DNA
atggccctgaggaaaggaggcctggccctggccctgctgctgctgtcctgggtggccctgggccccaggagcctggagggcgctgaccccggcaccccaggagaggccgagggccctgcctgcccagctgcctgtgtgtgcagctatgatgatgatgctgatgagctgtctgtgttctgcagcagcaggaacctgacccggctgcctgatggagtgcctgggggcacccaggccctgtggctggatggcaacaacctgagctctgtgcccccagctgccttccagaacctgagcagcctgggcttcctgaacctgcagggcggccagctgggcagcctggagccccaggccctgctgggcctggagaacctgtgccacctgcacctggagaggaaccagctgcggagcctggccctgggcacctttgcccacaccccagccctggccagcctgggcctgagcaacaaccggctgagccggctggaggatggcctgtttgagggcctgggcagcctgtgggacctgaacctgggctggaacagcctggccgtgctgcctgatgctgccttccggggcctgggcagcctgcgggagctggtgctggccggcaaccggctggcctacctgcagcctgccctcttcagcggcctggccgagctgcgggagctggacctgagcagaaatgccctgcgggccatcaaggccaacgtgtttgtgcagctgccccggctgcagaagctgtacctggacaggaacctgattgctgctgtggcccctggggccttcctgggcctgaaggccctgcgctggctggacctgagccacaacagagtggccggcctgctggaggacaccttccctggcctgctgggcctgcgggtgctgcggctgagccacaatgccatcgccagcctgcggcccaggaccttcaaggacctgcacttcctggaggagctgcagctgggccacaaccgcatccggcagctggccgagaggagctttgagggcctgggccagctggaggtgctgaccctggaccacaaccagctgcaggaggtgaaggccggggccttcctgggcctgaccaacgtggccgtgatgaacctgagcggcaactgcctgaggaacctgcctgagcaggtgttccggggcctgggcaagctgcacagcctgcacctggagggcagctgcctgggccgcatccggccccacaccttcaccggcctgagcggcctgcggcggctcttcctgaaggacaatggcctggtgggcatcgaggagcagagcctgtggggcctggccgagctgctggagctggacctgaccagcaaccagctgacccacctgccccacaggctcttccagggcctgggcaagctggagtacctgctgctgagcaggaaccggctggccgagctgcctgcagatgccctgggccccctgcagagggccttctggctggatgtgagccacaaccggctggaggccctgcccaacagcctgctggcccccctgggccgcctgcgctacctgagcctgaggaacaacagcctgcggaccttcaccccccagcccccaggcctggagcggctgtggctggagggcaacccctgggactgtggctgccccctgaaggccctgcgggactttgccctgcagaaccccagcgctgtgcccaggtttgtgcaggccatctgtgaaggagatgactgccagcccccagcctacacctacaacaacatcacctgtgccagccccccagaggtggtgggcctggacctgcgggacctgtctgaggcccactttgccccctgctag

SEQ ID NO: 159391 - DNA, 531 bp, synthetic construct
  misc_feature 1..531: note = Description of Artificial Sequence: Synthetic coding sequence
  source 1..531: mol_type = other DNA
atgaccactggagactgctgccacctgcccggcagcctgtgtgactgcagcggcagccctgccttcagcaaggtggtggaggccaccggcctgggccccccccagtatgtggcccaggtgaccagcagagatggccgcctgctgagcaccgtcatccgggccctggacacccccagtgatggccccttctgccgcatctgccacgagggcgccaacggggagtgcctgctgagcccctgtggctgcaccggcaccctgggcgctgtgcacaagagctgcctggagaagtggctgagcagcagcaacaccagctactgtgagctgtgccacacagaatttgctgtggagaagaggccccggcccctgacagaggtgtccttccgctaccactgccagctgtacagcgagtggaggaagaccaaccagaaggtgcggctgaagatccgggaggccgacagccctgagggcccccagcacagccccctggccgccggcctgctgaagaaggtggccgaggagacccctgtgtag

SEQ ID NO: 159392 - DNA, 741 bp, synthetic construct
  misc_feature 1..741: note = Description of Artificial Sequence: Synthetic coding sequence
  source 1..741: mol_type = other DNA
atgaccactggagactgctgccacctgcccggcagcctgtgtgactgcagcggcagccctgccttcagcaaggtggtggaggccaccggcctgggccccccccagtatgtggcccaggtgaccagcagagatggccgcctgctgagcaccgtcatccgggccctggacacccccagtgatggccccttctgccgcatctgccacgagggcgccaacggggagtgcctgctgagcccctgtggctgcaccggcaccctgggcgctgtgcacaagagctgcctggagaagtggctgagcagcagcaacaccagctactgtgagctgtgccacacagaatttgctgtggagaagaggccccggcccctgacagagtggctgaaggaccccggccccaggacagagaagaggaccctgtgctgtgacatggtgtgcttcctgttcatcacccccctggccgccatcagcggctggctgtgcctgcggggggcccaggaccacctgcggctgcacagccagctggaggccgtgggcctgattgccctgaccatcgccctcttcaccatctacgtgctgtggaccctggtgtccttccgctaccactgccagctgtacagcgagtggaggaagaccaaccagaaggtgcggctgaagatccgggaggccgacagccctgagggcccccagcacagccccctggccgccggcctgctgaagaaggtggccgaggagacccctgtgtag

SEQ ID NO: 159393 - DNA, 762 bp, synthetic construct
  misc_feature 1..762: note = Description of Artificial Sequence: Synthetic coding sequence
  source 1..762: mol_type = other DNA
atgaccaccagccgctgcagccacctgcctgaggtgctgcctgactgcaccagcagcgctgcccctgtggtgaagacagtggaggactgtggcagcctggtgaatggccagccccagtatgtgatgcaggtgtctgccaaggatggccagctgctgagcacagtggtgaggaccctggccacccagagccccttcaatgaccggcccatgtgccgcatctgccacgagggcagcagccaggaggacctgctgagcccctgtgagtgcaccggcaccctgggcaccatccacaggagctgcctggagcactggctgagcagcagcaacaccagctactgtgagctgtgccacttccgctttgctgtggagaggaagccccggcccctggtggagtggctgaggaaccctggcccccagcacgagaagaggaccctgtttggagacatggtgtgcttcctgttcatcacccccctggccaccatcagcggctggctgtgcctgcggggagctgtggaccacctgcacttcagcagccggctggaggccgtgggcctcatcgccctgactgtggccctcttcaccatctacctgttctggaccctggtgtccttccgctaccactgccgcctgtacaatgagtggaggaggaccaaccagagggtcatcctgctgatccccaagtctgtgaatgtgcccagcaaccagcccagcctgctgggcctgcacagcgtgaagaggaacagcaaggagaccgtggtgtag

SEQ ID NO: 159394 - DNA, 1233 bp, synthetic construct
  misc_feature 1..1233: note = Description of Artificial Sequence: Synthetic coding sequence
  source 1..1233: mol_type = other DNA
atgctgatgcccctgtgtggcctgctgtggtggtggtggtgctgctgcagcggctggtactgctacggcctgtgtgccccagccccccagatgctgcggcaccagggcctgctgaagtgccgctgcaggatgctgttcaatgacctgaaggtgttcctgctgcggcggcccccccaggcccccctgcccatgcatggagacccccagcccccaggcctggccgccaacaacaccctgcctgccctgggcgctgggggctgggccggctggaggggcccccgggaggtggtgggccgggagcccccacctgtgcccccacctccacccctgccccccagctctgtggaggatgactggggcggccctgccacagagcccccagccagcctgctgagcagcgccagcagtgatgacttctgcaaggagaagacagaagatcgctacagcctgggcagcagcctggacagcggcatgaggacccccctgtgccgcatctgcttccagggccctgagcagggcgagctgctgagcccctgccgctgtgatggctctgtgaagtgcacccaccagccctgcctgatcaagtggatcagcgagcggggctgctggagctgtgagctgtgctactacaagtaccacgtgattgccatcagcaccaagaaccccctgcagtggcaggccatcagcctgactgtgattgagaaggtgcaggtggccgccgccatcctgggcagcctcttcctgattgccagcatctcctggctgatctggagcaccttcagccccagcgcccgctggcagaggcaggacctgctcttccagatctgctacggcatgtatggcttcatggatgtggtgtgcatcggcctcatcatccacgagggccccagcgtgtaccgcatcttcaagcgctggcaggccgtgaaccagcagtggaaggtgctgaactatgacaagaccaaggacctggaggaccagaaggccggcggccgcaccaaccccaggaccagcagcagcacccaggccaacatccccagcagcgaggaggagacagctggcaccccagcccctgagcagggccctgcccaggccgccggccaccccagcggccccctgagccaccaccactgtgcctacaccatcctgcacatcctgagccacctgcggccccatgagcagaggagccccccaggcagcagccgggagctggtgatgagggtgaccaccgtgtag

SEQ ID NO: 159395 - DNA, 837 bp, synthetic construct
  misc_feature 1..837: note = Description of Artificial Sequence: Synthetic coding sequence
  source 1..837: mol_type = other DNA
atgccagaccaggccctgcagcagatgctggacaggagctgctgggtgtgctttgccacagatgaagatgacagaacagctgagtgggtgcggccctgccgctgccggggcagcaccaagtgggtgcaccaggcctgcctgcagcgctgggtggatgagaagcagaggggcaacagcacagcccgggtggcctgcccccagtgcaatgctgagtacctgattgtgttccccaagctgggccctgtggtgtatgtgctggacctggccgacaggctcatcagcaaggcctgcccctttgctgctgctggcatcatggtgggcagcatctactggacagctgtgacctacggggctgtgacagtgatgcaggtggtgggccacaaggagggcctggatgtgatggagagagctgaccccctcttcctgctgattggcctgcccaccatccctgtgatgctgatcctgggcaagatgatccgctgggaggactatgtgctgcggctgtggaggaagtacagcaacaagctgcagatcctgaacagcatcttccctggcatcggctgccctgtgccccgcatcccagctgaggccaaccccctggccgaccacgtgtctgccacccgcatcctgtgtggggccctggtgttccccaccatcgccaccatcgtgggcaagctgatgttcagctctgtgaacagcaacctgcagaggaccatcctgggcggcatcgcctttgtggccatcaagggggccttcaaggtgtacttcaagcagcagcagtacctgcggcaggcccacaggaagatcctgaactacccagagcaggaggaggcctag

SEQ ID NO: 159396 - DNA, 2733 bp, synthetic construct
  misc_feature 1..2733: note = Description of Artificial Sequence: Synthetic coding sequence
  source 1..2733: mol_type = other DNA
atggacacagctgaggaggacatctgccgggtgtgccgctctgagggcaccccagagaagcccctgtaccacccctgtgtgtgcaccggcagcatcaagttcatccaccaggagtgcctggtgcagtggctgaagcacagcaggaaggagtactgtgagctgtgcaagcacagatttgccttcacccccatctacagcccagacatgcccagccggctgcccatccaggacatctttgctggcctggtgaccagcatcggcacagccatccgctactggttccactacaccctggtggcctttgcctggctgggcgtggtgcccctgacagcctgccgcatctacaagtgcctcttcaccggctctgtgagcagcctgctgaccctgcccctggacatgctgagcacagagaacctgctggccgactgcctgcagggctgctttgtggtgacctgcaccctgtgtgccttcatcagcctggtgtggctgcgggagcagatcgtgcatggaggagcccccatctggctggagcacgccgccccacccttcaatgctgctggccaccaccagaatgaggccccagctggaggaaatggagcagaaaatgtggccgctgaccagcctgccaaccccccagcagaaaatgctgtggtgggggagaacccagatgcccaggatgaccaggccgaggaggaggaggaggacaatgaggaggaggatgatgctggggtggaggatgctgctgatgccaacaacggggcccaggatgacatgaactggaatgccctggagtgggacagagctgctgaggagctgacctgggagaggatgctgggcctggatggcagcctggtgttcctggagcacgtgttctgggtggtgtccctgaacaccctcttcatcctggtgtttgccttctgcccctaccacatcggccacttcagcctggtgggcctgggctttgaggagcacgtgcaggccagccactttgagggcctcatcaccaccatcgtgggctacatcctgctggccatcaccctcatcatctgccacggcctggccaccctggtgaagttccacaggagccggcggctgctgggcgtgtgctacatcgtggtgaaggtgtccctgctggtggtggtggagattggagtcttccccctcatctgtggctggtggctggacatctgcagcctggagatgtttgatgccaccctgaaggaccgggagctgtccttccagagcgcccctggcaccaccatgttcctgcactggctggtgggcatggtgtatgtgttctactttgccagcttcatcctgctgctgcgggaggtgctgcggcctggggtgctgtggttcctgaggaacctgaatgaccctgacttcaaccctgtgcaggagatgatccacctgcccatctaccgccacctgcggcgcttcatcctgtctgtgattgtgtttggcagcatcgtgctgctgatgctgtggctgcccatccgcatcatcaagtctgtgctgcccaacttcctgccctacaacgtgatgctgtacagtgatgcccctgtgtctgagctgagcctggagctgctgctgctgcaggtggtgctgcctgccctgctggagcagggccacacccggcagtggctgaagggcctggtgcgggcctggacagtgacagctggctacctgctggacctgcacagctacctgctgggggaccaggaggagaatgaaaacagcgccaaccagcaggtgaacaacaaccagcacgccaggaacaacaatgccatccctgtggtgggggagggcctgcacgccgcccaccaggccatcctgcagcagggcggccctgtgggcttccagccctaccgccggcccctgaacttccccctgcgcatcttcctgctgattgtgttcatgtgcatcaccctgctgattgccagcctcatctgcctgaccctgcctgtgtttgctggccgctggctgatgtccttctggacaggaacagccaagatccacgagctgtacacagctgcctgtggcctgtatgtgtgctggctgaccatccgggctgtgacagtgatggtggcctggatgccccagggcagaagagtcatcttccagaaggtgaaggagtggagcctgatgatcatgaagaccctcatcgtggccgtgctgctggccggcgtggtgcccctgctgctgggcctgctgtttgagctggtgattgtggcccccctgcgggtgcccctggaccagacccccctcttctacccctggcaggactgggccctgggcgtgctgcacgccaagatcatcgccgccatcaccctgatgggcccccagtggtggctgaagacagtgattgagcaggtgtatgccaacggcatccggaacatcgacctgcactacatcgtgaggaagctggccgcccctgtgatctctgtgctgctgctgagcctgtgtgtgccctacgtgattgccagcggcgtggtgcccctgctgggcgtgacagctgagatgcagaacctggtgcaccggcgcatctaccccttcctgctgatggtggtggtgctgatggccatcctgtccttccaggtgcggcagttcaagaggctgtatgagcacatcaagaatgacaagtacctggtgggccagaggctggtgaactatgaaaggaagagcggcaagcagggcagcagccccccaccaccccagagcagccaggagtag

SEQ ID NO: 159397 - DNA, 2115 bp, synthetic construct
  misc_feature 1..2115: note = Description of Artificial Sequence: Synthetic coding sequence
  source 1..2115: mol_type = other DNA
atggagagcaagcccagccgcatcccccggcgcatctctgtgcagcccagcagcagcctgagcgccaggatgatgagcggcagccggggcagcagcctgaatgacacctaccacagccgggacagcagcttccggctggacagcgagtaccagagcaccagcgccagcgccagcgccagccccttccagagcgcctggtacagcgagagcgagatcacccagggcgcccggagccgcagccagaaccagcagagggaccatgacagcaagaggcccaagctgagctgcaccaactgcaccaccagcgctggaagaaatgtgggcaatggcctgaacaccctgagtgacagctcctggaggcacagccaggtgcccaggagcagctccatggtgctgggcagctttggaacagacctgatgagggagcggcgggacctggagaggagaacagacagcagcatcagcaacctgatggactacagccacaggtctggggacttcaccaccagcagctatgtgcaggacagagtgcccagctacagccagggcgcccggcccaaggagaacagcatgagcaccctgcagctgaacaccagcagcaccaaccaccagctgcccagcgagcaccagaccatcctgagcagccgggacagcaggaacagcctgcggagcaacttcagcagccgggagagcgagagcagccgcagcaacacccagcccggcttctcctacagcagcagcagagatgaggcccccatcatcagcaacagcgagcgggtggtgagcagccagaggcccttccaggagagcagtgacaatgaaggccgccgcaccacccggcggctgctgagccgcatcgccagctccatgagcagcaccttcttcagcagaagaagcagccaggacagcctgaacaccaggagcctgaacagcgagaacagctatgtgagcccccgcatcctgacagccagccagagccgcagcaatgtgcccagcgccagcgaggtgcctgacaacagagccagcgaggccagccagggcttccgcttcctgcggcggcgctggggcctgagcagcctgagccacaaccacagcagcgagagtgacagcgagaacttcaaccaggagagcgagggcaggaacacaggcccctggctgagcagcagcctgaggaaccgctgcacccccctcttcagcagaagaagaagagagggcagagatgagagcagccgcatccccaccagtgacaccagcagccgcagccacatcttcagaagagagagcaatgaggtggtgcacctggaggcccagaatgaccccctgggcgccgccgccaaccggccccaggccagcgctgccagcagcagcgccaccactggaggcagcaccagtgacagcgcccagggcggcaggaacacaggcatcagcggcatcctgcccggcagcctcttccgctttgctgtgcccccagccctgggcagcaacctgacagacaacgtgatgatcaccgtggacatcatccccagcggctggaacagcgcagatggcaagagtgacaagaccaagagcgcccccagccgggaccctgagcggctgcagaagatcaaggagagcctgctgctggaggacagcgaggaggaggagggggacctgtgccgcatctgccagatggctgctgccagcagcagcaacctgctgattgagccctgcaagtgcaccggcagcctgcagtatgtgcaccaggactgcatgaagaagtggctgcaggccaagatcaacagcggcagcagcctggaggccgtgaccacctgtgagctgtgcaaggagaagctggagctgaacctggaggactttgacatccacgagctgcaccgggcccacgccaatgagcaggccgagtatgagttcatcagcagcggcctgtacctggtggtgctgctgcacctgtgtgagcagagcttcagtgacatgatgggcaacaccaatgagcccagcaccagggtgcgcttcatcaacctggcccggaccctgcaggcccacatggaggacctggagaccagtgaagatgattctgaagaagatggagaccacaacagaacatttgatattgcctag

SEQ ID NO: 159398 - DNA, 2115 bp, synthetic construct; identical to SEQ ID NO: 159397
  misc_feature 1..2115: note = Description of Artificial Sequence: Synthetic coding sequence
  source 1..2115: mol_type = other DNA

SEQ ID NO: 159399 - DNA, 306 bp, synthetic construct
  misc_feature 1..306: note = Description of Artificial Sequence: Synthetic coding sequence
  source 1..306: mol_type = other DNA
atggagagcaagcccagccgcatcccccggcgcatctctgtgcagcccagcagcagcctgagcgccaggatgatgagcggcagccggggcagcagcctgaatgacacctaccacagccgggacagcagcttccggctggacagcgagtaccagagcaccagcgccagcgccagcgccagccccttccagagcgcctggtacagcgagagcgagatcacccagggcgcccggagccgcagccagaaccagcagagggaccatgacagcaagaggcccaagctgagctgcaccaactgcaccacctag

SEQ ID NO: 159400 - DNA, 1908 bp, synthetic construct
  misc_feature 1..1908: note = Description of Artificial Sequence: Synthetic coding sequence
  source 1..1908: mol_type = other DNA
atggagagcaagcccagccgcatcccccggcgcatctctgtgcagcccagcagcagcctgagcgccaggatgatgagcggcagccggggcagcagcctgaatgacacctaccacagccgggacagcagcttccggctggacagcgagtaccagagcaccagcgccagcgccagcgccagccccttccagagcgcctggtacagcgagagcgagatcacccagggcgcccggagccgcagccagaaccagcagagggaccatgacagcaagaggcccaagctgagctgcaccaactgcaccaccagcgctggaagaaatgtgggcaatggcctgaacaccctgagtgatgtgcaggacagagtgcccagctacagccagggcgcccggcccaaggagaacagcatgagcaccctgcagctgaacaccagcagcaccaaccaccagctgcccagcgagcaccagaccatcctgagcagccgggacagcaggaacagcctgcggagcaacttcagcagccgggagagcgagagcagccgcagcaacacccagcccggcttctcctacagcagcagcagagatgaggcccccatcatcagcaacagcgagcgggtggtgagcagccagaggcccttccaggagagcagtgacaatgaaggccgccgcaccacccggcggctgctgagccgcatcgccagctccatgagcagcaccttcttcagcagaagaagcagccaggacagcctgaacaccaggagcctgaacagcgagaacagctatgtgagcccccgcatcctgacagccagccagagccgcagcaatgtgcccagcgccagcgaggtgcctgacaacagagccagcgaggccagccagggcttccgcttcctgcggcggcgctggggcctgagcagcctgagccacaaccacagcagcgagagtgacagcgagaacttcaaccaggagagcgagggcaggaacacaggcccctggctgagcagcagcctgaggaaccgctgcacccccctcttcagcagaagaagaagagagggcagagatgagagcagccgcatccccaccagtgacaccagcagccgcagccacatcttcagaagagagagcaatgaggtggtgcacctggaggcccagaatgaccccctgggcgccgccgccaaccggccccaggccagcgctgccagcagcagcgccaccactggaggcagcaccagtgacagcgcccagggcggcaggaacacaggcatcagcggcatcctgcccggcagcctcttccgctttgctgtgcccccagccctgggcagcaacctgacagacaacgtgatgatcaccgtggacatcatccccagcggctggaacagcgcagatggcaagagtgacaagaccaagagcgcccccagccgggaccctgagcggctgcagaagatcaaggagagcctgctgctggaggacagcgaggaggaggagggggacctgtgccgcatctgccagatggctgctgccagcagcagcaacctgctgattgagccctgcaagtgcaccggcagcctgcagtatgtgcaccaggactgcatgaagaagtggctgcaggccaagatcaacagcggcagcagcctggaggccgtgaccacctgtgagctgtgcaaggagaagctggagctgaacctggaggactttgacatccacgagctgcaccgggcccacgccaatgagcaggccgagtatgagttcatcagcagcggcctgtacctggtggtgctgctgcacctgtgtgagcagagcttcagtgacatgatgggcaacaccaatgagcccagcaccagggtgcggctgcagaggatgatccccaagaagacagagaccatcaccggccacctgatcctgcccaacttcatctag

SEQ ID NO: 159401 - DNA, 876 bp, synthetic construct
  misc_feature 1..876: note = Description of Artificial Sequence: Synthetic coding sequence
  source 1..876: mol_type = other DNA
atgtccatgcccctgcaccagatcagcgccatccccagccaggatgccatcagcgcccgggtgtaccgcagcaagaccaaggagaaggagcgggaggagcagaatgagaagaccctgggccacttcatgagccacagcagcaacatcagcaaggccggcagccccccatctgccagcgccccagcccctgtgagcagcttcagcaggaccagcatcacccccagcagccaggacatctgccgcatctgccactgtgaaggagatgatgagagccccctcatcaccccctgccactgcaccggcagcctgcactttgtgcaccaggcctgcctgcagcagtggatcaagagcagtgacacccgctgctgtgagctgtgcaagtatgagttcatcatggagaccaagctgaagcccctgaggaagtgggagaagctgcagatgaccagcagcgagaggaggaagatcatgtgcagcgtgaccttccacgtgattgccatcacctgtgtggtgtggagcctgtatgtgctgattgacagaacagctgaggagatcaagcagggccaggccaccggcatcctggagtggcccttctggaccaagctggtggtggtggccatcggcttcaccggcggcctgctcttcatgtatgtgcagtgcaaggtgtatgtgcagctgtggaagaggctgaaggcctacaacagagtcatctacgtgcagaactgcccagagaccagcaagaagaacatctttgagaagagccccctgacagagcccaactttgagaacaagcacggctacggcatctgccacagcgacaccaacagcagctgctgcacagagcctgaggacaccggggctgagatcatccacgtgtag

SEQ ID NO: 159402 - DNA, 876 bp, synthetic construct; identical to SEQ ID NO: 159401
  misc_feature 1..876: note = Description of Artificial Sequence: Synthetic coding sequence
  source 1..876: mol_type = other DNA

SEQ ID NO: 159403 - DNA, 876 bp, synthetic construct; identical to SEQ ID NO: 159401
  misc_feature 1..876: note = Description of Artificial Sequence: Synthetic coding sequence
  source 1..876: mol_type = other DNA

SEQ ID NO: 159404 - DNA, 1371 bp, synthetic construct
  misc_feature 1..1371: note = Description of Artificial Sequence: Synthetic coding sequence
  source 1..1371: mol_type = other DNA
tgaatctgcaaggacaccctgcaggccagcaagaggaacagctttggaagtgagtgggcccaggccctgaagccagccaagaacaccaaggcccggaggaccctgaagttcagccgcagcctgaatgatgtgggggagaaggcccaggacaccagcgagagctttgcctacgtggagaggacctgcagcgagggcaagctgatcctgccccaggacacctgcctgcggaccaaccgcttccaccacaaggagaagaggaccctgaaccacaagcccctgggcaacagcaagcacagctgtgtgtcctgcctgtctgctggccgcagcacagccagcgaggtggaggccggcaagggcggccggcccggcctgctgctggaggagaaggcagatggagaggccaccagccgcagccggcagctgctgcagtacctgttcagcctgagccacggcctgagcgccagcagcctgcaccgcttccacgagctggagagctgtgccgcccggctgcacacagccaagagcagcagcggcctggccggctccatgggcttctgcagtgatgagatgggagatgatgatgtgtttgaggacagcaccagcgccaagctgaagagccgggtgctgcgggcccccctgtgcagcacagagaaggacagcgacctggactgccccagccccttcagcgagaagctgccccccatcagccctgtgtccaccagcggagatgtgtgccgcatctgccactgtgaaggagatgatgagagccccctcatcaccccctgccactgcaccggcagcctgcactttgtgcaccaggcctgcctgcagcagtggatcaagagcagtgacacccgctgctgtgagctgtgcaagtatgagttcatcatggagaccaagctgaagcccctgaggaagtgggagaagctgcagatgaccagcagcgagaggaggaagatcatgtgcagcgtgaccttccacgtgattgccatcacctgtgtggtgtggagcctgtatgtgctgattgacagaacagctgaggagatcaagcagggccaggccaccggcatcctggagtggcccttctggaccaagctggtggtggtggccatcggcttcaccggcggcctgctcttcatgtatgtgcagtgcaaggtgtatgtgcagctgtggaagaggctgaaggcctacaacagagtcatctacgtgcagaactgcccagagaccagcaagaagaacatctttgagaagagccccctgacagagcccaactttgagaacaagcacggctacggcatctgccacagcgacaccaacagcagctgctgcacagagccagaagatactggagctgagatcatccacgtgtag

SEQ ID NO: 159405 - DNA, 270 bp, synthetic construct
  misc_feature 1..270: note = Description of Artificial Sequence: Synthetic coding sequence
  source 1..270: mol_type = other DNA
atgtccatgcccctgcaccagatcagcgccatccccagccaggatgccatcagcgcccgggtgtaccgcagcaagaccaaggagaaggagcgggaggagcagaatgagaagaccctgggccacttcatgagccacagcagcaacatcagcaaggccggcagccccccatctgccagcgccccagcccctgtgagcagcttcagcaggaccagcatcacccccagcagccaggacatctgccgcatctgccactgtgaaggagatgactag

SEQ ID NO: 159406 - DNA, 1041 bp, synthetic construct
  misc_feature 1..1041: note = Description of Artificial Sequence: Synthetic coding sequence
  source 1..1041: mol_type = other DNA
atgctgaagagccggctgaggatgttcctgaatgagctgaagctgctggtgctgactggaggcggccggcccagggctgagccccagccccggggcggccggggcggcggctgcggctgggccccctttgctggctgcagcaccagagatggagatggagatgaggaggagtactacggcagcgagccccgggcccggggcctggccggggacaaggagccccgggccggccccctgcccccaccagccccacccctgcccccacctggggccctggatgccctgagcctgagcagcagcctggacagcggcctgcggaccccccagtgccgcatctgcttccagggccctgagcagggcgagctgctgagcccctgccgctgtgatggctctgtgcgctgcacccaccagccctgcctgatccgctggatcagcgagcggggctcctggagctgtgagctgtgctacttcaagtaccaggtgctggccatcagcaccaagaaccccctgcagtggcaggccatcagcctgaccgtcatcgagaaggtgcagattgctgccatcgtgctgggcagcctcttcctggtggccagcatctcctggctgatctggagcagcctgagccccagcgccaagtggcagaggcaggacctgctcttccagatctgctacggcatgtatggcttcatggatgtggtgtgcatcggcctcatcatccacgagggcagctctgtgtaccgcatcttcaagcgctggcaggccgtgaaccagcagtggaaggtgctgaactatgacaagaccaaggacattggaggagatgctgggggcggcacagctgggaagagcggccccaggaacagcaggacaggccccaccagcggggccaccagcaggcctcctgctgcccagaggatgaggaccctgctgccccagagatgtggctacaccatcctgcacctgctgggccagctgcggcccccagatgcccggagcagcagccacagcggccgggaggtggtgatgagggtgaccaccgtgtag

SEQ ID NO: 159407 - DNA, 702 bp, synthetic construct
  misc_feature 1..702: note = Description of Artificial Sequence: Synthetic coding sequence
  source 1..702: mol_type = other DNA
atggtgtctgacaagtgccacatcctggacctgatcaaggcccagaggcggcagatgctgatcctgcctgagggcttccgggagggctcctggagcaccctgctcttccgggccacccaccacctggccctgcaccccttcctgggcctgtttggagccctgagccccacccagtggcaggccatcagcctgactgtgattgagaaggtgcagattgctgccatcgtgctgggcagcctcttcctggtggccagcatctcctggctgatctggagcagcctgagccccagcgccaagtggcagaggcaggacctgctcttccagatctgctacggcatgtatggcttcatggatgtggtgtgcatcggcctcatcatccacgagggcagctctgtgtaccgcatcttcaagcgctggcaggccgtgaaccagcagtggaaggtgctgaactatgacaagaccaaggacattggaggagatgctgggggcggcacagctgggaagagcggccccaggaacagcaggacaggccccaccagcggggccaccagccggcccccagctgcccagaggatgaggaccctgctgccccagagatgtggctacaccatcctgcacctgctgggccagctgcggcccccagatgcccggagcagcagccacagcggccgggaggtggtgatgagggtgaccaccgtgtag

SEQ ID NO: 159408 - DNA, 3159 bp, synthetic construct
  misc_feature 1..3159: note = Description of Artificial Sequence: Synthetic coding sequence
  source 1..3159: mol_type = other DNA
atgaagctggtgaacatctggctgctgctgctggtggtgctgctgtgtgggaagaagcacctgggggaccggctggagaagaagagctttgagaaggccccctgccccggctgcagccacctgaccctgaaggtggagttcagcagcacagtggtggagtatgagtacatcgtggccttcaacggctacttcaccgccaaggccagaaattccttcatcagcagcgccctgaagagcagcgaggtggacaactggaggatcatccccaggaacaaccccagcagtgactaccccagcgactttgaagtcatccagatcaaggagaagcagaaggccggcctgctgaccctggaggaccaccccaacatcaagagggtgaccccccagaggaaggtgttccgcagcctgaagtatgcagagagtgaccccaccgtgccctgcaatgagacccgctggagccagaagtggcagagcagccggcccctgcggcgggccagcctgagcctgggcagcggcttctggcacgccaccggccgccacagcagccggcggctgctgcgggccatcccccggcaggtggcccagaccctgcaggctgatgtgctgtggcagatgggctacaccggggccaacgtgcgggtggccgtgtttgacaccggcctgtctgagaagcacccccacttcaagaatgtgaaggagaggaccaactggaccaatgaaagaaccctggatgatggcctgggccacggcacctttgtggccggcgtgattgcctccatgagggagtgccagggctttgccccagatgctgagctgcacatcttccgggtcttcaccaacaaccaggtgtcctacacctcctggttcctggatgccttcaactatgccatcctgaagaagattgatgtgctgaacctgagcatcggcggccctgacttcatggaccacccctttgtggacaaggtgtgggagctgacagccaacaacgtcatcatggtgtctgccatcggaaatgatggccccctgtatggcaccctgaacaacccagctgaccagatggatgtgattggagtgggcggcatcgactttgaggacaacatcgcccgcttcagcagccggggcatgaccacctgggagctgcccggcggctacggccgcatgaagccagacatcgtgacctacggggccggcgtgcggggcagcggcgtgaagggcggctgccgggccctgagcggcacctctgtggccagccctgtggtggccggggctgtgaccctgctggtgtccacagtgcagaagcgggagctggtgaacccagcctccatgaagcaggccctgattgccagcgcccggcggctgcccggggtgaacatgtttgagcagggccacggcaagctggacctgctgcgggcctaccagatcctgaacagctacaagccccaggccagcctgagccccagctacatcgacctgacagaatgtccctacatgtggccctactgcagccagcccatctactatggaggcatgcccaccgtggtgaatgtgaccatcctgaatggcatgggcgtgacaggccgcatcgtggacaagccagactggcagccctacctgccccagaatggagacaacatcgaggtggccttctcctacagctctgtgctgtggccctggagcggctacctggccatcagcatctctgtgaccaagaaggccgcctcctgggagggcatcgcccagggccacgtgatgatcaccgtggccagccctgctgagacagagagcaagaatggagctgagcagaccagcacagtgaagctgcccatcaaggtgaagatcatccccaccccacccaggagcaagagggtgctgtgggaccagtaccacaacctgcgctacccacctggctacttcccccgggacaacctgaggatgaagaatgaccccctggactggaatggagaccacatccacaccaacttccgggacatgtaccagcacctgcgctccatgggctactttgtggaggtgctgggcgcccccttcacctgctttgatgccagccagtatggcaccctgctgatggtggacagcgaggaggagtacttccctgaggagatcgccaagctgcggagagatgtggacaatggcctgagcctggtgatcttcagtgactggtacaacacctctgtgatgaggaaggtgaagttctatgatgagaacacccggcagtggtggatgccagacaccggcggggccaacatcccagccctgaatgagctgctgtctgtgtggaacatgggcttcagtgatggcctgtatgaaggagagttcaccctggccaaccacgacatgtactatgccagcggctgcagcatcgccaagtttcctgaagatggagtggtgatcacccagaccttcaaggaccagggcctggaggtgctgaagcaggagacagctgtggtggagaatgtgcccatcctgggcctgtaccagatcccagctgagggcggcggcagaattgtgctgtatggagacagcaactgcctggatgacagccaccggcagaaggactgcttctggctgctggatgccctgctgcagtacaccagctatggagtgaccccacccagcctgagccacagcggcaaccggcagaggcctcccagcggggccggctctgtgaccccagagaggatggagggcaaccacctgcaccgctacagcaaggtgctggaggcccacctgggggaccccaagccccggcccctgcctgcctgcccccggctgtcctgggccaagccccagcccctgaatgaaacagcccccagcaacctgtggaagcaccagaagctgctgagcattgacctggacaaggtggtgctgcccaacttccgcagcaaccggccccaggtgcggcccctgagccctggagagagcggggcctgggacatccctgggggcatcatgcctggccgctacaaccaggaggtgggccagaccatccctgtgtttgccttcctgggcgccatggtggtgctggccttctttgtggtgcagatcaacaaggccaagagccggcccaagaggaggaagccccgggtgaagaggccccagctgatgcagcaggtgcacccccccaagaccccatctgtgtag

SEQ ID NO: 159409 - DNA, 1494 bp, synthetic construct
  misc_feature 1..1494: note = Description of Artificial Sequence: Synthetic coding sequence
  source 1..1494: mol_type = other DNA
atggccctggtgggcctgcccggccacctgcacttctgtgaccaggagagcggcttcctgggccgccactgcagcggcccctgccacgaccactgcggcttccccagccgggacagagtgaagaagtggtgcaggacagacttcaacagcaagctgcccatcaaggtgaagatcatccccaccccacccaggagcaagagggtgctgtgggaccagtaccacaacctgcgctacccacctggctacttcccccgggacaacctgaggatgaagaatgaccccctggactggaatggagaccacatccacaccaacttccgggacatgtaccagcacctgcgctccatgggctactttgtggaggtgctgggcgcccccttcacctgctttgatgccagccagtatggcaccctgctgatggtggacagcgaggaggagtacttccctgaggagatcgccaagctgcggagagatgtggacaatggcctgagcctggtgatcttcagtgactggtacaacacctctgtgatgaggaaggtgaagttctatgatgagaacacccggcagtggtggatgccagacacaggaggagccaacatcccagccctgaatgagctgctgtctgtgtggaacatgggcttcagtgatggcctgtatgaaggagagttcaccctggccaaccacgacatgtactatgccagcggctgcagcatcgccaagttcccagaagatggagtggtgatcacccagaccttcaaggaccagggcctggaggtgctgaagcaggagacagctgtggtggagaatgtgcccatcctgggcctgtaccagatcccagctgagggcggcggccgcatcgtgctgtatggagacagcaactgcctggatgacagccaccggcagaaggactgcttctggctgctggatgccctgctgcagtacaccagctatggagtgaccccacccagcctgagccacagcggcaaccggcagaggcctccttctggagctggctctgtgaccccagagaggatggagggcaaccacctgcaccgctacagcaaggtgctggaggcccacctgggggaccccaagccccggcccctgcctgcctgcccccggctgtcctgggccaagccccagcccctgaatgaaacagcccccagcaacctgtggaagcaccagaagctgctgagcattgacctggacaaggtggtgctgcccaacttccgcagcaaccggccccaggtgcggcccctgagccctggagagagcggggcctgggacatccctgggggcatcatgcctggccgctacaaccaggaggtgggccagaccatccctgtgtttgccttcctgggcgccatggtggtgctggccttctttgtggtgcagatcaacaaggccaagagccggcccaagaggaggaagccccgggtgaagaggccccagctgatgcagcaggtgcacccccccaagacccccagcgtgtag

SEQ ID NO: 159410 - DNA, 993 bp, synthetic construct
  misc_feature 1..993: note = Description of Artificial Sequence: Synthetic coding sequence
  source 1..993: mol_type = other DNA
atgatccctgtgtccctggtggtggtggtggtgggcggctggacagtggtgtacctgacagacctggtgctgaagagctctgtgtacttcaagcacagctatgaggactggctggagaacaacggcctgagcatcagccccttccacatccgctggcagacagctgtgttcaacagagccttctacagctggggccgcaggaaggccaggatgctgtaccagtggttcaactttggcatggtgtttggagtgattgccatgttcagcagcttcttcctgctgggcaagaccctgatgcagaccctggcccagatgatggctgacagccccagcagctacagcagcagcagcagcagcagcagcagcagcagcagcagcagcagcagcagcagcagcagcagcagcagcctgcacaatgagcaggtgctgcaggtggtggtgcccggcatcaacctgcctgtgaaccagctgacctacttcttcaccgctgtgctgatctctggagtggtgcatgaaattggacatggaattgctgccatccgggagcaggtgcgcttcaatggatttggcatcttcctgttcatcatctacccaggggcctttgtggacctcttcaccacccacctgcagctgatcagccctgtgcagcagctgcgcatcttctgtgccggcatctggcacaactttgtgctggccctgctgggcatcctggccctggtgctgctgcctgtgatcctgctgcccttctactacacaggagtgggcgtgctgatcacagaggtggccgaggacagccctgccatcggcccccggggcctgtttgtgggggacctggtgacccacctgcaggactgccctgtgaccaacgtgcaggactggaatgaatgtctggacaccatcgcctatgagccccagatcggctactgcatcagcgccagcaccctgcagcagctgtccttccctgtgcggggcgtgtacatcagcagcatctag

SEQ ID NO: 159411 - DNA, 1560 bp, synthetic construct
  misc_feature 1..1560: note = Description of Artificial Sequence: Synthetic coding sequence
  source 1..1560: mol_type = other DNA
atgatccctgtgtccctggtggtggtggtggtgggcggctggacagtggtgtacctgacagacctggtgctgaagagctctgtgtacttcaagcacagctatgaggactggctggagaacaacggcctgagcatcagccccttccacatccgctggcagacagctgtgttcaacagagccttctacagctggggccgcaggaaggccaggatgctgtaccagtggttcaactttggcatggtgtttggagtgattgccatgttcagcagcttcttcctgctgggcaagaccctgatgcagaccctggcccagatgatggctgacagccccagcagctacagcagcagcagcagcagcagcagcagcagcagcagcagcagcagcagcagcagcagcagcagcagcagcctgcacaatgagcaggtgctgcaggtggtggtgcccggcatcaacctgcctgtgaaccagctgacctacttcttcaccgctgtgctgatctctggagtggtgcatgaaattggacatggaattgctgccatccgggagcaggtgcgcttcaatggatttggcatcttcctgttcatcatctacccaggggcctttgtggacctcttcaccacccacctgcagctgatcagccctgtgcagcagctgcgcatcttctgtgccggcatctggcacaactttgtgctggccctgctgggcatcctggccctggtgctgctgcctgtgatcctgctgcccttctactacacaggagtgggcgtgctgatcacagaggtggccgaggacagccctgccatcggcccccggggcctgtttgtgggggacctggtgacccacctgcaggactgccctgtgaccaacgtgcaggactggaatgaatgtctggacaccatcgcctatgagccccagatcggctactgcatcagcgccagcaccctgcagcagctgtccttccctgtgcgggcctacaagaggctggatggcagcacagagtgctgcaacaaccacagcctgacagatgtgtgcttctcctacagaaacaacttcaacaagaggctgcacacctgcctgcctgccaggaaggctgtggaggccacccaggtgtgcaggaccaacaaggactgcaagaagagcagcagcagcagcttctgcatcatccccagcctggagacccacaccaggctcatcaaggtgaagcaccccccccagattgacatgctgtatgtgggccaccccctgcacctgcactacacagtgtccatcaccagcttcatcccccgcttcaacttcctgagcattgacctgcctgtggtggtggagacctttgtgaagtacctgatcagcctgagcggggccctggccatcgtgaatgctgtgccctgctttgccctggatggccagtggatcctgaacagcttcctggatgccaccctgaccagcgtcatcggggacaatgatgtgaaggacctgattggcttcttcatcctgctgggcggctctgtgctgctggccgccaacgtgaccctgggcctgtggatggtgacagccaggtag

SEQ ID NO: 159412 - DNA, 207 bp, synthetic construct
  misc_feature 1..207: note = Description of Artificial Sequence: Synthetic coding sequence
  source 1..207: mol_type = other DNA
atgcaccagacctacagccgccactgcaggcctgaggagcgctggagccaggagggctggaacatcccagccaacggcttcaacatctgccgctgcctgaacatcggcatgaagctgcggctgtggaacaacctgaacaagagcaacatcctgggcgccctgaagatcaagaggcgggagatccgggcccccttcctgctgccctag

SEQ ID NO: 159413 - DNA, 762 bp, synthetic construct
  misc_feature 1..762: note = Description of Artificial Sequence: Synthetic coding sequence
  source 1..762: mol_type = other DNA
atggtgctgctgaagctgctggaggtgtacaggaagggcagcgctggcaccttccacaagagcaccatcttcggcaacaccatcatgaccagccagcctgtgcccaatgagaccatcatcgtgctgcccagcaatgtcatcaacttcagccaggccgagaagccagagcccaccaaccagggccaggacagcctgaagaagcacctgcatgctgagatcaaggtgattggcaccatccagatcctgtgtggcatgatggtgctgagcctgggcatcatcctggccagcgccagcttcagccccaacttcacccaggtgaccagcaccctgctgaacagcgcctaccccttcatcggccccttcttcttcatcatcagcggcagcctgagcatcgccacagagaagaggctgaccaagctgctggtgcacagcagcctggtgggcagcatcctgagcgccctgagcgccctggtgggcttcatcatcctgtctgtgaagcaggccaccctgaacccagccagcctgcagtgtgagctggacaagaacaacatccccaccaggagctatgtgtcctacttctaccatgacagcctgtacaccacagactgctacacagccaaggccagcctggccggcaccctgagcctgatgctgatctgcaccctgctggagttctgcctggccgtgctgacagctgtgctgcgctggaagcaggcctacagcgacttccctggggtgtctgtgctggccggcttcacctag

SEQ ID NO: 159414 - DNA, 804 bp, synthetic construct
  misc_feature 1..804: note = Description of Artificial Sequence: Synthetic coding sequence
  source 1..804: mol_type = other DNA
atgaaggccgaggccaccgtcatccccagccgctgtgcccggggcctgcccagctggcaggtgctgagccctgtgcagccctggcagaccagcgccccccagaacaccacccagcccaagctgctggccccccaccagcacgagaagagccagaagaagagcagcctgctgaaggagctgggcgccttccacatcaccatcgccctgctgcacctggtgtttggaggctacctggccagcatcgtgaagaacctgcacctggtggtgctgaagtcctggtaccccttctggggcgccgccagcttcctgatcagcggcatcctggccatcaccatgaagaccttcagcaagacctacctgaagatgctgtgcctgatgaccaacctgatcagcctcttctgtgtgctgagcggcctcttcgtcatcagcaaggacctcttcctggagagcccctttgagagccccatctggaggatgtaccccaacagcacagtgcacatccagaggctggagctggccctgctgtgcttcaccgtgctggagctgttcctgcctgtgcccacagctgtgacagcctggaggggggactgccccagcgccaagaatgatgatgcctgcctggtgcccaacacccccctgcacctgaagggcctgcctgtggagcccccacccagctaccagagcgtcatccagggagatgcccagcacaagcagcaccagaggctgcgggaggtgaagcaggtggccccagacacctggatcgtgacagatggagctgccatctggacccagacagccaactag

SEQ ID NO: 159415 - DNA, 804 bp, synthetic construct
  misc_feature 1..804: note = Description of Artificial Sequence: Synthetic coding sequence
  source 1..804: mol_type = other DNA
atgatgagcagcaagcccaccagccacgccgaggtgaatgagaccatccccaacccctacccacccagcagcttcatggcccctggcttccagcagcccctgggcagcatcaacctggagaaccaggcccagggcgcccagagggcccagccctacggcatcaccagccctggcatctttgccagcagccagcccggccagggcaacatccagatgatcaaccccagcgtgggcacagctgtgatgaacttcaaggaggaggccaaggccctgggcgtcatccagatcatggtgggcctgatgcacatcggctttggaattgtgctgtgcctgatctccttctccttccgggaggtgctgggctttgccagcacagctgtgattggaggctaccccttctggggcggcctgtccttcatcatcagcggcagcctgtctgtgtctgccagcaaggagctgagccgctgcctggtgaagggcagcctgggcatgaacatcgtgagcagcatcctggccttcatcggggtcatcctgctgctggtggacatgtgcatcaacggggtggccggccaggactactgggccgtgctgagcggcaagggcatcagcgccaccctgatgatcttcagcctgctggagttctttgtggcctgtgccacagcccactttgccaaccaggccaacaccaccaccaacatgtctgtgctggtgatccccaacatgtatgagagcaaccctgtgaccccagccagcagcagcgccccaccccgctgcaacaactacagcgccaatgcccccaagtag

SEQ ID NO: 159416 - DNA, 345 bp, synthetic construct
  misc_feature 1..345: note = Description of Artificial Sequence: Synthetic coding sequence
  source 1..345: mol_type = other DNA
atgatgagcagcaagcccaccagccacgccgaggtgaatgagaccatccccaacccctacccacccagcagcttcatggcccctggcttccagcagcccctgggcagcatcaacctggagaaccaggcccagggcgcccagagggcccagccctacggcatcaccagccctggcatctttgccagcagccagcccggccagggcaacatccagatgatcaaccccagcgtgggcacagctgtgatgaacttcaaggaggaggccaaggccctgggcgtcatccagatcatggtgggcctgatgcacatcggctttggaattgtgctgtgcctgatctccttctag

SEQ ID NO: 159417 - DNA, 666 bp, synthetic construct
  misc_feature 1..666: note = Description of Artificial Sequence: Synthetic coding sequence
  source 1..666: mol_type = other DNA
atgatgagcagcaagcccaccagccacgccgaggtgaatgagaccatccccaacccctacccacccagcagcttcatggcccctggcttccagcagcccctgggcagcatcaacctggagaaccaggcccagggcgcccagagggcccagccctacggcatcaccagccctggcatctttgccagcagccagcccggccagggcaacatccagatgatcaaccccagcgtgggcacagctgtgatgaacttcaaggaggaggccaaggccctgggcttcatcatcagcggcagcctgtctgtgtctgccagcaaggagctgagccgctgcctggtgaagggcagcctgggcatgaacatcgtgagcagcatcctggccttcatcggggtcatcctgctgctggtggacatgtgcatcaacggggtggccggccaggactactgggccgtgctgagcggcaagggcatcagcgccaccctgatgatcttcagcctgctggagttctttgtggcctgtgccacagcccactttgccaaccaggccaacaccaccaccaacatgtctgtgctggtgatccccaacatgtatgagagcaaccctgtgaccccagccagcagcagcgccccaccccgctgcaacaactacagcgccaatgcccccaagtag

SEQ ID NO: 159418 - DNA, 972 bp, synthetic construct
  misc_feature 1..972: note = Description of Artificial Sequence: Synthetic coding sequence
  source 1..972: mol_type = other DNA
atgacagagcaggtgattggagccaacagcgtgcccggcatcatcgccccagacaacgtgcacgtgatccagcccagcaaccctgtggccagcggcaaccacctgcagcccagcgaggtgaccacctaccccatcagccccaaggtgatccactgtgacaccggccgggccaacctgcagaacctgctggtggtgaaccagaacagcgctgctggggtgcagagccagcccatcggctaccagaggcagtaccctgtgggcacagccagcctgcagacagtgcctggggtcatccagtacacccagggcaccaccaacctgcagacctggccaggggacctgcagaaccccctgaatgccaaccctggcctgacccacaccagcaacagcagccagtggaacaccagctttgccagcttcaccagcttcaaccccaagaagttcatcaatgaggaggtgaggaccctgggcgccatccagatcctgattggcctgacccacatcttcagcgccatcaaccctgtgctgtactactacccctttgtgacctggctgagcggctaccccctgtggggcggcctgagctacatcgtgtctggcagcctgtctgtgtgggccgccaaggaccccagcccctgtgtggtgaacagcagcatctccttcaacatcatcagcgccctgtttgcctttgctggcatcttcatcatcatcacagacctgagcctgtactacgtgaccacctacagcaaggctgtgtctgggggcctgctgccctttgccctgctggagttcatcctgacctgtgtggtgagccacttcggctgccaggccacctgctgccggcagtttgaaaatgtggccgtcatccccaccgtcttctccttcaacccagccaacaccaccaccagccctgtgaatgccaccactggacctgtgaatgctgccaccggccctgtgtctgccaccaactag

SEQ ID NO: 159419 - DNA, 735 bp, synthetic construct
  misc_feature 1..735: note = Description of Artificial Sequence: Synthetic coding sequence
  source 1..735: mol_type = other DNA
atggacacagagagcaacagaagagccaacctggccctgccccaggagcccagctctgtgcctgcctttgaggtgctggagatcagcccccaggaggtgagcagcggccgcctgctgaagagcgccagcagcccccccctgcacacctggctgactgtgctgaagaaggagcaggagttcctgggcgtgacccagatcctgacagccatgatctgcctgtgctttggaacagtggtgtgcagcgtgctggacatcagccacatcgagggggacatcttcagcagcttcaaggccggctaccccttctggggcgccatcttcttcagcatcagcggcatgctgagcatcatcagcgagaggagaaatgccacctacctggtgcggggcagcctgggcgccaacacagccagcagcattgctgggggcaccggcatcaccatcctgatcatcaacctgaagaagagcctggcctacatccacatccacagctgccagaagttctttgagaccaagtgcttcatggccagcttcagcacagaaattgtggtgatgatgctgttcctgaccatcctgggcctgggcagcgctgtgtccctgaccatctgtggggccggggaggagctgaagggcaacaaggtgcctgaagatagagtgtatgaggagctgaacatctacagcgccacctacagcgagctggaggaccctggagagatgagcccccccatcgacctgtag

SEQ ID NO: 159420 - DNA, 126 bp, synthetic construct
  misc_feature 1..126: note = Description of Artificial Sequence: Synthetic coding sequence
  source 1..126: mol_type = other DNA
atggacacagagagcaacagaagagccaacctggccctgccccaggagcccagctctgtgcctgcctttgaggtgctggagatcagcccccaggaggtgagcagcggccgcctgctgaagagctag

SEQ ID NO: 159421 - DNA, 645 bp, synthetic construct
  misc_feature 1..645: note = Description of Artificial Sequence: Synthetic coding sequence
  source 1..645: mol_type = other DNA
atggccagccatgaggtggacaatgctgagctgggcagcgccagcgcccacggcaccccaggcagcgaggccggccctgaggagctgaacacctctgtgtaccagcccattgatggcagcccagactaccagaaggccaagctgcaggtgctgggcgccatccagatcctgaatgctgccatgatcctggccctgggcgtcttcctgggcagcctgcagtacccctaccacttccagaagcacttcttcttcttcaccttctacacaggctaccccatctggggcgctgtgttcttctgcagcagcggcaccctgtctgtggtggccggcatcaagcccaccaggacctggatccagaacagctttggcatgaacatcgccagcgccaccatcgccctggtgggcacagccttcctgagcctgaacattgctgtgaacatccagagcctgcggagctgccacagcagcagcgagagcccagacctgtgcaactacatgggcagcatcagcaatggcatggtgtccctgctgctgatcctgaccctgctggagctgtgtgtgaccatcagcaccatcgccatgtggtgcaatgccaactgctgcaacagccgggaggagatcagcagcccccccaacagcgtgtag

SEQ ID NO: 159422 - DNA, 507 bp, synthetic construct
  misc_feature 1..507: note = Description of Artificial Sequence: Synthetic coding sequence
  source 1..507: mol_type = other DNA
atggccagccatgaggtggacaatgctgagctgggcagcgccagcgcccacggcaccccaggcagcgaggccggccctgaggagctgaacacctctgtgtaccagcccattgatggcagcccagactaccagaaggccaagctgcaggtgctgggcttctgcagcagcggcaccctgtctgtggtggccggcatcaagcccaccaggacctggatccagaacagctttggcatgaacatcgccagcgccaccatcgccctggtgggcacagccttcctgagcctgaacattgctgtgaacatccagagcctgcggagctgccacagcagcagcgagagcccagacctgtgcaactacatgggcagcatcagcaatggcatggtgtccctgctgctgatcctgaccctgctggagctgtgtgtgaccatcagcaccatcgccatgtggtgcaatgccaactgctgcaacagccgggaggagatcagcagcccccccaacagcgtgtag

SEQ ID NO: 159423 - DNA, 276 bp, synthetic construct
  misc_feature 1..276: note = Description of Artificial Sequence: Synthetic coding sequence
  source 1..276: mol_type = other DNA
atgaacatcgccagcgccaccatcgccctggtgggcacagccttcctgagcctgaacattgctgtgaacatccagagcctgcggagctgccacagcagcagcgagagcccagacctgtgcaactacatgggcagcatcagcaatggcatggtgtccctgctgctgatcctgaccctgctggagctgtgtgtgaccatcagcaccatcgccatgtggtgcaatgccaactgctgcaacagccgggaggagatcagcagcccccccaacagcgtgtag

SEQ ID NO: 159424 - DNA, 507 bp, synthetic construct; identical to SEQ ID NO: 159422
  misc_feature 1..507: note = Description of Artificial Sequence: Synthetic coding sequence
  source 1..507: mol_type = other DNA

SEQ ID NO: 159425 - DNA, 720 bp, synthetic construct
  misc_feature 1..720: note = Description of Artificial Sequence: Synthetic coding sequence
  source 1..720: mol_type = other DNA
atgcaccagacctacagccgccactgcaggcctgaggagagcaccttctctgctgccatgaccaccatgcagggcatggagcaggccatgcctggagctggccctggggtgccccagctgggcaacatggccgtcatccacagccacctgtggaagggcctgcaggagaagttcctgaagggggagcccaaggtgctgggcgtggtgcagatcctgacagccctgatgagcctgtccatgggcatcaccatgatgtgcatggccagcaacacctacggcagcaaccccatctctgtgtacatcggctacaccatctggggctctgtgatgttcatcatcagcggcagcctgagcattgctgctggcatccgcaccaccaagggcctggtgcggggcagcctgggcatgaacatcaccagctctgtgctggccgccagcggcatcctgatcaacaccttcagcctggccttctacagcttccaccacccctactgcaactactacggcaacagcaacaactgccacggcaccatgagcatcctgatgggcctggatggcatggtgctgctgctgtctgtgctggagttctgcatcgctgtgtccctgagcgccttcggctgcaaggtgctgtgctgcacccctgggggcgtggtgctgatcctgcccagccacagccacatggccgagacagccagccccacccccctgaatgaggtgtag

SEQ ID NO: 159426 - DNA, 663 bp, synthetic construct
  misc_feature 1..663: note = Description of Artificial Sequence: Synthetic coding sequence
  source 1..663: mol_type = other DNA
atgaccaccatgcagggcatggagcaggccatgcctggggccggccctggggtgccccagctgggcaacatggctgtgatccacagccacctgtggaagggcctgcaggagaagttcctgaagggggagcccaaggtgctgggcgtggtgcagatcctgacagccctgatgagcctgtccatgggcatcaccatgatgtgcatggccagcaacacctacggcagcaaccccatctctgtgtacatcggctacaccatctggggctctgtgatgttcatcatcagcggcagcctgagcattgctgctggcatccgcaccaccaagggcctggtgcggggcagcctgggcatgaacatcaccagctctgtgctggccgccagcggcatcctgatcaacaccttcagcctggccttctacagcttccaccacccctactgcaactactacggcaacagcaacaactgccacggcaccatgagcatcctgatgggcctggatggcatggtgctgctgctgtctgtgctggagttctgcatcgctgtgtccctgagcgccttcggctgcaaggtgctgtgctgcaccccaggaggagtggtgctgatcctgcccagccacagccacatggccgagacagccagccccacccccctgaatgaggtgtag

SEQ ID NO: 159427 - DNA, 663 bp, synthetic construct; identical to SEQ ID NO: 159426
  misc_feature 1..663: note = Description of Artificial Sequence: Synthetic coding sequence
  source 1..663: mol_type = other DNA

SEQ ID NO: 159428 - DNA, 561 bp, synthetic construct
  misc_feature 1..561: note = Description of Artificial Sequence: Synthetic coding sequence
  source 1..561: mol_type = other DNA
atgcaccagacctacagccgccactgcaggcctgaggagagcaccttctctgctgccatgaccaccatgcagggcatggagcaggccatgcctggagctggccctggggtgccccagctgggcaacatggccgtcatccacagccacctgtggaagggcctgcaggagaagttcctgaagggggagcccaaggtgctgggcgtggtgcagatcctgacagccctgatgagcctgtccatgggcatcaccatgatgtgcatggccagcaacacctacggcagcaaccccatctctgtgtacatcggctacaccatctggggctctgtgatgttcatcatcagcggcagcctgagcattgctgctggcatccgcaccaccaagggcctgggcctggatggcatggtgctgctgctgtctgtgctggagttctgcatcgctgtgtccctgagcgccttcggctgcaaggtgctgtgctgcaccccaggaggagtggtgctgatcctgcccagccacagccacatggccgagacagccagccccacccccctgaatgaggtgtag

SEQ ID NO: 159429 - DNA, 399 bp, synthetic construct
  misc_feature 1..399: note = Description of Artificial Sequence: Synthetic coding sequence
  source 1..399: mol_type = other DNA
atgaccaccatgcagggcatggagcagaccacccctggggccggcccagatgtgccccagctgggcaacattgatgtgatccacagctacctgtgcaagggcctgcaggagaagttcttcaagaggaagcccaaggtgctgggcgtggtgcgcatcctgattgccctgatgagcctgtccatgggcatcatcatgatgtgtgtggccttcagcagctatgaggagcaccccatctttgtgtatgtggcctacaccatctggggctctgtgatgtacccctaccagctgcagcaggagctggagcagcagaaggtgtggaactacctgaagaacctgtcctggaggatcatgggcagctacctgtgctttggagagaggtctgagctgaagcccctgtag

SEQ ID NO: 159430 - DNA, 333 bp, synthetic construct
  misc_feature 1..333: note = Description of Artificial Sequence: Synthetic coding sequence
  source 1..333: mol_type = other DNA
atgaccaccatgcagggcatggagcagaccacccctggggccggcccagatgtgccccagctgggcaacattgatgtgatccacagctacctgtgcaagggcctgcaggagaagttcttcaagaggaagcccaaggtgctgggcgtgctgtgtggccacaagttcagcacccacagcgtgtccctgtctgtggccgccggcatccgcaccaccaagggcctggagctgtctgaggagttcaagctggagaacaacggcatcatctttgtgttctggagggagatccgggtggagaccaccatccggcggcaggtgcggcggctgctgaagtag

SEQ ID NO: 159431 - DNA, 615 bp, synthetic construct
  misc_feature 1..615: note = Description of Artificial Sequence: Synthetic coding sequence
  source 1..615: mol_type = other DNA
atgagctacatccacatctgtgtgaaggactgcaagaggagcagcagccggggcaaccccaagagcctgggcttctgtgtggacatctccttccagctgatccgggtggtgcgcatcctgattgccctgatgagcctgtccatgggcatcatcatgatgtgtgtggccttcagcagctatgaggagcaccccatctttgtgtatgtggcctacaccatctggggctctgtgatgtacccctaccagctgcagcaggagctggagcagcagaaggtgtgcatctacagagtgctgaatggagcccaggccggcgtgcagtggagggacctgggcagcctgcagcccccaccacccagccggctgccctggccacccaaggtgccccgggtgcagcccctgcccggccgccaccctgtgtgggaggtgcgctctgtgtctgcctggccacccatcgtgtgggatgtgcgcagccccagcgcctggctgcccagcctggagagcgaggagcggctgtgcccagctgccatccccagcaggaagtggggcgcccccctgcccggccaccaccccatctgggaggtgcgctctgtgtctgcccggccccccatcttctag

SEQ ID NO: 159432 - DNA, 399 bp, synthetic construct; identical to SEQ ID NO: 159429
  misc_feature 1..399: note = Description of Artificial Sequence: Synthetic coding sequence
  source 1..399: mol_type = other DNA

SEQ ID NO: 159433 - DNA, 603 bp, synthetic construct
  misc_feature 1..603: note = Description of Artificial Sequence: Synthetic coding sequence
  source 1..603: mol_type = other DNA
atggacagcagcacagcccacagccctgtgttcctggtgtttcctcctgagatcacagcctctgaatatgagagcacagagctgagcgccaccaccttcagcacccagagccccctgcagaagctgtttgccaggaagatgaagatcctgggcaccatccagatcctgtttggcatcatgaccttctcctttggagtcatcttcctgttcaccctgctgaagccctacccccgcttccccttcatcttcctgagcggctaccccttctggggctctgtgctcttcatcaacagcggggccttcctgattgctgtgaagaggaagaccacagagaccctcatcatcctgagccgcatcatgaacttcctgagcgccctgggcgccatcgccggcatcatcctgctgaccttcggcttcatcctggaccagaactacatctgtggctacagccaccagaacagccagtgcaaggctgtgacagtgctcttcctgggcatcctgatcaccctgatgaccttcagcatcatcgagctgttcatcagcctgcccttcagcatcctgggctgccacagcgaggactgtgactgtgagcagtgctgctag

SEQ ID NO: 159434 - DNA, 747 bp, synthetic construct
  misc_feature 1..747: note = Description of Artificial Sequence: Synthetic coding sequence
  source 1..747: mol_type = other DNA
atgaccagccagcctgtgcccaatgagaccatcatcgtgctgcccagcaatgtcatcaacttcagccaggccgagaagccagagcccaccaaccagggccaggacagcctgaagaagcacctgcatgctgagatcaaggtgattggcaccatccagatcctgtgtggcatgatggtgctgagcctgggcatcatcctggccagcgccagcttcagccccaacttcacccaggtgaccagcaccctgctgaacagcgcctaccccttcatcggccccttcttcttcatcatcagcggcagcctgagcatcgccacagagaagaggctgaccaagctgctggtgcacagcagcctggtgggcagcatcctgagcgccctgagcgccctggtgggcttcatcatcctgtctgtgaagcaggccaccctgaacccagccagcctgcagtgtgagctggacaagaacaacatccccaccaggagctatgtgtcctacttctaccatgacagcctgtacaccacagactgctacacagccaaggccagcctggccggcaccctgagcctgatgctgatctgcaccctgctggagttctgcctggccgtgctgacagctgtgctgcgctggaagcaggcctacagcgacttccctggctctgtgctcttcctgccccacagctacatcggcaacagcggcatgagcagcaagatgacccatgactgtggctatgaggagctgctgaccagctag

SEQ ID NO: 159435 - DNA, 537 bp, synthetic construct
  misc_feature 1..537: note = Description of Artificial Sequence: Synthetic coding sequence
  source 1..537: mol_type = other DNA
atgaccagccagcctgtgcccaatgagaccatcatcgtgctgcccagcaatgtcatcaacttcagccaggccgagaagccagagcccaccaaccagggccaggacagcctgaagaagcacctgcatgctgagatcaaggtgattggcaccatccagatcctgtgtggcatgatggtgctgagcctgggcatcatcctggccagcgccagcttcagccccaacttcacccaggtgaccagcaccctgctgaacagcgcctaccccttcatcggccccttcttcttcatcatcagcggcagcctgagcatcgccacagagaagaggctgaccaagctgctggtgcacagcagcctggtgggcagcatcctgagcgccctgagcgccctggtgggcttcatcatcctgtctgtgaagcaggccaccctgaacccagccagcctgcagtggaacagcctgagtgatgctgacctgcacagcgctggcatcctgcccagctgtgcccactgctgtgccgctgtggagaccggcctgctgtag

SEQ ID NO: 159436 - DNA, 543 bp, synthetic construct
  misc_feature 1..543: note = Description of Artificial Sequence: Synthetic coding sequence
  source 1..543: mol_type = other DNA
atgaccagccagcctgtgcccaatgagaccatcatcgtgctgcccagcaatgtcatcaacttcagccaggccgagaagccagagcccaccaaccagggccaggacagcctgaagaagcacctgcatgctgagatcaaggtgattggcttcatcatcagcggcagcctgagcatcgccacagagaagaggctgaccaagctgctggtgcacagcagcctggtgggcagcatcctgagcgccctgagcgccctggtgggcttcatcatcctgtctgtgaagcaggccaccctgaacccagccagcctgcagtgtgagctggacaagaacaacatccccaccaggagctatgtgtcctacttctaccatgacagcctgtacaccacagactgctacacagccaaggccagcctggccggcaccctgagcctgatgctgatctgcaccctgctggagttctgcctggccgtgctgacagctgtgctgcgctggaagcaggcctacagcgacttccctggggtgtctgtgctggccggcttcacctag

SEQ ID NO: 159437 - DNA, 678 bp, synthetic construct
  misc_feature 1..678: note = Description of Artificial Sequence: Synthetic coding sequence
  source 1..678: mol_type = other DNA
atgaccagccagcctgtgcccaatgagaccatcatcgtgctgcccagcaatgtcatcaacttcagccaggccgagaagccagagcccaccaaccagggccaggacagcctgaagaagcacctgcatgctgagatcaaggtgattggcaccatccagatcctgtgtggcatgatggtgctgagcctgggcatcatcctggccagcgccagcttcagccccaacttcacccaggtgaccagcaccctgctgaacagcgcctaccccttcatcggccccttcttcttcatcatcagcggcagcctgagcatcgccacagagaagaggctgaccaagctgctggtgcacagcagcctggtgggcagcatcctgagcgccctgagcgccctggtgggcttcatcatcctgtctgtgaagcaggccaccctgaacccagccagcctgcagtgtgagctggacaagaacaacatccccaccaggagctatgtgtcctacttctaccatgacagcctgtacaccacagactgctacacagccaaggccagcctggccggcaccctgagcctgatgctgatctgcaccctgctggagttctgcctggccgtgctgacagctgtgctgcgctggaagcaggcctacagcgacttccctggggtgtctgtgctggccggcttcacctag

SEQ ID NO: 159438 - DNA, 831 bp, synthetic construct
  misc_feature 1..831: note = Description of Artificial Sequence: Synthetic coding sequence
  source 1..831: mol_type = other DNA
atggtgctgctgaagctgctggaggtgtacaggaagggcagcgctggcaccttccacaagagcaccatcttcggcaacaccatcatgaccagccagcctgtgcccaatgagaccatcatcgtgctgcccagcaatgtcatcaacttcagccaggccgagaagccagagcccaccaaccagggccaggacagcctgaagaagcacctgcatgctgagatcaaggtgattggcaccatccagatcctgtgtggcatgatggtgctgagcctgggcatcatcctggccagcgccagcttcagccccaacttcacccaggtgaccagcaccctgctgaacagcgcctaccccttcatcggccccttcttcttcatcatcagcggcagcctgagcatcgccacagagaagaggctgaccaagctgctggtgcacagcagcctggtgggcagcatcctgagcgccctgagcgccctggtgggcttcatcatcctgtctgtgaagcaggccaccctgaacccagccagcctgcagtgtgagctggacaagaacaacatccccaccaggagctatgtgtcctacttctaccatgacagcctgtacaccacagactgctacacagccaaggccagcctggccggcaccctgagcctgatgctgatctgcaccctgctggagttctgcctggccgtgctgacagctgtgctgcgctggaagcaggcctacagcgacttccctggctctgtgctcttcctgccccacagctacatcggcaacagcggcatgagcagcaagatgacccatgactgtggctatgaggagctgctgaccagctag

SEQ ID NO: 159439 - DNA, 747 bp, synthetic construct; identical to SEQ ID NO: 159434
  misc_feature 1..747: note = Description of Artificial Sequence: Synthetic coding sequence
  source 1..747: mol_type = other DNA

SEQ ID NO: 159440 - DNA, 72 bp, synthetic construct
  misc_feature 1..72: note = Description of Artificial Sequence: Synthetic coding sequence
  source 1..72: mol_type = other DNA
atgaccagccagcctgtgcccaatgagaccatcatcgtgctgcccagcaatgtcatcaacttcagccagtag

SEQ ID NO: 159441 - DNA, 444 bp, synthetic construct
  misc_feature 1..444: note = Description of Artificial Sequence: Synthetic coding sequence
  source 1..444: mol_type = other DNA
atgaccagccagcccatcagcaatgagaccatcatcatgctgcccagcaatgtcatcaacttcagccaggccgagaagccagagcccaccaaccagggccaggacagcctgaagaagaggctgcaggccaaggtgaaggtgattggagtgcacagcagcctggccggcagcatcctgagcgccctgagcgccctggtgggcttcatcctgctgtctgtgaacccagctgccctgaacccagccagcctgcagtgcaagctggatgagaaggacatccccacccggctgctgctgtcctatgactaccacagcccctacaccatggactgccaccgggccaaggccagcctggccggcaccctgagcctgatgctggtgtccacagtgctggagttctgcctggccgtgctgacagctgtgctgcagtggaagcagacagtgtag

SEQ ID NO: 159442 - DNA, 723 bp, synthetic construct
  misc_feature 1..723: note = Description of Artificial Sequence: Synthetic coding sequence
  source 1..723: mol_type = other DNA
atgctgctgcagagccagaccatgggcgtgagccacagcttcacccccaagggcatcaccatcccccagcgggagaagccaggccacatgtaccagaatgaagactacctgcagaatggcctgcccacagagaccaccgtgctgggcaccgtgcagatcctgtgctgcctgctgatcagcagcctgggcgccatcctggtgtttgccccctaccccagccacttcaacccagccatcagcaccaccctgatgagcggctaccccttcctgggcgccctgtgcttcggcatcaccggcagcctgagcatcatcagcggcaagcagagcaccaagccctttgacctgagcagcctgaccagcaatgctgtgtcctctgtgacagctggggccggcctcttcctgctggccgacagcatggtggccctgaggacagccagccagcactgcggcagcgagatggactacctgagcagcctgccctacagcgagtactactaccccatctatgagatcaaggactgcctgctgacctctgtgtccctgactggagtgctggtggtgatgctgatcttcaccgtgctggagctgctgctggccgcctacagctctgtgttctggtggaagcagctgtacagcaacaaccctggcagcagcttcagcagcacccagagccaggaccacatccagcaggtgaagaagagcagcagccgctcctggatctag

SEQ ID NO: 159443 - DNA, 588 bp, synthetic construct
  misc_feature 1..588: note = Description of Artificial Sequence: Synthetic coding sequence
  source 1..588: mol_type = other DNA
atgctgctgcagagccagaccatgggcgtgagccacagcttcacccccaagggcatcaccatcccccagcgggagaagccaggccacatgtaccagaatgaagactacctgcagaatggcctgcccacagagaccaccgtgctgggcttcggcatcaccggcagcctgagcatcatcagcggcaagcagagcaccaagccctttgacctgagcagcctgaccagcaatgctgtgtcctctgtgacagctggagctggcctcttcctgctggccgacagcatggtggccctgaggacagccagccagcactgcggcagcgagatggactacctgagcagcctgccctacagcgagtactactaccccatctatgagatcaaggactgcctgctgacctctgtgtccctgactggagtgctggtggtgatgctgatcttcaccgtgctggagctgctgctggccgcctacagcagcgtcttctggtggaagcagctgtacagcaacaaccctggcagcagcttcagcagcacccagagccaggaccacatccagcaggtgaagaagagcagcagccgctcctggatctag

SEQ ID NO: 159444 - DNA, 510 bp, synthetic construct
  misc_feature 1..510: note = Description of Artificial Sequence: Synthetic coding sequence
  source 1..510: mol_type = other DNA
atgctgctgcagagccagaccatgggcgtgagccacagcttcacccccaagggcatcaccatcccccagcgggagaagccaggccacatgtaccagaatgaagactacctgcagaatggcctgcccacagagaccaccgtgctgggcttcggcatcaccggcagcctgagcatcatcagcggcaagcagagcaccaagccctttgacctgagcagcctgaccagcaatgctgtgtcctctgtgacagctggagctggcctcttcctgctggccgacagcatggtggccctgaggacagccagccagcactgcggcagcgagatggactacctgagcagcctgccctacagcgagtactactaccccatctatgagatcaaggactgcctgctgacctctgtgtccctgactggagtgctggtggtgatgctgatcttcaccgtgctggagctgctgctggccgcctacagcagcgtcttctggtggaagcagctgtacagcaacaactag

SEQ ID NO: 159445 - DNA, 588 bp, synthetic construct; identical to SEQ ID NO: 159443
  misc_feature 1..588: note = Description of Artificial Sequence: Synthetic coding sequence
  source 1..588: mol_type = other DNA

SEQ ID NO: 159446 - DNA, 753 bp, synthetic construct
  misc_feature 1..753: note = Description of Artificial Sequence: Synthetic coding sequence
  source 1..753: mol_type = other DNA
atgaacagcatgaccagcgctgtgcctgtggccaacagcgtgctggtggtggccccccacaacggctaccctgtgaccccaggcatcatgagccacgtgcccctgtaccccaacagccagccccaggtgcacctggtgcccggcaacccccccagcctggtgtccaatgtgaatggccagcctgtgcagaaggccctgaaggagggcaagaccctgggcgccatccagatcatcatcggcctggcccacatcggcctgggcagcatcatggccaccgtgctggtgggggagtacctgagcatctccttctacggcggcttccccttctggggcggcctgtggttcatcatcagcggcagcctgtctgtggccgctgagaaccagccctacagctactgcctgctgagcggcagcctgggcctgaacatcgtgtctgccatctgcagcgctgtgggcgtcatcctcttcatcacagacctgagcatcccccacccctatgcctacccagactactacccctatgcctggggcgtgaaccctggcatggccatctctggagtgctgctggtgttctgcctgctggagtttggcatcgcctgtgccagcagccacttcggctgccagctggtgtgctgccagagcagcaatgtgtctgtcatctaccccaacatctatgctgccaaccctgtgatcaccccagagcctgtgaccagccccccatcctacagcagcgagatccaggccaacaagtag

SEQ ID NO: 159447 - DNA, 2550 bp, synthetic construct
  misc_feature 1..2550: note = Description of Artificial Sequence: Synthetic coding sequence
  source 1..2550: mol_type = other DNA
atggtgcagaaggagagccaggccaccctggaggagcgggagagcgagctgagcagcaacccagctgccagcgctggggccagcctggagcccccagctgccccagcccctggagaggacaacccagctggagctggaggagctgctgtggccggggccgccggcggggcccggcgcttcctgtgtggggtggtggagggcttctacggccggccctgggtgatggagcagaggaaggagctgttccggcggctgcagaagtgggagctgaacacctacctgtatgcccccaaggatgactacaagcacaggatgttctggagggagatgtacagcgtggaggaggccgagcagctgatgaccctcatctctgctgcccgggagtatgaaattgagttcatctatgccatcagccctggcctggacatcaccttcagcaaccccaaggaggtgtccaccctgaagaggaagctggaccaggtgtcccagtttggctgccgcagctttgccctgctgtttgatgacatcgaccacaacatgtgtgccgctgacaaggaggtgttcagcagctttgcccacgcccaggtgtccatcaccaatgagatctaccagtacctgggggagcctgagaccttcctgttctgccccacagagtactgcggcaccttctgctacccaaatgtgtcccagagcccctacctgaggacagtgggggagaagctgctgcccggcatcgaggtgctgtggacaggccccaaggtggtgtccaaggagatccctgtggagagcattgaggaggtgtccaagatcatcaagagggcccctgtgatctgggacaacatccacgccaatgactatgaccagaagaggctcttcctgggcccctacaagggccgcagcacagagctgatcccccggctgaagggcgtgctgaccaaccccaactgtgaatttgaggccaactacgtggccatccacaccctggccacctggtacaagagcaacatgaatggagtgaggaaggatgtggtgatgagccggcaggtggcccacagcggggccaaggcctctgtggtggatggcacccccctggtggccgcccccagcctgaatgccaccaccgtggtgaccaccgtgtaccaggagcccatcatgagccagggcgccgccctgagcggggagcccaccaccctgaccaaggaggaggagaagaagcagccagatgaggagcccatggacatggtggtggagaagcaggaggagacagaccacaagaatgacaaccagatcctgtctgagatcgtggaggccaagatggccgaggagctgaagcccatggacacagacaaggagagcattgctgagagcaagagccctgagatgtccatgcaggaggactgcatcagtgacatcgcccccatgcagacagatgagcagaccaacaaggagcagtttgtgcccggccccaatgagaagcccctgtacacagctgagcctgtgaccctggaggacctgcagctgctggccgacctcttctacctgccctatgagcacggccccaagggggcccagatgctgcgggagttccagtggctgcgggccaacagctctgtggtgtctgtgaactgcaagggcaaggacagcgagaagattgaggagtggaggagccgggccgccaagtttgaggagatgtgtggcctggtgatgggcatgttcacccggctgagcaactgtgccaacagaaccatcctgtatgacatgtacagctatgtgtgggacatcaagagcatcatgtccatggtgaagagctttgtgcagtggctgggctgccgcagccacagcagcgcccagttcctgattggagaccaggagccctgggccttccggggcggcctggccggggagttccagcccccacccctgacccccaccagcaaggtgtacaccatccggccctacttccccaaggatgaggcctctgtgtacaagatctgccgggagatgtatgatgatggagtgggcctgcccttccagagccagcctgacctgattggagacaagctggtgggcggcctgctgagcctgagcctggactactgctttgtgctggaggatgaagatggcatctgtggctacgccctgggcaccgtggatgtgacccccttcatcaagaagtgcaagatctcctggatccccttcatgcaggagaagtacaccaagcccaacggggacaaggagctgtctgaggccgagaagatcatgctgtccttccacgaggagcaggaggtgctgcctgagaccttcctggccaacttccccagcctcatcaagatggacatccacaagaaggtgacagaccccagcgtggccaagtccatgatggcctgcctgctgagcagcctgaaggccaacggcagcagaggagccttctgtgaggtgcggccagatgacaagaggatcctggagttctacagcaagctgggctgctttgagatcgccaagatggagggcttccccaaggatgtggtgatcctgggccgcagcctgtag

SEQ ID NO: 159448 - DNA, 2751 bp, synthetic construct
  misc_feature 1..2751: note = Description of Artificial Sequence: Synthetic coding sequence
  source 1..2751: mol_type = other DNA
atggtgcagaaggagagccaggccaccctggaggagcgggagagcgagctgagcagcaacccagctgccagcgctggggccagcctggagcccccagctgccccagcccctggagaggacaacccagctggagctggaggagctgctgtggccggggccgccggcggggcccggcgcttcctgtgtggggtggtggagggcttctacggccggccctgggtgatggagcagaggaaggagctgttccggcggctgcagaagtgggagctgaacacctacctgtatgcccccaaggatgactacaagcacaggatgttctggagggagatgtacagcgtggaggaggccgagcagctgatgaccctcatctctgctgcccgggagtatgaaattgagttcatctatgccatcagccctggcctggacatcaccttcagcaaccccaaggaggtgtccaccctgaagaggaagctggaccaggtgtcccagtttggctgccgcagctttgccctgctgtttgatgacatcgaccacaacatgtgtgccgctgacaaggaggtgttcagcagctttgcccacgcccaggtgtccatcaccaatgagatctaccagtacctgggggagcctgagaccttcctgttctgccccacagagtactgcggcaccttctgctacccaaatgtgtcccagagcccctacctgaggacagtgggggagaagctgctgcccggcatcgaggtgctgtggacaggccccaaggtggtgtccaaggagatccctgtggagagcattgaggaggtgtccaagatcatcaagagggcccctgtgatctgggacaacatccacgccaatgactatgaccagaagaggctcttcctgggcccctacaagggccgcagcacagagctgatcccccggctgaagggcgtgctgaccaaccccaactgtgaatttgaggccaactacgtggccatccacaccctggccacctggtacaagagcaacatgaatggagtgaggaaggatgtggtgatgacagacagcgaggacagcacagtgtccatccagatcaagctggagaatgaaggaagtgatgaggacatcgagacagatgtgctgtacagcccccagatggccctgaagctggccctgacagagtggctgcaggagtttggagtgccccaccagtacagcagccggcaggtggcccacagcggggccaaggcctctgtggtggatggcacccccctggtggccgcccccagcctgaatgccaccaccgtggtgaccaccgtgtaccaggagcccatcatgagccagggcgccgccctgtctggagagcccaccaccctgaccaaggaggaggagaagaagcagccagatgaggagcccatggacatggtggtggagaagcaggaggagacagaccacaagaatgacaaccagatcctgtctgaaattgtggaggccaagatggccgaggagctgaagcccatggacacagacaaggagagcattgctgagagcaagagccctgagatgtccatgcaggaggactgcatcagtgacatcgcccccatgcagacagatgagcagaccaacaaggagcagtttgtgcccggccccaatgagaagcccctgtacacagctgagcctgtgaccctggaggacctgcagctgctggccgacctcttctacctgccctatgaacatggccccaagggggcccagatgctgcgggagttccagtggctgcgggccaacagctctgtggtgtctgtgaactgcaagggcaaggacagcgagaagattgaggagtggaggagcagagctgccaagtttgaggagatgtgtggcctggtgatgggcatgttcacccggctgagcaactgtgccaacagaaccatcctgtatgacatgtacagctatgtgtgggacatcaagagcatcatgtccatggtgaagagctttgtgcagtggctgggctgccgcagccacagcagcgcccagttcctgattggagaccaggagccctgggccttccggggcggcctggccggggagttccagaggctgctgcccattgatggagccaatgacctcttcttccagcccccacccctgacccccaccagcaaggtgtacaccatccggccctacttccccaaggatgaggcctctgtgtacaagatctgccgggagatgtatgatgatggagtgggcctgcccttccagagccagcctgacctgattggagacaagctggtgggcggcctgctgagcctgagcctggactactgctttgtgctggaggatgaagatggcatctgtggctacgccctgggcaccgtggatgtgacccccttcatcaagaagtgcaagatctcctggatccccttcatgcaggagaagtacaccaagcccaatggagacaaggagctgtctgaggccgagaagatcatgctgtccttccacgaggagcaggaggtgctgcctgagaccttcctggccaacttccccagcctcatcaagatggacatccacaagaaggtgacagaccccagcgtggccaagtccatgatggcctgcctgctgagcagcctgaaggccaacggcagcagaggagccttctgtgaggtgcggccagatgacaagaggatcctggagttctacagcaagctgggctgctttgaaattgccaagatggagggcttccccaaggatgtggtgatcctgggccgcagcctgtag

SEQ ID NO: 159449 - DNA, 2034 bp, synthetic construct
  misc_feature 1..2034: note = Description of Artificial Sequence: Synthetic coding sequence
  source 1..2034: mol_type = other DNA
atggtgcagaaggagagccaggccaccctggaggagcgggagagcgagctgagcagcaacccagctgccagcgctggggccagcctggagcccccagctgccccagcccctggagaggacaacccagctggagctggaggagctgctgtggccggggccgccggcggggcccggcgcttcctgtgtggggtggtggagggcttctacggccggccctgggtgatggagcagaggaaggagctgttccggcggctgcagaagtgggagctgaacacctacctgtatgcccccaaggatgactacaagcacaggatgttctggagggagatgtacagcgtggaggaggccgagcagctgatgaccctcatctctgctgcccgggagtatgaaattgagttcatctatgccatcagccctggcctggacatcaccttcagcaaccccaaggaggtgtccaccctgaagaggaagctggaccaggtgtcccagtttggctgccgcagctttgccctgctgtttgatgacatcgaccacaacatgtgtgccgctgacaaggaggtgttcagcagctttgcccacgcccaggtgtccatcaccaatgagatctaccagtacctgggggagcctgagaccttcctgttctgccccacagagtactgcggcaccttctgctacccaaatgtgtcccagagcccctacctgaggacagtgggggagaagctgctgcccggcatcgaggtgctgtggacaggccccaaggtggtgtccaaggagatccctgtggagagcattgaggaggtgtccaagatcatcaagagggcccctgtgatctgggacaacatccacgccaatgactatgaccagaagaggctcttcctgggcccctacaagggccgcagcacagagctgatcccccggctgaagggcgtgctgaccaaccccaactgtgaatttgaggccaactacgtggccatccacaccctggccacctggtacaagagcaacatgaatggagtgaggaaggatgtggtgatgacagacagcgaggacagcacagtgtccatccagatcaagctggagaatgaaggaagtgatgaggacatcgagacagatgtgctgtacagcccccagatggccctgaagctggccctgacagagtggctgcaggagtttggagtgccccaccagtacagcagccggcaggtggcccacagcggggccaaggcctctgtggtggatggcacccccctggtggccgcccccagcctgaatgccaccaccgtggtgaccaccgtgtaccaggagcccatcatgagccagggcgccgccctgtctggagagcccaccaccctgaccaaggaggaggagaagaagcagccagatgaggagcccatggacatggtggtggagaagcaggaggagacagaccacaagaatgacaaccagatcctgtctgaaattgtggaggccaagatggccgaggagctgaagcccatggacacagacaaggagagcattgctgagagcaagagccctgagatgtccatgcaggaggactgcatcagtgacatcgcccccatgcagacagatgagcagaccaacaaggagcagtttgtgcccggccccaatgagaagcccctgtacacagctgagcctgtgaccctggaggacctgcagctgctggccgacctcttctacctgccctatgaacatggccccaagggggcccagatgctgcgggagttccagtggctgcgggccaacagctctgtggtgtctgtgaactgcaagggcaaggacagcgagaagattgaggagtggaggagcagagctgccaagtttgaggagatgtgtggcctggtgatgggcatgttcacccggctgagcaactgtgccaacagaaccatcctgtatgacatgtacagctatgtgtgggacatcaagagcatcatgtccatggtgaagagctttgtgcagtggctgggccgctgcaccaggaacaacctcttcagcagcaacatcctgagcctgtag

SEQ ID NO: 159450 - DNA, 456 bp, synthetic construct
  misc_feature 1..456: note = Description of Artificial Sequence: Synthetic coding sequence
  source 1..456: mol_type = other DNA
atggtgcagaaggagagccaggccaccctggaggagcgggagagcgagctgagcagcaacccagctgccagcgctggggccagcctggagcccccagctgccccagcccctggagaggacaacccagctggagctggaggagctgctgtggccggggccgccggcggggcccggcgcttcctgtgtggggtggtggagggcttctacggccggccctgggtgatggagcagaggaaggagctgttccggcggctgcagaagtgggagctgaacacctacctgtatgcccccaaggatgactacaagcacaggatgttctggagggagatgtacagcgtggaggaggccggcagcttcctgttcttctacctggtgaccatccagctggccgagattgaaagagtgctgtgtgccagcaaggtgatgaccatctgtgtgatctcctgggcctgctag

SEQ ID NO: 159451 - DNA, 771 bp, synthetic construct
  misc_feature 1..771: note = Description of Artificial Sequence: Synthetic coding sequence
  source 1..771: mol_type = other DNA
gctgctgggggcgcccggcgcttcctgtgtggggtggtggagggcttctacggccggccctgggtgatggagcagaggaaggagctgttccggcggctgcagaagtgggagctgaacacctacctgtatgcccccaaggatgactacaagcacaggatgttctggagggagatgtacagcgtggaggaggccgagcagctgatgaccctcatctctgctgcccgggagtatgaaattgagttcatctatgccatcagccctggcctggacatcaccttcagcaaccccaaggaggtgtccaccctgaagaggaagctggaccaggtgtcccagtttggctgccgcagctttgccctgctgtttgatgacatcgaccacaacatgtgtgccgctgacaaggaggtgttcagcagctttgcccacgcccaggtgtccatcaccaatgagatctaccagtacctgggggagcctgagaccttcctgttctgccccaccggccccaaggtggtgtccaaggagatccctgtggagagcattgaggaggtgtccaagatcatcaagagggcccctgtgatctgggacaacatccacgccaatgactatgaccagaagaggctcttcctgggcccctacaagggccgcagcacagagctgatcccccggctgaagggcgtgctgaccaaccccaactgtgaatttgaggccaactacgtggccatccacaccctggccacctggtacaagagcaacatgaatggagtgaggaagtag

SEQ ID NO: 159452 - DNA, 2592 bp, synthetic construct
  misc_feature 1..2592: note = Description of Artificial Sequence: Synthetic coding sequence
  source 1..2592: mol_type = other DNA
atggtgcagaaggagagccaggccaccctggaggagcgggagagcgagctgagcagcaacccagctgccagcgctggggccagcctggagcccccagctgccccagcccctggagaggacaacccagctggagctggaggagctgctgtggccggggccgccggcggggcccggcgcttcctgtgtggggtggtggagggcttctacggccggccctgggtgatggagcagaggaaggagctgttccggcggctgcagaagtgggagctgaacacctacctgtatgcccccaaggatgactacaagcacaggatgttctggagggagatgtacagcgtggaggaggccgagcagctgatgaccctcatctctgctgcccgggagtatgaaattgagttcatctatgccatcagccctggcctggacatcaccttcagcaaccccaaggaggtgtccaccctgaagaggaagctggaccaggtgtcccagtttggctgccgcagctttgccctgctgtttgatgacatcgaccacaacatgtgtgccgctgacaaggaggtgttcagcagctttgcccacgcccaggtgtccatcaccaatgagatctaccagtacctgggggagcctgagaccttcctgttctgccccacagagtactgcggcaccttctgctacccaaatgtgtcccagagcccctacctgaggacagtgggggagaagctgctgcccggcatcgaggtgctgtggacaggccccaaggtggtgtccaaggagatccctgtggagagcattgaggaggtgtccaagatcatcaagagggcccctgtgatctgggacaacatccacgccaatgactatgaccagaagaggctcttcctgggcccctacaagggccgcagcacagagctgatcccccggctgaagggcgtgctgaccaaccccaactgtgaatttgaggccaactacgtggccatccacaccctggccacctggtacaagagcaacatgaatggagtgaggaaggatgtggtgatgagccggcaggtggcccacagcggggccaaggcctctgtggtggatggcacccccctggtggccgcccccagcctgaatgccaccaccgtggtgaccaccgtgtaccaggagcccatcatgagccagggcgccgccctgagcggggagcccaccaccctgaccaaggaggaggagaagaagcagccagatgaggagcccatggacatggtggtggagaagcaggaggagacagaccacaagaatgacaaccagatcctgtctgagatcgtggaggccaagatggccgaggagctgaagcccatggacacagacaaggagagcattgctgagagcaagagccctgagatgtccatgcaggaggactgcatcagtgacatcgcccccatgcagacagatgagcagaccaacaaggagcagtttgtgcccggccccaatgagaagcccctgtacacagctgagcctgtgaccctggaggacctgcagctgctggccgacctcttctacctgccctatgagcacggccccaagggggcccagatgctgcgggagttccagtggctgcgggccaacagctctgtggtgtctgtgaactgcaagggcaaggacagcgagaagattgaggagtggaggagccgggccgccaagtttgaggagatgtgtggcctggtgatgggcatgttcacccggctgagcaactgtgccaacagaaccatcctgtatgacatgtacagctatgtgtgggacatcaagagcatcatgtccatggtgaagagctttgtgcagtggctgggctgccgcagccacagcagcgcccagttcctgattggagaccaggagccctgggccttccggggcggcctggccggggagttccagaggctgctgcccattgatggagccaatgacctcttcttccagcccccacccctgacccccaccagcaaggtgtacaccatccggccctacttccccaaggatgaggcctctgtgtacaagatctgccgggagatgtatgatgatggagtgggcctgcccttccagagccagcctgacctgattggagacaagctggtgggcggcctgctgagcctgagcctggactactgctttgtgctggaggatgaagatggcatctgtggctacgccctgggcaccgtggatgtgacccccttcatcaagaagtgcaagatctcctggatccccttcatgcaggagaagtacaccaagcccaacggggacaaggagctgtctgaggccgagaagatcatgctgtccttccacgaggagcaggaggtgctgcctgagaccttcctggccaacttccccagcctcatcaagatggacatccacaagaaggtgacagaccccagcgtggccaagtccatgatggcctgcctgctgagcagcctgaaggccaacggcagcagaggagccttctgtgaggtgcggccagatgacaagaggatcctggagttctacagcaagctgggctgctttgagatcgccaagatggagggcttccccaaggatgtggtgatcctgggccgcagcctgtag

SEQ ID NO: 159453 - DNA, 1545 bp, synthetic construct
  misc_feature 1..1545: note = Description of Artificial Sequence: Synthetic coding sequence
  source 1..1545: mol_type = other DNA
atggctgtgtggctggcccagtggctgggccccctgctgctggtgtccctgtggggcctgctggccccagccagcctgctgcggcggctgggggagcacatccagcagttccaggagagcagcgcccagggcctgggcctgagcctgggccctggagctgctgccctgcccaaggtgggctggctggagcagctgctggaccccttcaacgtgtctgaccggcgctccttcctgcagcgctactgggtgaatgaccagcactgggtgggccaggacggccccatcttcctgcacctgggcggggagggcagcctgggccctggctctgtgatgaggggccaccctgctgccctggccccagcctggggcgccctggtgatcagcctggagcaccgcttctacggcctgagcatcccagctgggggcctggagatggcccagctgcgcttcctgagcagccggctggccctggctgatgtggtgtctgcccggctggccctgagccgcctcttcaacatcagcagcagcagcccctggatctgcttcggcggcagctatgccggcagcctggccgcctgggcccggctgaagttcccccacctgatctttgcctctgtggccagcagcgcccctgtgcgggctgtgctggacttcagcgagtacaatgatgtggtgagccgcagcctgatgagcacagccatcggcggcagcctggagtgcagagctgctgtgtctgtggcctttgctgaggtggagcggcggctgcggtctggaggagctgcccaggccgccctgaggacagagctgagcgcctgtggccccctgggccgggcagagaaccaggccgagctgctgggcgccctgcaggccctggtgggcggcgtggtgcagtatgatggccagacaggagcccccctgtctgtgcggcagctgtgtggcctgctgctgggcggcggcggcaacagaagccacagcaccccctactgcggcctgcggcgggctgtgcagatcgtgctgcacagcctgggccagaagtgcctgtccttcagcagagctgagaccgtggcccagctgcggagcacagagccccagctgagcggcgtgggggaccggcagtggctgtaccagacctgcacagaatttggcttctacgtgacctgtgagaacccccgctgccccttcagccagctgcctgccctgcccagccagctggacctgtgtgagcaggtgtttggcctgagcgccctgtctgtggcccaggccgtggcccagaccaacagctactatggaggccagacccctggggccaacaaggtgctgtttgtgaatggagacacagacccctggcacgtgctgtctgtgacccaggccctgggcagcagcgagagcaccctgctgatcagaacaggcagccactgcctggacatggcccctgagcggcccagcgacagccccagcctgcggctgggccggcagaacatcttccagcagctgcagacctggctgaagctggccaaggagagccagatcaagggggaggtgtag

SEQ ID NO: 159454 - DNA, 2106 bp, synthetic construct
  misc_feature 1..2106: note = Description of Artificial Sequence: Synthetic coding sequence
  source 1..2106: mol_type = other DNA
atggacctgtggaacctgtcctggttcctgttcctggatgccctgctggtgatcagcggcctggccaccccagaaaattttgatgtggatggcggcatggaccaggacatctttgacatcaatgaaggcctgggcctggacctgtttgaaggagacatccggctggaccgggcccagatcagaaattccatcattggagagaagtaccgctggccccacaccatcccctacgtgctggaggacagcctggagatgaatgccaagggcgtcatcctgaatgcctttgagcgctaccgcctgaagacctgcatcgacttcaagccctgggccggggagaccaactacatctctgtgttcaagggcagcggctgctggagctctgtgggcaacagaagagtgggcaagcaggagctgagcatcggggccaactgtgacagaattgccaccgtgcagcacgagttcctgcacgccctgggcttctggcatgagcagagcagaagtgacagagatgattatgtgcgcatcatgtgggaccgcatcctgagcggccgggagcacaacttcaacacctacagtgatgacatcagtgacagcctgaatgtgccctatgactacacctctgtgatgcactacagcaagacagccttccagaatggaacagagcccaccatcgtgacccgcatcagtgactttgaagatgtgattggccagaggatggacttcagtgacagcgacctgctgaagctgaaccagctgtacaactgcagcagcagcctgtccttcatggacagctgcagctttgagctggagaatgtgtgtggcatgatccagagcagcggggacaatgctgactggcagagggtgtcccaggtgccccggggccctgagagtgaccacagcaacatgggccagtgccagggcagcggcttcttcatgcactttgacagcagctctgtgaatgtgggcgccacagctgtgctggagagcaggaccctgtaccccaagaggggcttccagtgcctgcagttctacctgtacaacagcggcagcgagagtgaccagctgaacatctacatccgggagtacagcgctgacaacgtggatggcaacctgaccctggtggaggagatcaaggagatccccaccggctcctggcagctgtaccacgtgaccctgaaggtgaccaagaagttccgggtggtgtttgagggcaggaagggcagcggggccagcctgggcggcctgagcattgatgacatcaacctgtctgagacccgctgcccccaccacatctggcacatccggaacttcacccagttcatcggcagccccaacggcaccctgtacagcccccccttctacagcagcaagggctacgccttccagatctacctgaacctggcccacgtgaccaatgccggcatctacttccacctgatcagcggggccaatgatgaccagctgcagtggccctgcccctggcagcaggccaccatgaccctgctggaccagaacccagacatccggcagaggatgagcaaccagaggagcatcaccacagaccccttcatgaccacagacaatggaaactacttctgggaccggcccagcaaggtgggcaccgtggccctcttcagcaatggcacccagttccggcggggcggcggctacggcaccagcgccttcatcacccatgagcggctgaagagccgggacttcatcaagggagatgatgtgtacatcctgctgactgtggaggacatcagccacctgaacagcacccagatccagctgaccccagcccccagcgtgcaggacctgtgcagcaagaccacctgcaagaatgatggagtgtgcaccgtgagagatggcaaggcagaatgtcgctgccagagcggggaggactggtggtacatgggagagcgctgtgagaagaggggcagcacccgggacaccatcgtgattgctgtgagcagcacagtggccgtgtttgccctgatgctgatcatcaccctggtgtctgtgtactgcaccaggaagaagtaccgggagaggatgagcagcaaccggcccaacctgaccccccagaaccagcacgccttctag

SEQ ID NO: 159455 - DNA, 894 bp, synthetic construct
  misc_feature 1..894: note = Description of Artificial Sequence: Synthetic coding sequence
  source 1..894: mol_type = other DNA
atggccagcccccagctgtgccgggccctggtgtctgcccagtgggtggccgaggccctgcgggcccccagggctggccagcccctgcagctgctggatgcctcctggtacctgcccaagctgggcagagatgcccggcgggagtttgaggagcggcacatccctggagctgccttctttgacatcgaccagtgcagcgacaggaccagcccctatgaccacatgctgcctggagctgagcactttgctgaatatgccggccgcctgggcgtgggcgccgccacccacgtggtgatctatgatgccagtgaccagggcctgtacagcgccccccgggtgtggtggatgttccgggccttcggccaccacgctgtgtccctgctggatggcggcctgcggcactggctgcggcagaacctgcccctgagcagcggcaagagccagcctgccccagctgagttccgggcccagctggaccctgccttcatcaagacctatgaggacatcaaggagaacctggagagccgccgcttccaggtggtggacagccgggccaccggccgcttccggggcacagagcctgagcccagagatggcatcgagcccggccacatccctggcaccgtgaacatccccttcacagacttcctgagccaggagggcctggagaagagccctgaggagatccgccacctgttccaggagaagaaggtggacctgagcaagcccctggtggccacctgtggcagcggcgtgacagcctgccacgtggccctgggcgcctacctgtgtgggaagccagatgtgcccatctatgatggctcctgggtggagtggtacatgagggcccggccagaagatgtgatcagcgagggccggggcaagacccactag

SEQ ID NO: 159456 - DNA, 954 bp, synthetic construct
  misc_feature 1..954: note = Description of Artificial Sequence: Synthetic coding sequence
  source 1..954: mol_type = other DNA
atggccgagcccggcagccgggagagcgagacccgggcccggagccccagcgtggccgccatggccagcccccagctgtgccgggccctggtgtctgcccagtgggtggccgaggccctgcgggcccccagggctggccagcccctgcagctgctggatgcctcctggtacctgcccaagctgggcagagatgcccggcgggagtttgaggagcggcacatccctggagctgccttctttgacatcgaccagtgcagcgacaggaccagcccctatgaccacatgctgcctggagctgagcactttgctgaatatgccggccgcctgggcgtgggcgccgccacccacgtggtgatctatgatgccagtgaccagggcctgtacagcgccccccgggtgtggtggatgttccgggccttcggccaccacgctgtgtccctgctggatggcggcctgcggcactggctgcggcagaacctgcccctgagcagcggcaagagccagcctgccccagctgagttccgggcccagctggaccctgccttcatcaagacctatgaggacatcaaggagaacctggagagccgccgcttccaggtggtggacagccgggccaccggccgcttccggggcacagagcctgagcccagagatggcatcgagcccggccacatccctggcaccgtgaacatccccttcacagacttcctgagccaggagggcctggagaagagccctgaggagatccgccacctgttccaggagaagaaggtggacctgagcaagcccctggtggccacctgtggcagcggcgtgacagcctgccacgtggccctgggcgcctacctgtgtgggaagccagatgtgcccatctatgatggctcctgggtggagtggtacatgagggcccggccagaagatgtgatcagcgagggccggggcaagacccactag

SEQ ID NO: 159457 - DNA, 894 bp, synthetic construct; identical to SEQ ID NO: 159455
  misc_feature 1..894: note = Description of Artificial Sequence: Synthetic coding sequence
  source 1..894: mol_type = other DNA

SEQ ID NO: 159458 - DNA, 894 bp, synthetic construct; identical to SEQ ID NO: 159455
  misc_feature 1..894: note = Description of Artificial Sequence: Synthetic coding sequence
  source 1..894: mol_type = other DNA

SEQ ID NO: 159459 - DNA, 894 bp, synthetic construct; identical to SEQ ID NO: 159455
  misc_feature 1..894: note = Description of Artificial Sequence: Synthetic coding sequence
  source 1..894: mol_type = other DNA

SEQ ID NO: 159460 - DNA, 894 bp, synthetic construct; identical to SEQ ID NO: 159455
  misc_feature 1..894: note = Description of Artificial Sequence: Synthetic coding sequence
  source 1..894: mol_type = other DNA

SEQ ID NO: 159461 - DNA, 738 bp, synthetic construct
  misc_feature 1..738: note = Description of Artificial Sequence: Synthetic coding sequence
  source 1..738: mol_type = other DNA
atggccagcccccagctgtgccgggccctggtgtctgcccagtgggtggccgaggccctgcgggcccccagggctggccagcccctgcagctgctggatgcctcctggtacctgcccaagctgggcagagatgcccggcgggagtttgaggagcggcacatccctggagctgccttctttgacatcgaccagtgcagcgacaggaccagcccctatgaccacatgctgcctggagctgagcactttgctgaatatgccggccgcctgggcgtgggcgccgccacccacgtggtgatctatgatgccagtgaccagggcctgtacagcgccccccgggtgtggtggatgttccgggccttcggccaccacgctgtgtccctgctggatggcggcctgcggcactggctgcggcagaacctgcccctgagcagcggcaagagccagcctgccccagctgagttccgggcccagctggaccctgccttcatcaagacctatgaggacatcaaggagaacctggagagccgccgcttccaggtggtggacagccgggccaccggccgcttccggggcacagagcctgagcccccagctgtgggcatcgagcccggccacatccctggcaccgtgaacatccccttcacagacttcctgagccaggacggctcctgggtggagtggtacatgagggcccggccagaagatgtgatcagcgagggccggggcaagacccactag

SEQ ID NO: 159462 - DNA, 765 bp, synthetic construct
  misc_feature 1..765: note = Description of Artificial Sequence: Synthetic coding sequence
  source 1..765: mol_type = other DNA
atggaccctgctgccagcagctgcatgaggagcctgcagcccccagcccctgtgtggggctgcctgaggaacccccacagcgagggcaatggagccagcggcctgccccactacccacccacccccttctccttccaccagaagccagacttcctggccacagccacagctgcctacccagacttcagcgccagctgcctggccgccaccccccacagcctgccccaggaggagcacatcttcacagagcagcacccagccttcccccagagccccaactggcacttccctgtgtctgatgccaggagaagacccaacagcggccctgctgggggcagcaaggagatgggcaccagcagcctgggcctggtggacaccactggaggccctggagatgattatggagtgctgggcagcacagccaatgaaacagagaagaagagcagcagaagaaggaaggagagcagtgacaaccaggagaacagaggcaagccagagggcagcagcaaggccaggaaggagaggacagccttcaccaaggagcagctgcgggagctggaggccgagtttgcccaccacaactacctgacccggctgcggcgctatgaaattgctgtgaacctggacctgtctgagcggcaggtgaaggtgtggttccagaacagaaggatgaagtggaagagggtgaagggcggccagcccatcagccccaacggccaggaccctgaagatggagacagcacagccagccccagcagcgagtag

SEQ ID NO: 159463 - DNA, 555 bp, synthetic construct
  misc_feature 1..555: note = Description of Artificial Sequence: Synthetic coding sequence
  source 1..555: mol_type = other DNA
atggaccctgctgccagcagctgcatgaggagcctgcagcccccagcccctgtgtggggctgcctgaggaacccccacagcgagggcaatggagccagcggcctgccccactacccacccacccccttctccttccaccagaagccagacttcctggccacagccacagctgcctacccagacttcagcgccagctgcctggccgccaccccccacagcctgccccaggaggagcacatcttcacagagcagcacccagccttcccccagagccccaactggcacttccctgtgtctgatgccaggagaagacccaacagcggccctgctgggggcagcaaggagatgggcaccagcagcctgggcctggtggacaccactggaggccctggagatgattatggagtgctgggcagcacagccaatgaaacagagaagaagagcagcagaagaaggaaggagagcagcggccagagcgtggtgcctgagcccaaggatgaggtggaggcctgtgagggccgcagcgcccacctgccccagtgggccggcccctag

SEQ ID NO: 159464 - DNA, 420 bp, synthetic construct
  misc_feature 1..420: note = Description of Artificial Sequence: Synthetic coding sequence
  source 1..420: mol_type = other DNA
atgggcaccagcagcctgggcctggtggacaccaccggcggccctggagatgattatggagtgctgggcagcacagccaatgaaacagagaagaagagcagcagaagaaggaaggagagcagtgacaaccaggagaacagaggcaagccagagggcagcagcaaggccaggaaggagaggacagccttcaccaaggagcagctgcgggagctggaggccgagtttgcccaccacaactacctgacccggctgcggcgctatgaaattgctgtgaacctggacctgtctgagcggcaggtgaaggtgtggttccagaacagaaggatgaagtggaagagggtgaagggcggccagcccatcagccccaacggccaggaccctgaagatggagacagcacagccagccccagcagcgagtag

SEQ ID NO: 159465 - DNA, 915 bp, synthetic construct
  misc_feature 1..915: note = Description of Artificial Sequence: Synthetic coding sequence
  source 1..915: mol_type = other DNA
atggagcaccccctgtttggctgcctgcggagcccccacgccacagcccagggcctgcaccccttcagccagagcagcctggccctgcacggccgcagtgaccacatgagctacccagagctgagcaccagcagcagcagctgcatcatcgccggctacccaaatgaggagggcatgtttgccagccagcaccaccggggccaccaccaccaccaccaccaccaccaccaccaccaccaccagcagcagcagcaccaggccctgcagaccaactggcacctgccccagatgagcagcccccccagcgctgcccggcacagcctgtgcctgcagcctgacagcggcggccccccagagctgggcagcagcccccctgtgctgtgcagcaacagcagcagcctgggcagcagcacccccaccggggccgcctgtgcccctggggactatggccggcaggccctgagccctgctgaggccgagaagaggtctgggggcaagaggaagagtgacagcagtgacagccaggagggcaactacaagtctgaggtgaacagcaagcccaggaaggagaggacagccttcaccaaggagcagatccgggagctggaggccgagtttgcccaccacaactacctgacccggctgcggcgctatgaaattgctgtgaacctggacctgacagagcggcaggtgaaggtgtggttccagaacagaaggatgaagtggaagagggtgaagggcggccagcagggcgctgctgcccgggagaaggagctggtgaatgtgaagaagggcaccctgctgcccagcgagctgtctggaattggagctgccaccctgcagcagacaggagacagcatcgccaatgaagacagccatgacagcgaccacagcagcgagcacgcccacctgtag

SEQ ID NO: 159466 - DNA, 705 bp, synthetic construct
  misc_feature 1..705: note = Description of Artificial Sequence: Synthetic coding sequence
  source 1..705: mol_type = other DNA
atggccgccagccgctgggccaggaaggctgtggtgctgctgtgtgccagtgacctgctgctgctgctgctgctgctgcccccacctggcagctgtgccgctgagggcagccctggcaccccagatgagagcaccccaccacccaggaagaagaagaaggacatccgggactacaatgatgctgacatggcccggctgctggagcagtgggagaaggatgatgacatcgaggagggggacctgcctgagcacaagaggcccagcgcccctgtggacttcagcaagattgaccccagcaagccagagagcatcctgaagatgaccaagaagggcaagaccctgatgatgtttgtgacagtgtctggcagccccacagagaaggagacagaggagatcaccagcctgtggcagggcagcctcttcaatgccaactatgatgtgcagcgcttcatcgtgggcagtgaccgggccatcttcatgctgagagatggcagctatgcctgggagatcaaggacttcctggtgggccaggacagatgtgctgatgtgaccctggagggccaggtgtacccaggaaaaggaggcggcagcaaggagaagaacaagaccaagcaggacaagggcaagaagaagaaggagggggacctgaagagccgcagcagcaaggaggagaacagagctggcaacaagcgggaggacctgtag

SEQ ID NO: 159467 - DNA, 705 bp, synthetic construct; identical to SEQ ID NO: 159466
  misc_feature 1..705: note = Description of Artificial Sequence: Synthetic coding sequence
  source 1..705: mol_type = other DNA

SEQ ID NO: 159468 - DNA, 1194 bp, synthetic construct
  misc_feature 1..1194: note = Description of Artificial Sequence: Synthetic coding sequence
  source 1..1194: mol_type = other DNA
atggcccagagccccccaccccagagcctgctgggccatgaccactggatctttgcccagggctggggctgggccggccactgggacagcaccagccctgccagcagcagtgacagcagcggcagctgcccctgtgatggagcccggggcctgccccagccccagccccccagctgcagcagcagagctgctgaggccgccgccaccaccccccggcgggccaggacaggccctgctgggggccagaggcagagcgccagcgagcgggagaagctgaggatgaggaccctggcccgggccctgcacgagctgcggcgcttcctgccccccagcctggccccagctggccagagcctgaccaagattgagaccctgcggctggccatccgctacatcggccacctgtctgctgtgctgggcctgtctgaggagagcctgcagtgcagaagacggcagagaggagatgctggcagcccctggggctgccccctgtgcccagaccggggccctgctgaggcccagacccaggccgagggccagggccagggccagggccagggccagggccagggccagggccagggccagggccagggccagggccagggccagggccggcggcccggcctggtgtctgctgtgctggccgaggcctcctggggcagccccagcgcctgccctggggcccaggccgcccctgagcggctgggccggggcgtgcatgacacagacccctgggccaccccaccctactgccccaagatccagagccccccctacagcagccagggcaccaccagtgatgccagcctgtggaccccaccccagggctgcccctggacccagagcagccctgagcccaggaacccccctgtgccctggacagctgccccagccaccctggagctggccgctgtgtaccagggcctgtctgtgtccccagagccctgcctgagcctgggcgcccccagcctgctgccccaccccagctgccagaggctgcagccccagaccccaggccgctgctggagccacagcgctgaggtggtgcccaacagcgaggaccagggccctggggccgccttccagctgtctgaggccagccccccccagagcagcggcctgcgcttcagcggctgcccagagctgtggcaggaggacctggagggcgcccggctgggcatcttctactag

SEQ ID NO: 159469 - DNA, 3510 bp, synthetic construct
  misc_feature 1..3510: note = Description of Artificial Sequence: Synthetic coding sequence
  source 1..3510: mol_type = other DNA
atggagccccgggagagcggcaaggcccctgtgacctttgatgacatcaccgtgtacctgctgcaggaggagtgggtgctgctgagccagcagcagaaggagctgtgtggcagcaacaagctggtggcccccctgggccccaccgtggccaaccctgagctgttcaggaagtttggccggggccctgagccctggctgggctctgtgcagggccagaggagcctgctggagcaccaccctgggaagaagcagatgggctacatgggagagatggaggtgcagggccccacccgggagagcggccagagcctgcccccccagaagaaggcctacctgagccacctgagcactggaagtggccacatcgagggggactgggccggcaggaacaggaagctgctgaagcccaggagcatccagaagtcctggtttgtgcagttcccctggctgatcatgaatgaggagcagacagccctcttctgcagcgcctgccgggagtaccccagcatccgggacaagaggagccgcctcatcgagggctacacaggccccttcaaggtggagaccctgaagtaccacgccaagagcaaggcccacatgttctgtgtgaatgccctggccgcccgggaccccatctgggccgcccgcttccgcagcatccgggaccccccaggagatgtgctggccagccctgagcccctcttcaccgctgactgccccatcttctacccacctggccccctgggcggctttgacagcatggccgagctgctgcccagcagcagagctgagctggaggaccctggaggagatggagccatcccagccatgtacctggactgcatcagtgacctgcggcagaaggagatcacagatggcatccacagcagcagtgacatcaacatcctgtacaatgatgctgtggagagctgcatccaggaccccagcgctgagggcctgtctgaggaggtgcctgtggtgtttgaggagctgcctgtggtgtttgaagatgtggccgtgtacttcacccgggaggagtggggcatgctggacaagaggcagaaggagctgtacagagatgtgatgaggatgaactatgagctgctggccagcctgggccctgctgctgccaagccagacctgatcagcaagctggagaggagagctgccccctggatcaaggaccccaacggccccaagtggggcaagggccggcccccaggcaacaagaagatggtggccgtgcgggaggccgacacccaggccagcgctgctgacagcgccctgctgcccggcagccctgtggaggcccgggccagctgctgcagcagcagcatctgtgaggagggagatggcccccggcgcatcaagaggacctaccggcccaggagcatccagaggtcctggtttggccagttcccctggctggtgattgaccccaaggagaccaagctgttctgcagcgcctgcatcgagcggcccaacctgcatgacaagagcagccggctggtgcggggctacacaggccccttcaaggtggagaccctgaagtaccacgaggtgtccaaggcccaccggctgtgtgtgaacacagtggagatcaaggaggacaccccccacacagccctggtgcctgagatcagcagtgacctgatggccaacatggagcacttcttcaatgctgcctacagcatcgcctaccacagccggcccctgaatgactttgagaagatcctgcagctgctgcagagcactggaacagtcatcctgggcaagtacagaaacagaacagcctgcacccagttcatcaagtacatcagcgagaccctgaagcgggagatcctggaggatgtgaggaacagcccctgtgtgtctgtgctgctggacagcagcacagatgccagcgagcaggcctgtgtgggcatctacatccgctacttcaagcagatggaggtgaaggagagctacatcaccctggcccccctgtacagcgagacagcagatggctactttgagaccatcgtgtctgccctggatgagctggacatccccttcaggaagccaggctgggtggtgggcctgggcacagatggcagcgccatgctgagctgccggggcggcctggtggagaagttccaggaggtgatcccccagctgctgcctgtgcactgtgtggcccaccggctgcacctggccgtggtggatgcctgtggcagcattgacctggtgaagaagtgtgacagacacatccgcaccgtcttcaagttctaccagagcagcaacaagaggctgaatgagctgcaggagggcgccgcccccctggagcaggagatcatccggctgaaggacctgaatgctgtgcgctgggtggccagcagaagaaggaccctgcacgccctgctggtgtcctggccagccctggcccggcacctgcagagggtggccgaggccggcggccagatcggccaccgggccaagggcatgctgaagctgatgaggggcttccactttgtgaagttctgccacttcctgctggacttcctgagcatctaccggcccctgtctgaggtgtgccagaaggagatcgtgctgatcacagaggtgaatgccaccctgggccgggcctacgtggccctggagagcctgcggcaccaggccggccccaaggaggaggagttcaatgccagcttcaaggatggccgcctgcacggcatctgcctggacaagctggaggtggccgagcagcgcttccaggccgaccgggagaggacagtgctgactggaattgagtacctgcagcagagatttgatgctgacaggcctccccagctgaagaacatggaggtgtttgacaccatggcctggcccagcggcatcgagctggccagctttggaaatgatgacatcctgaacctggcccgctactttgaatgttccctgcccaccggctacagcgaggaggccctgctggaggagtggctgggcctgaagaccatcgcccagcacctgcccttctccatgctgtgcaagaatgccctggcccagcactgccgcttccccctgctgagcaagctgatggctgtggtggtgtgtgtgcccatcagcaccagctgctgtgagcggggcttcaaggccatgaaccgcatcagaacagatgagaggaccaagctgagcaatgaggtgctgaacatgctgatgatgacagctgtgaatggagtggccgtgacagaatatgacccccagcctgccatccagcactggtacctgaccagcagcggccgccgcttcagccacgtgtacacctgtgcccaggtgcctgcccggagccctgccagcgcccggctgaggaaggaggagatgggcgccctgtatgtggaggagcccaggacccagaagccacccatcctgcccagccgggaggccgctgaggtgctgaaggactgcatcatggagcccccagagcggctgctgtacccccacaccagccaggaggcccctggcatgtcctag

SEQ ID NO: 159470 - DNA, 981 bp, synthetic construct
  misc_feature 1..981: note = Description of Artificial Sequence: Synthetic coding sequence
  source 1..981: mol_type = other DNA
atgagggagtggtgggtgcaggtgggcctgctggccgtgcccctgctggccgcctacctgcacatccccccaccccagctgagccctgccctgcacagctggaagagcagcggcaagttcttcacctacaagggcctgcgcatcttctaccaggacagcgtgggcgtggtgggcagccctgagatcgtggtgctgctgcacggcttccccaccagcagctatgactggtacaagatctgggagggcctgaccctgcgcttccaccgggtgattgccctggacttcctgggcttcggcttcagtgacaagccccggccccaccactacagcatctttgagcaggccagcatcgtggaggccctgctgcggcacctgggcctgcagaacagacgcatcaacctgctgagccatgactatggagacatcgtggcccaggagctgctgtaccgctacaagcagaacagaagtggccgcctgaccatcaagagcctgtgcctgagcaatggaggcatcttccctgagacccaccggcccctgctgctgcagaagctgctgaaggatggaggagtgctgagccccatcctgacccggctgatgaacttctttgtgttcagccggggcctgacccctgtgtttggcccctacacccggcccagcgagagcgagctgtgggacatgtgggccggcatcagaaataatgatggcaacctggtgattgacagcctgctgcagtacatcaaccagaggaagaagttcagaagacgctgggtgggcgccctggcctctgtgaccatccccatccacttcatctacggccccctggaccctgtgaacccctacccagagttcctggagctgtacaggaagaccctgcccaggagcacagtgtccatcctggatgaccacatcagccactacccccagctggaggaccccatgggcttcctgaatgcctacatgggcttcatcaacagcttctag

SEQ ID NO: 159471 - DNA, 981 bp, synthetic construct; identical to SEQ ID NO: 159470
  misc_feature 1..981: note = Description of Artificial Sequence: Synthetic coding sequence
  source 1..981: mol_type = other DNA

SEQ ID NO: 159472 - DNA, 357 bp, synthetic construct
  misc_feature 1..357: note = Description of Artificial Sequence: Synthetic coding sequence
  source 1..357: mol_type = other DNA
atgagggagtggtgggtgcaggtgggcctgctggccgtgcccctgctggccgcctacctgcacatccccccaccccagctgagccctgccctgcacagctggaagagcagcggcaagttcttcacctacaagggcctgcgcatcttctaccaggacagcgtgggcgtggtgggcagccctgagatcgtggtgctgctgcacggcttccccaccagcagctatgactggtacaagatctgggagggcctgaccctgcgcttccaccgggtgattgccctggacttcctgggcttcggcttcagtgacaagccccggccccaccactacagcatctttgagcaggccagcatcgtgtag

SEQ ID NO: 159473 - DNA, 624 bp, synthetic construct
  misc_feature 1..624: note = Description of Artificial Sequence: Synthetic coding sequence
  source 1..624: mol_type = other DNA
atgagggagtggtgggtgcaggtgggcctgctggccgtgcccctgctggccgcctacctgcacatccccccaccccagctgagccctgccctgcacagctggaagagcagcggcaagttcttcacctacaagggcctgcgcatcttctaccaggacagcgtgggcgtggtgggcagccctgagatcgtggtgctgctgcacggcttccccaccagcagctatgactggtacaagatctgggagggcctgaccctgcgcttccaccgggtgattgccctggacttcctgggcttcggcttcagtgacaagccccggccccaccactacagcatctttgagcaggccagcatcgtggaggccctgctgcggcacctgggcctgcagaacagacgcatcaacctgctgagccatgactatggagacatcgtggcccaggagctgctgtaccgctacaagcagaacagaagtggccgcctgaccatcaagagcctgtgcctgagcaatggaggcatcttccctgagacccaccggcccctgctgctgcagaagctgctgaaggatggaggagtgctgagccccatcctgacccggctgatgaacttctttgtgttcagccggggctag

SEQ ID NO: 159474 - DNA, 483 bp, synthetic construct
  misc_feature 1..483: note = Description of Artificial Sequence: Synthetic coding sequence
  source 1..483: mol_type = other DNA
atgagggagtggtgggtgcaggtgggcctgctggccgtgcccctgctggccgcctacctgcacatccccccaccccagctgagccctgccctgcacagctggaagagcagcggcaagttcttcacctacaagggcctgcgcatcttctaccaggacagcgtgggcgtggtgggcagccctgagatcgtggtgctgctgcacggcttccccaccagcagctatgactggtacaagatctgggagggcctgaccctgcgcttccaccgggtgattgccctggacttcctgggcttcggcttcagtgacaagccccggccccaccactacagcatctttgagcaggccagcatcgtggaggccctgctgcggcacctgggcctgcagaacagacgcatcaacctgctgagccatgactatggagacatcgtggcccaggagctgctgtaccgctacaagcagaacagaagtggccgcctgacctag

SEQ ID NO: 159475 - DNA, 384 bp, synthetic construct
  misc_feature 1..384: note = Description of Artificial Sequence: Synthetic coding sequence
  source 1..384: mol_type = other DNA
atgagggagtggtgggtgcaggtgggcctgctggccgtgcccctgctggccgcctacctgcacatccccccaccccagctgagccctgccctgcacagctggaagagcagcggcaagttcttcacctacaagggcctgcgcatcttctaccaggacagcgtgggcgtggtgggcagccctgagatcgtggtgctgctgcacggcttccccaccagcagctatgactggtacaagatctgggagggcctgaccctgcgcttccaccgggtgattgccctggacttcctgggcttcggcttcagtgacaagccccggccccaccactacagcatctttgagcaggccagcatcgtggaggccctgctgcggcacctgggcctgtag

SEQ ID NO: 159476 - DNA, 522 bp, synthetic construct
  misc_feature 1..522: note = Description of Artificial Sequence: Synthetic coding sequence
  source 1..522: mol_type = other DNA
atgagggagtggtgggtgcaggtgggcctgctggccgtgcccctgctggccgcctacctgcacatccccccaccccagctgagccctgccctgcacagctggaagagcagcggcaagttcttcacctacaagggcctgcgcatcttctaccaggacagcgtgggcgtggtgggcagccctgagatcgtggtgctgctgcacggcttccccaccagcagctatgactggtacaagatctgggagggcctgaccctgcgcttccaccgggtgattgccctggacttcctgggcttcggcttcagtgacaagccccggccccaccactacagcatctttgagcaggccagcatcgtggaggccctgctgcggcacctgggcctgcagaacagacgcatcaacctgctgagccatgactatggagacatcgtggcccaggagctgctgtaccgctacaagcagaacagaagtggccgcctgaccatcaagagcctgtgcctgagcaatggaggcaactgcctgtag

SEQ ID NO: 159477 - DNA, 879 bp, synthetic construct
  misc_feature 1..879: note = Description of Artificial Sequence: Synthetic coding sequence
  source 1..879: mol_type = other DNA
atgagggagtggtgggtgcaggtgggcctgctggccgtgcccctgctggccgcctacctgcacatccccccaccccagctgagccctgccctgcacagctggaagagcagcggcaagttcttcacctacaagggcctgcgcatcttctaccaggacagcgtgggcgtggtgggcagccctgagatcgtggtgctgctgcacggcttccccaccagcagctatgactggtacaagatctgggagggcctgaccctgcgcttccaccgggtgattgccctggacttcctgggcttcggcttcagtgacaagccccggccccaccactacagcatctttgagcaggccagcatcgtggaggccctgctgcggcacctgggcctgcagaacagacgcatcaacctgctgagccatgactatggagacatcgtggcccaggagctgctgtaccgctacaagcagaacagaagtggccgcctgaccatcaagagcctgtgcctgagcaatggaggcatcttccctgagacccaccggcccctgctgctgcagaagctgctgaaggatggaggagtgctgagccccatcctgacccggctgatgaacttctttgtgttcagccggggcctgctgcagtacatcaaccagaggaagaagttcagaagacgctgggtgggcgccctggcctctgtgaccatccccatccacttcatctacggccccctggaccctgtgaacccctacccagagttcctggagctgtacaggaagaccctgcccaggagcacagtgtccatcctggatgaccacatcagccactacccccagctggaggaccccatgggcttcctgaatgcctacatgggcttcatcaacagcttctag

SEQ ID NO: 159478 - DNA, 879 bp, synthetic construct; identical to SEQ ID NO: 159477
  misc_feature 1..879: note = Description of Artificial Sequence: Synthetic coding sequence
  source 1..879: mol_type = other DNA

SEQ ID NO: 159479 - DNA, 582 bp, synthetic construct
  misc_feature 1..582: note = Description of Artificial Sequence: Synthetic coding sequence
  source 1..582: mol_type = other DNA
atggacaacctgcgggagaccttcctgagcctggaggatggcctgggcagcagtgacagccctggcctgctgagctcctgggactggaaggacagagctggcccctttgagctgaaccaggccagccccagccagagcctgagccctgcccccagcctggagagctacagcagcagcccctgcccagctgtggccggcctgccctgtgaacatggaggagccagcagcggcggcagcgagggctgcagcgtgggcggggccagcggcctggtggaggtggactacaacatgctggccttccagcccacccacctgcagggcggcggcggccccaaggcccagaagggcaccaaggtgaggatgtctgtgcagaggaggaggaaggccagcgagcgggagaagctgaggatgaggaccctggctgatgccctgcacaccctgaggaactacctgccccctgtgtacagccagaggggccagcccctgaccaagatccagaccctgaagtacaccatcaagtacatcggggagctgacagacctgctgaacagaggccgggagccccgggcccagagcgcctag

SEQ ID NO: 159480 - DNA, 1893 bp, synthetic construct
  misc_feature 1..1893: note = Description of Artificial Sequence: Synthetic coding sequence
  source 1..1893: mol_type = other DNA
atggccctgcccacagcccggcccctgctgggcagctgtggcaccccagccctgggcagcctgctcttcctgctcttcagcctgggctgggtgcagcccagcaggaccctggccggggagaccggccaggaggccgcccccctggatggagtgctggccaacccccccaacatcagcagcctgagcccccggcagctgctgggcttcccctgtgccgaggtgtctggcctgagcacagagcgggtgcgggagctggccgtggccctggcccagaagaatgtgaagctgagcacagagcagctgcgctgcctggcccaccggctgtctgagcccccagaggacctggatgccctgcccctggacctgctgctcttcctgaacccagatgccttcagcggcccccaggcctgcacccgcttcttcagccgcatcaccaaggccaacgtggacctgctgcccaggggggcccctgagcggcagaggctgctgcctgctgccctggcctgctggggcgtgcggggcagcctgctgtctgaggctgatgtgcgggccctgggcggcctggcctgtgacctgcccggccgctttgtggccgagagcgctgaggtgctgctgccccggctggtgtcctgccccggccccctggaccaggaccagcaggaggccgcccgggccgccctgcagggcggcggccccccctacggcccccccagcacctggagcgtgtccaccatggatgccctgcggggcctgctgcctgtgctgggccagcccatcatccgcagcatcccccagggcatcgtggccgcctggaggcagaggagcagccgggaccccagctggaggcagcctgagaggaccatcctgcggccccgcttccggcgggaggtggagaagacagcctgccccagcggcaagaaggcccgggagattgatgagagcctcatcttctacaagaagtgggagctggaggcctgtgtggatgctgccctgctggccacccagatggacagagtgaatgccatccccttcacctatgagcagctggatgtgctgaagcacaagctggatgagctgtacccccagggctacccagagagcgtcatccagcacctgggctacctgttcctgaagatgagccctgaggacatcaggaagtggaatgtgaccagcctggagaccctgaaggccctgctggaggtgaacaagggccacgagatgagcccccaggccccccggcggcccctgccccaggtggccaccctgattgacagatttgtgaagggccggggccagctggacaaggacaccctggacaccctgacagccttctacccaggctacctgtgcagcctgagccctgaggagctgagctctgtgccccccagcagcatctgggccgtgcggccccaggacctggacacctgtgacccccggcagctggatgtgctgtaccccaaggcccggctggccttccagaacatgaatggcagcgagtactttgtgaagatccagagcttcctgggcggggcccccacagaggacctgaaggccctgagccagcagaatgtgtccatggacctggccaccttcatgaagctgaggacagatgctgtgctgcccctgactgtggccgaggtgcagaagctgctgggcccccacgtggagggcctgaaggccgaggagcggcacaggcctgtgcgggactggatcctgcggcagaggcaggatgacctggacaccctgggcctgggcctgcagggcggcatccccaacggctacctggtgctggacctgtccatgcaggaggccctgagcggcaccccctgcctgctgggccctggccctgtgctgactgtgctggccctgctgctggccagcaccctggcctag

SEQ ID NO: 159481 - DNA, 1869 bp, synthetic construct
  misc_feature 1..1869: note = Description of Artificial Sequence: Synthetic coding sequence
  source 1..1869: mol_type = other DNA
atggccctgcccacagcccggcccctgctgggcagctgtggcaccccagccctgggcagcctgctcttcctgctcttcagcctgggctgggtgcagcccagcaggaccctggccggggagaccggccaggaggccgcccccctggatggagtgctggccaacccccccaacatcagcagcctgagcccccggcagctgctgggcttcccctgtgccgaggtgtctggcctgagcacagagcgggtgcgggagctggccgtggccctggcccagaagaatgtgaagctgagcacagagcagctgcgctgcctggcccaccggctgtctgagcccccagaggacctggatgccctgcccctggacctgctgctcttcctgaacccagatgccttcagcggcccccaggcctgcacccgcttcttcagccgcatcaccaaggccaacgtggacctgctgcccaggggggcccctgagcggcagaggctgctgcctgctgccctggcctgctggggcgtgcggggcagcctgctgtctgaggctgatgtgcgggccctgggcggcctggcctgtgacctgcccggccgctttgtggccgagagcgctgaggtgctgctgccccggctggtgtcctgccccggccccctggaccaggaccagcaggaggccgcccgggccgccctgcagggcggcggccccccctacggcccccccagcacctggagcgtgtccaccatggatgccctgcggggcctgctgcctgtgctgggccagcccatcatccgcagcatcccccagggcatcgtggccgcctggaggcagaggagcagccgggaccccagctggaggcagcctgagaggaccatcctgcggccccgcttccggcgggaggtggagaagacagcctgccccagcggcaagaaggcccgggagattgatgagagcctcatcttctacaagaagtgggagctggaggcctgtgtggatgctgccctgctggccacccagatggacagagtgaatgccatccccttcacctatgagcagctggatgtgctgaagcacaagctggatgagctgtacccccagggctacccagagagcgtcatccagcacctgggctacctgttcctgaagatgagccctgaggacatcaggaagtggaatgtgaccagcctggagaccctgaaggccctgctggaggtgaacaagggccacgagatgagcccccaggtggccaccctgattgacagatttgtgaagggccggggccagctggacaaggacaccctggacaccctgacagccttctacccaggctacctgtgcagcctgagccctgaggagctgagctctgtgccccccagcagcatctgggccgtgcggccccaggacctggacacctgtgacccccggcagctggatgtgctgtaccccaaggcccggctggccttccagaacatgaatggcagcgagtactttgtgaagatccagagcttcctgggcggggcccccacagaggacctgaaggccctgagccagcagaatgtgtccatggacctggccaccttcatgaagctgaggacagatgctgtgctgcccctgactgtggccgaggtgcagaagctgctgggcccccacgtggagggcctgaaggccgaggagcggcacaggcctgtgcgggactggatcctgcggcagaggcaggatgacctggacaccctgggcctgggcctgcagggcggcatccccaacggctacctggtgctggacctgtccatgcaggaggccctgagcggcaccccctgcctgctgggccctggccctgtgctgactgtgctggccctgctgctggccagcaccctggcctag

SEQ ID NO: 159482 - DNA, 1893 bp, synthetic construct; identical to SEQ ID NO: 159480
  misc_feature 1..1893: note = Description of Artificial Sequence: Synthetic coding sequence
  source 1..1893: mol_type = other DNA

SEQ ID NO: 159483 - DNA, 1869 bp, synthetic construct; identical to SEQ ID NO: 159481
  misc_feature 1..1869: note = Description of Artificial Sequence: Synthetic coding sequence
  source 1..1869: mol_type = other DNA

SEQ ID NO: 159484 - DNA, 1869 bp, synthetic construct; identical to SEQ ID NO: 159481
  misc_feature 1..1869: note = Description of Artificial Sequence: Synthetic coding sequence
  source 1..1869: mol_type = other DNA

SEQ ID NO: 159485 - DNA, 1782 bp, synthetic construct
  misc_feature 1..1782: note = Description of Artificial Sequence: Synthetic coding sequence
  source 1..1782: mol_type = other DNA
atgagggacagcactggagctggcaacagcctggtgcacaagaggagccccctgcggaggaaccagaagacccccaccagcctgaccaagctgagcctgcaggacggccacaaggccaagaagccagcctgcaagtttgaggagggccaggatgtgctggcccgctggagcgatggcctcttctacctgggcaccatcaagaagatcaacatcctgaagcagagctgcttcatcatctttgaggacagcagcaagtcctgggtgctgtggaaggacatccagacaggagccaccggcagcggggagatggtgtgcaccatctgccaggaggagtacagcgaggccccaaatgagatggtgatctgtgacaagtgtggccagggctaccaccagctgtgccacaccccccacatcgactgcagcgtgattgacagtgatgagaagtggctgtgccggcagtgtgtgtttgccaccaccaccaagagaggaggagccctgaagaagggccccaatgccaaggccctgcaggtgatgaagcagaccctgccctacagcgtggccgacctggagtgggatgctggccacaagaccaacgtgcagcagtgctactgctactgcggcggccctggggactggtacctgaagatgctgcagtgctgcaagtgcaagcagtggttccacgaggcctgtgtgcagtgcctgcagaagcccatgctgtttggagaccgcttctacaccttcatctgcagcgtgtgcagcagcggccctgagtacctgaagaggctgcccctgcagtgggtggacatcgcccacctgtgcctgtacaacctgagcgtcatccacaagaagaagtactttgacagcgagctggagctgatgacctacatcaatgaaaactgggaccggctgcaccctggagagctggccgacacccccaagtcagaaagatatgaacatgtgctggaggccctgaatgactacaagaccatgttcatgtctgggaaggagatcaagaagaagaagcacctgtttggcctgcgcatccgggtgccccctgtgccccccaacgtggccttcaaggccgagaaggagcctgagggcaccagccatgagttcaagatcaagggcaggaaggccagcaagcccatcagtgacagccgggaggtgtccaatggaattgagaagaagggcaagaagaagtctgtgggccggcccccaggcccctacaccaggaagatgatccagaagacagctgagcccctgctggacaaggagagcatcagcgagaaccccaccctggacctgccctgcagcattggaagaacagagggcacagcccacagcagcaacaccagtgatgtggacttcaccggggccagcagcgccaaggagaccaccagcagcagcatcagccgccactacggcctgagtgacagcaggaagaggaccaggacaggccgctcctggccagctgccatcccccacctgcggaggagaagaggccgcctgccccggcgggccctgcagacccagaacagcgagatcgtgaaggatgatgagggcaaggaggactaccagtttgatgagctgaacacagagatcctgaacaacctggccgaccaggagctgcagctgaaccacctgaagaacagcatcaccagctactttggagctgctggccgcatcgcctgtggggagaagtacagagtgctggcccggcgggtgaccctggatggcaaggtgcagtacctggtggagtgggagggcgccacagccagctag

SEQ ID NO: 159486 - DNA, 1611 bp, synthetic construct
  misc_feature 1..1611: note = Description of Artificial Sequence: Synthetic coding sequence
  source 1..1611: mol_type = other DNA
atgagggacagcactggagctggcaacagcctggtgcacaagaggagccccctgcggaggaaccagaagacccccaccagcctgaccaagctgagcctgcaggacggccacaaggccaagaagccagcctgcaagtttgaggagggccaggatgtgctggcccgctggagcgatggcctcttctacctgggcaccatcaagaagatcaacatcctgaagcagagctgcttcatcatctttgaggacagcagcaagtcctgggtgctgtggaaggacatccagacaggagccaccggcagcggggagatggtgtgcaccatctgccaggaggagtacagcgaggccccaaatgagatggtgatctgtgacaagtgtggccagggctaccaccagctgtgccacaccccccacatcgactgcagcgtgattgacagtgatgagaagtggctgtgccggcagtgtgtgtttgccaccaccaccaagagaggaggagccctgaagaagggccccaatgccaaggccctgcaggtgatgaagcagaccctgccctacagcgtggccgacctggagtgggatgctggccacaagaccaacgtgcagcagtgctactgctactgcggcggccctggggactggtacctgaagatgctgcagtgctgcaagtgcaagcagtggttccacgaggcctgtgtgcagtgcctgcagaagcccatgctgtttggagaccgcttctacaccttcatctgcagcgtgtgcagcagcggccctgagtacctgaagaggctgcccctgcagtgggtggacatcgcccacctgtgcctgtacaacctgagcgtcatccacaagaagaagtactttgacagcgagctggagctgatgacctacatcaatgaaaactgggaccggctgcaccctggagagctggccgacacccccaagtcagaaagatatgaacatgtgctggaggccctgaatgactacaagaccatggaggtgtccaatggcatcgagaagaagggcaagaagaagtctgtgggccggcccccaggcccctacaccaggaagatgatccagaagacagctgagcccctgctggacaaggagagcatcagcgagaaccccaccctggacctgccctgcagcatcggccgcacagagggcacagcccacagcagcaacaccagtgatgtggacttcaccggggccagcagcgccaaggagaccaccagcagcagcatcagccgccactacggcctgagtgacagcaggaagaggaccaggacaggccgctcctggccagctgccatcccccacctgcggcggcggcggggccgcctgccccggcgggccctgcagacccagaacagcgagatcgtgaaggatgatgagggcaaggaggactaccagtttgatgagctgaacacagagatcctgaacaacctggccgaccaggagctgcagctgaaccacctgaagaacagcatcaccagctactttggagctgctggaagaattgcctgtggggagaagtacagagtgctggcccggcgggtgaccctggatggcaaggtgcagtacctggtggagtgggagggcgccacagccagctag

SEQ ID NO: 159487 - DNA, 861 bp, synthetic construct
  misc_feature 1..861: note = Description of Artificial Sequence: Synthetic coding sequence
  source 1..861: mol_type = other DNA
atggtgtgcaccatctgccaggaggagtacagcgaggccccaaatgagatggtgatctgtgacaagtgtggccagggctaccaccagctgtgccacaccccccacatcgactgcagcgtgattgacagtgatgagaagtggctgtgccggcagtgtgtgtttgccaccaccaccaagagaggaggagccctgaagaagggccccaatgccaaggccctgcaggtgatgaagcagaccctgccctacagcgtggccgacctggagtgggatgctggccacaagaccaacgtgcagcagtgctactgctactgcggcggccctggggactggtacctgaagatgctgcagtgctgcaagtgcaagcagtggttccacgaggcctgtgtgcagtgcctgcagaagcccatgctgtttggagaccgcttctacaccttcatctgcagcgtgtgcagcagcggccctgagtacctgaagaggctgcccctgcagtgggtggacatcgcccacctgtgcctgtacaacctgagcgtcatccacaagaagaagtactttgacagcgagctggagctgatgacctacatcaatgaaaactgggaccggctgcaccctggagagctggccgacacccccaagtcagaaagatatgaacatgtgctggaggccctgaatgactacaagaccatgttcatgtctgggaaggagatcaagaagaagaagcacctgtttggcctgcgcatccgggtgccccctgtgccccccaacgtggccttcaaggccgagaaggagcctgagggcaccagccatgagttcaagctgaaggccgagcggcaccccaacctgtacctgatccagggcaagtag

SEQ ID NO: 159488 - DNA, 1476 bp, synthetic construct
  misc_feature 1..1476: note = Description of Artificial Sequence: Synthetic coding sequence
  source 1..1476: mol_type = other DNA
atggtgtgcaccatctgccaggaggagtacagcgaggccccaaatgagatggtgatctgtgacaagtgtggccagggctaccaccagctgtgccacaccccccacatcgactgcagcgtgattgacagtgatgagaagtggctgtgccggcagtgtgtgtttgccaccaccaccaagagaggaggagccctgaagaagggccccaatgccaaggccctgcaggtgatgaagcagaccctgccctacagcgtggccgacctggagtgggatgctggccacaagaccaacgtgcagcagtgctactgctactgcggcggccctggggactggtacctgaagatgctgcagtgctgcaagtgcaagcagtggttccacgaggcctgtgtgcagtgcctgcagaagcccatgctgtttggagaccgcttctacaccttcatctgcagcgtgtgcagcagcggccctgagtacctgaagaggctgcccctgcagtgggtggacatcgcccacctgtgcctgtacaacctgagcgtcatccacaagaagaagtactttgacagcgagctggagctgatgacctacatcaatgaaaactgggaccggctgcaccctggagagctggccgacacccccaagtcagaaagatatgaacatgtgctggaggccctgaatgactacaagaccatgttcatgtctgggaaggagatcaagaagaagaagcacctgtttggcctgcgcatccgggtgccccctgtgccccccaacgtggccttcaaggccgagaaggagcctgagggcaccagccatgagttcaagatcaagggcaggaaggccagcaagcccatcagtgacagccgggaggtgtccaatggaattgagaagaagggcaagaagaagtctgtgggccggcccccaggcccctacaccaggaagatgatccagaagacagctgagcccctgctggacaaggagagcatcagcgagaaccccaccctggacctgccctgcagcattggaagaacagagggcacagcccacagcagcaacaccagtgatgtggacttcaccggggccagcagcgccaaggagaccaccagcagcagcatcagccgccactacggcctgagtgacagcaggaagaggaccaggacaggccgctcctggccagctgccatcccccacctgcggaggagaagaggccgcctgccccggcgggccctgcagacccagaacagcgagatcgtgaaggatgatgagggcaaggaggactaccagtttgatgagctgaacacagagatcctgaacaacctggccgaccaggagctgcagctgaaccacctgaagaacagcatcaccagctactttggagctgctggccgcatcgcctgtggggagaagtacagagtgctggcccggcgggtgaccctggatggcaaggtgcagtacctggtggagtgggagggcgccacagccagctag

SEQ ID NO: 159489 - DNA, 1476 bp, synthetic construct; identical to SEQ ID NO: 159488
  misc_feature 1..1476: note = Description of Artificial Sequence: Synthetic coding sequence
  source 1..1476: mol_type = other DNA

SEQ ID NO: 159490 - DNA, 1191 bp, synthetic construct
  misc_feature 1..1191: note = Description of Artificial Sequence: Synthetic coding sequence
  source 1..1191: mol_type = other DNA
atggccatgattgagctgggcttcggccggcagaacttccaccccctgaagaggaagagcagcctgctgctgaagctgattgctgtggtgtttgctgtgctgctcttctgtgagttcctgatctactacctggccatcttccagtgcaactggccagaggtgaagaccacagccagtgatggagagcagaccacccgggagcctgtgctgaaggccatgttcctggccgacacccacctgctgggggagttcctgggccactggctggacaagctgcggcgggagtggcagatggagcgggccttccagacagccctgtggctgctgcagcctgaggtggtgttcatcctgggggacatctttgatgagggcaagtggagcaccccagaggcctgggcagatgatgtggagcgcttccagaagatgttccgccaccccagccacgtgcagctgaaggtggtggccggcaaccacgacatcggcttccactatgagatgaacacctacaaggtggagagatttgagaaggtgttcagcagcgagcggctcttctcctggaagggcatcaactttgtgatggtgaacagcgtggccctgaatggagatggctgcggcatctgcagcgagacagaggccgagctgattgaggtgagccaccggctgaactgcagccgggaggcccggggcagcagccgctgtggccctggccccctgctgcccaccagcgcccctgtgctgctgcagcactaccccctgtaccgccgcagtgatgccaactgcagcggagaagatgctgccccagctgaggagcgggacatccccttcaaggaaaattatgatgtgctgagccgggaggccagccagaagctgctgtggtggctgcagccccggctggtgctgagcggccacacccacagcgcctgtgaggtgcaccacggcggccgggtgcctgagctgtctgtgcccagcttctcctggaggaacagaaacaaccccagcttcatcatgggcagcatcacccccacagactacaccctgagcaagtgctacctgccccgggaggatgtggtgctgatcatctactgcggcgtggtgggcttcctggtggtgctgaccctgacccacttcggcctgctggccagccccttcctgagcggcctgaacctgctgggcaagaggaagaccaggtag

SEQ ID NO: 159491 - DNA, 1002 bp, synthetic construct
  misc_feature 1..1002: note = Description of Artificial Sequence: Synthetic coding sequence
  source 1..1002: mol_type = other DNA
atggccatgattgagctgggcttcggccggcagaacttccaccccctgaagaggaagagcagcctgctgctgaagctgattgctgtggtgtttgctgtgctgctcttctgtgagttcctgatctactacctggccatcttccagtgcaactggccagaggtgaagaccacagccagtgatggagagcagaccacccgggagcctgtgctgaaggccatgttcctggccgacacccacctgctgggggagttcctgggccactggctggacaagctgcggcgggagtggcagatggagcgggccttccagacagccctgtggctgctgcagcctgaggtggtgttcatcctgggggacatctttgatgagggcaagtggagcaccccagaggcctgggcagatgatgtggagcgcttccagaagatgttccgccaccccagccacgtgcagctgaaggtggtggccggcaaccacgacatcggcttccactatgagatgaacacctacaaggtggagagatttgagaaggtgttcagcagcgagcggctcttctcctggaagggcatcaactttgtgatggtgaacagcgtggccctgaatggagatggctgcggcatctgcagcgagacagaggccgagctgattgaggtgagccaccggctgaactgcagccgggagctgctgtggtggctgcagccccggctggtgctgagcggccacacccacagcgcctgtgaggtgcaccacggcggccgggtgcctgagctgtctgtgcccagcttctcctggaggaacagaaacaaccccagcttcatcatgggcagcatcacccccacagactacaccctgagcaagtgctacctgcccagagaagatgtggtgctgatcatctactgcggcgtggtgggcttcctggtggtgctgaccctgacccacttcggcctgctggccagccccttcctgagcggcctgaacctgctgggcaagaggaagaccaggtag

SEQ ID NO: 159492 - DNA, 732 bp, synthetic construct
  misc_feature 1..732: note = Description of Artificial Sequence: Synthetic coding sequence
  source 1..732: mol_type = other DNA
atggagcgggccttccagacagccctgtggctgctgcagcctgaggtggtgttcatcctgggggacatctttgatgagggcaagtggagcaccccagaggcctgggcagatgatgtggagcgcttccagaagatgttccgccaccccagccacgtgcagctgaaggtggtggccggcaaccacgacatcggcttccactatgagatgaacacctacaaggtggagagatttgagaaggtgttcagcagcgagcggctcttctcctggaagggcatcaactttgtgatggtgaacagcgtggccctgaatggagatggctgcggcatctgcagcgagacagaagctgagctgattgaggtgagccaccggctgaactgcagccgggaggcccggggcagcagccgctgtggccctggccccctgctgcccaccagcgcccctgtgctgctgcagcactaccccctgtacagaagaagtgatgccaactgcagcggggaggatgctgccccagctgaggagcgggacatccccttcaaggagaactatgatgtgctgagccgggaggccagccagaagctgctgtggtggctgcagccccggctggtgctgagcggccacacccacagcgcctgtgaggtgcaccacggcggccgggtgcctgagctgtctgtgcccagcttctcctggaggaacagaaacaaccccagcttcatcatgggcacagatgcctag

SEQ ID NO: 159493 - DNA, 1194 bp, synthetic construct
  misc_feature 1..1194: note = Description of Artificial Sequence: Synthetic coding sequence
  source 1..1194: mol_type = other DNA
atggccatgattgagctgggcttcggccggcagaacttccaccccctgaagaggaagagcagcctgctgctgaagctgattgctgtggtgtttgctgtgctgctcttctgtgagttcctgatctactacctggccatcttccagtgcaactggccagaggtgaagaccacagccagtgatggagagcagaccacccgggagcctgtgctgaaggccatgttcctggccgacacccacctgctgggggagttcctgggccactggctggacaagctgcggcgggagtggcagatggagcgggccttccagacagccctgtggctgctgcagcctgaggtggtgttcatcctgggggacatctttgatgagggcaagtggagcaccccagaggcctgggcagatgatgtggagcgcttccagaagatgttccgccaccccagccacgtgcagctgaaggtggtggccggcaaccacgacatcggcttccactatgagatgaacacctacaaggtggagagatttgagaaggtgttcagcagcgagcggctcttctcctggaagggcatcaactttgtgatggtgaacagcgtggccctgaatggagatggctgcggcatctgcagcgagacagaggccgagctgattgaggtgagccaccggctgaactgcagccgggagcaggcccggggcagcagccgctgtggccctggccccctgctgcccaccagcgcccctgtgctgctgcagcactaccccctgtacagaagaagtgatgccaactgcagcggggaggatgctgccccagctgaggagcgggacatccccttcaaggagaactatgatgtgctgagccgggaggccagccagaagctgctgtggtggctgcagccccggctggtgctgagcggccacacccacagcgcctgtgaggtgcaccacggcggccgggtgcctgagctgtctgtgcccagcttctcctggaggaacagaaacaaccccagcttcatcatgggcagcatcacccccacagactacaccctgagcaagtgctacctgcccagagaagatgtggtgctgatcatctactgcggcgtggtgggcttcctggtggtgctgaccctgacccacttcggcctgctggccagccccttcctgagcggcctgaacctgctgggcaagaggaagaccaggtag

SEQ ID NO: 159494 - DNA, 1026 bp, synthetic construct
  misc_feature 1..1026: note = Description of Artificial Sequence: Synthetic coding sequence
  source 1..1026: mol_type = other DNA
atggccatgattgagctgggcttcggccggcagaacttccaccccctgaagaggaagagcagcctgctgctgaagctgattgctgtggtgtttgctgtgctgctcttctgtgagttcctgatctactacctggccatcttccagtgcaactggccagaggtgaagaccacagccagtgatggagagcagaccacccgggagcctgtgctgaaggccatgttcctggccgacacccacctgctgggggagttcctgggccactggctggacaagctgcggcgggagtggcagatggagcgggccttccagacagccctgtggctgctgcagcctgaggtggtgttcatcctgggggacatctttgatgagggcaagtggagcaccccagaggcctgggcagatgatgtggagcgcttccagaagatgttccgccaccccagccacgtgcagctgaaggtggtggccggcaaccacgacatcggcttccactatgagatgaacacctacaaggtggagagatttgagaaggtgttcagcagcgagcggctcttctcctggaagggcatcaactttgtgatggtgaacagcgtggccctgaatggagatggctgcggcatctgcagcgagacagaggccgagctgattgaggtgagccaccggctgaactgcagccgggagcaggcccggggcagcagccgctgtggccctggccccctgctgcccaccagcgcccctgtgctgctgcagcactaccccctgtacagaagaagtgatgccaactgcagcggggaggatgctgccccagctgaggagcgggacatccccttcaaggagaactatgatgtgctgagccgggaggccagccagaagctgctgtggtggctgcagccccggctggtgctgagcggccacacccacagcgcctgtgaggtgcaccacggcggccgggtgcctgagctgtctgtgcccagcttctcctggaggaacagaaacaaccccagcttcatcatgggcacagatgcctag

SEQ ID NO: 159495 - DNA, 1191 bp, synthetic construct; identical to SEQ ID NO: 159490
  misc_feature 1..1191: note = Description of Artificial Sequence: Synthetic coding sequence
  source 1..1191: mol_type = other DNA

SEQ ID NO: 159496 - DNA, 360 bp, synthetic construct
  misc_feature 1..360: note = Description of Artificial Sequence: Synthetic coding sequence
  source 1..360: mol_type = other DNA
atgtggaggagccgctgggatgcctctgtgctgaaggccgaggccctggccctgctgccctgtggcctgggcatggccttcagccagagccacgtgatggccgcccggcggcaccagcacagccgcctcatcatcgaggtggatgagtacagcagcaaccccacccaggccttcaccttctacaacatcaaccagggccgcttccagcccccccacgtgcagatggtggaccctgtgccccatgatgcccccaagcccccaggctacaccaggtttgtgtgtgtgtctgacacccacagcaggacagaccccatccagatgccctatggagatgtgctgattcatgctggggacttctag

SEQ ID NO: 159497 - DNA, 663 bp, synthetic construct
  misc_feature 1..663: note = Description of Artificial Sequence: Synthetic coding sequence
  source 1..663: mol_type = other DNA
atgccctatggagatgtgctgattcatgctggggacttcacagagctgggcctgcccagcgaggtgaagaagttcaatgagtggctgggcagcctgccctatgagtacaagatcgtgattgctggcaaccacgagctgacctttgaccaggagttcatggctgacctgatcaagcaggacttctactacttccccagcgtgtccaagctgaagccagaaaattatgaaaatgtgcagagcctgctgaccaactgcatctacctgcaggacagcgaggtgacagtgcggggcttccgcatctacggcagcccctggcagccctggttctacggctggggcttcaacctgccccggggccaggccctgctggagaagtggaacctgatccctgagggcgtggacatcctgatcacccacggcccccccctgggcttcctggactgggtgcccaagaagatgcagagggtgggctgtgtggagctgctgaacacagtgcagaggagagtgcagccccggctgcacgtgtttggccacatccacgagggctatggagtgatggctgatggcaccaccacctacgtgaatgcctctgtgtgcaccgtgaactaccagcctgtgaacccccccatcgtcatcgacctgcccacccccaggaacagctag

SEQ ID NO: 159498 - DNA, 981 bp, synthetic construct
  misc_feature 1..981: note = Description of Artificial Sequence: Synthetic coding sequence
  source 1..981: mol_type = other DNA
atgtggaggagccgctgggatgcctctgtgctgaaggccgaggccctggccctgctgccctgtggcctgggcatggccttcagccagagccacgtgatggccgcccggcggcaccagcacagccgcctcatcatcgaggtggatgagtacagcagcaaccccacccaggccttcaccttctacaacatcaaccagggccgcttccagcccccccacgtgcagatggtggaccctgtgccccatgatgcccccaagcccccaggctacaccaggtttgtgtgtgtgtctgacacccacagcaggacagaccccatccagatgccctatggagatgtgctgattcatgctggggacttcacagagctgggcctgcccagcgaggtgaagaagttcaatgagtggctgggcagcctgccctatgagtacaagatcgtgattgctggcaaccacgagctgacctttgaccaggagttcatggctgacctgatcaagcaggacttctactacttccccagcgtgtccaagctgaagccagaaaattatgaaaatgtgcagagcctgctgaccaactgcatctacctgcaggacagcgaggtgacagtgcggggcttccgcatctacggcagcccctggcagccctggttctacggctggggcttcaacctgccccggggccaggccctgctggagaagtggaacctgatccctgagggcgtggacatcctgatcacccacggcccccccctgggcttcctggactgggtgcccaagaagatgcagagggtgggctgtgtggagctgctgaacacagtgcagaggagagtgcagccccggctgcacgtgtttggccacatccacgagggctatggagtgatggctgatggcaccaccacctacgtgaatgcctctgtgtgcaccgtgaactaccagcctgtgaacccccccatcgtcatcgacctgcccacccccaggaacagctag

SEQ ID NO: 159499 - DNA, 507 bp, synthetic construct
  misc_feature 1..507: note = Description of Artificial Sequence: Synthetic coding sequence
  source 1..507: mol_type = other DNA
atggctgacctgatcaagcaggacttctactacttccccagcgtgtccaagctgaagccagaaaattatgaaaatgtgcagagcctgctgaccaactgcatctacctgcaggacagcgaggtgacagtgcggggcttccgcatctacggcagcccctggcagccctggttctacggctggggcttcaacctgccccggggccaggccctgctggagaagtggaacctgatccctgagggcgtggacatcctgatcacccacggcccccccctgggcttcctggactgggtgcccaagaagatgcagagggtgggctgtgtggagctgctgaacacagtgcagaggagagtgcagccccggctgcacgtgtttggccacatccacgagggctatggagtgatggctgatggcaccaccacctacgtgaatgcctctgtgtgcaccgtgaactaccagcctgtgaacccccccatcgtcatcgacctgcccacccccaggaacagctag

SEQ ID NO: 159500 - DNA, 981 bp, synthetic construct; identical to SEQ ID NO: 159498
  misc_feature 1..981: note = Description of Artificial Sequence: Synthetic coding sequence
  source 1..981: mol_type = other DNA

SEQ ID NO: 159501 - DNA, 225 bp, synthetic construct
  misc_feature 1..225: note = Description of Artificial Sequence: Synthetic coding sequence
  source 1..225: mol_type = other DNA
atgtggaggagccgctgggatgcctctgtgctgaaggccgaggccctggccctgctgccctgtggcctgggcatggccttcagccagagccacgtgatggccgcccggcggcaccagcacagccgcctcatcatcgaggtggatgagtacagcagcaaccccacccaggccttcaccttctacaacatcaaccagggccgcttccagcccccccacgtgcagtag

SEQ ID NO: 159502 - DNA, 1080 bp, synthetic construct
  misc_feature 1..1080: note = Description of Artificial Sequence: Synthetic coding sequence
  source 1..1080: mol_type = other DNA
atgaatggccgggagacccagagcgtgagccgcagcggcggcggccctggctgcggcggcggcagcggcggccgctgccggggcggcagaagaagatccatgtggaggagccgctgggatgcctctgtgctgaaggccgaggccctggccctgctgccctgtggcctgggcatggccttcagccagagccacgtgatggccgcccggcggcaccagcacagccgcctcatcatcgaggtggatgagtacagcagcaaccccacccaggccttcaccttctacaacatcaaccagggccgcttccagccccctcatgtgcagatggtggaccctgtgccccatgatgcccccaagcccccaggctacaccaggtttgtgtgtgtgtctgacacccacagcaggacagaccccatccagatgccctatggagatgtgctgattcatgctggggacttcacagagctgggcctgcccagcgaggtgaagaagttcaatgagtggctgggcagcctgccctatgagtacaagatcgtgattgctggcaaccacgagctgacctttgaccaggagttcatggctgacctgatcaagcaggacttctactacttccccagcgtgtccaagctgaagccagagaactatgaaaatgtgcagagcctgctgaccaactgcatctacctgcaggacagcgaggtgacagtgcggggcttccgcatctacggcagcccctggcagccctggttctacggctggggcttcaacctgccccggggccaggccctgctggagaagtggaacctgatccctgagggcgtggacatcctgatcacccacggcccccccctgggcttcctggactgggtgcccaagaagatgcagagggtgggctgtgtggagctgctgaacacagtgcagaggagagtgcagccccggctgcacgtgtttggccacatccacgagggctacggcgtgatggctgatggcaccaccacctacgtgaatgcctctgtgtgcaccgtgaactaccagcctgtgaacccccccatcgtgattgacctgcccaccccaagaaacagctag

SEQ ID NO: 159503 - DNA, 981 bp, synthetic construct; identical to SEQ ID NO: 159498
  misc_feature 1..981: note = Description of Artificial Sequence: Synthetic coding sequence
  source 1..981: mol_type = other DNA

SEQ ID NO: 159504 - DNA, 915 bp, synthetic construct
  misc_feature 1..915: note = Description of Artificial Sequence: Synthetic coding sequence
  source 1..915: mol_type = other DNA
atgtggaggagcttcagccagagccacgtgatggccgcccggcggcaccagcacagccgcctcatcatcgaggtggatgagtacagcagcaaccccacccaggccttcaccttctacaacatcaaccagggccgcttccagcccccccacgtgcagatggtggaccctgtgccccatgatgcccccaagcccccaggctacaccaggtttgtgtgtgtgtctgacacccacagcaggacagaccccatccagatgccctatggagatgtgctgattcatgctggggacttcacagagctgggcctgcccagcgaggtgaagaagttcaatgagtggctgggcagcctgccctatgagtacaagatcgtgattgctggcaaccacgagctgacctttgaccaggagttcatggctgacctgatcaagcaggacttctactacttccccagcgtgtccaagctgaagccagaaaattatgaaaatgtgcagagcctgctgaccaactgcatctacctgcaggacagcgaggtgacagtgcggggcttccgcatctacggcagcccctggcagccctggttctacggctggggcttcaacctgccccggggccaggccctgctggagaagtggaacctgatccctgagggcgtggacatcctgatcacccacggcccccccctgggcttcctggactgggtgcccaagaagatgcagagggtgggctgtgtggagctgctgaacacagtgcagaggagagtgcagccccggctgcacgtgtttggccacatccacgagggctatggagtgatggctgatggcaccaccacctacgtgaatgcctctgtgtgcaccgtgaactaccagcctgtgaacccccccatcgtcatcgacctgcccacccccaggaacagctag

SEQ ID NO: 159505 - DNA, 885 bp, synthetic construct
  misc_feature 1..885: note = Description of Artificial Sequence: Synthetic coding sequence
  source 1..885: mol_type = other DNA
atggcccacggcatccccagccagggcaaggtgaccatcaccgtggatgagtacagcagcaaccccacccaggccttcacccactacaacatcaaccagagccgcttccagcccccccacgtgcacatggtggaccccatcccctatgacacccccaagccagctggccacaccaggtttgtgtgcatcagtgacacccacagcaggacagatggcatccagatgccctatggagacatcctgctgcacactggagacttcacagagctgggcctgcccagcgaggtgaagaagttcaatgactggctgggcaacctgccctatgagtacaagatcgtgattgctggcaaccacgagctgacctttgacaaggagttcatggctgacctggtgaagcaggactactaccgcttccccagcgtgtccaagctgaagccagaagattttgacaacgtgcagagcctgctgaccaacagcatctacctgcaggacagcgaggtgacagtgaagggcttccgcatctatggagccccctggaccccctggttcaacggctggggcttcaacctgccccggggccagagcctgctggacaagtggaacctgatccctgagggcatcgacatcctgatgacccacggcccccccctgggcttccgggactgggtgcccaaggagctgcagagggtgggctgtgtggagctgctgaacacagtgcagaggagagtgcggcccaagctgcacgtgtttggaggcatccacgagggctacggcatcatgacagatggctacaccacctacatcaatgccagcacctgcaccgtgtccttccagcccaccaacccccccatcatctttgacctgcccaacccccagggcagctag

SEQ ID NO: 159506 - DNA, 834 bp, synthetic construct
  misc_feature 1..834: note = Description of Artificial Sequence: Synthetic coding sequence
  source 1..834: mol_type = other DNA
atggcccacggcatccccagccagggcaaggtgaccatcaccgtggatgagtacagcagcaaccccacccaggccttcacccactacaacatcaaccagagccgcttccagcccccccacgtgcacatggtggaccccatcccctatgacacccccaagccagctggccacaccaggtttgtgtgcatcagtgacacccacagcaggacagatggcatccagatgccctatggagacatcctgctgcacactggagacttcacagagctgggcctgcccagcgaggtgaagaagttcaatgactggctgggcaacctgccctatgagtacaagatcgtgattgctggcaaccacgagctgacctttgacaaggagttcatggctgacctggtgaagcaggactactaccgcttccccagcgtgtccaagctgaagccagaagattttgacaacgtgcagagcctgctgaccaacagcatctacctgcaggacagcgaggtgacagtgaagggcttccgcatctatggagccccctggaccccctggttcaacggctggggcttcaacctgccccggggccagagcctgctggacaagtggaacctgatccctgagggcatcgacatcctgatgacccacggcccccccctgggcttccgggactgggtgcccaaggagctgcagagggtgggctgtgtggagctgctgaacacagtgcagaggagagtgcggcccaagctgcacgtgtttggaggcatccacgaggtgaaccctgtgtccatcagcaaggccctgcggaccaagatctgcagcctgcccagcaagaccagctag

SEQ ID NO: 159507 - DNA, 132 bp, synthetic construct
  misc_feature 1..132: note = Description of Artificial Sequence: Synthetic coding sequence
  source 1..132: mol_type = other DNA
atggcccacggcatccccagccagggcaaggtgaccatcaccgtggatgagtacagcagcaaccccacccaggccttcacccactacaacatcaaccagagccgcttccagcccccccacgtgcacatgtag

SEQ ID NO: 159508 - DNA, 186 bp, synthetic construct
  misc_feature 1..186: note = Description of Artificial Sequence: Synthetic coding sequence
  source 1..186: mol_type = other DNA
atggaccccaactgcagctgtgccactggaggcagctgcacctgcaccggcagctgcaagtgcaaggagtgcaagtgcaccagctgcaagaagagctgctgcagctgctgccccatgagctgtgccaagtgtgcccagggctgcatctgcaagggggccagcgagaagtgcagctgctgtgcctag

SEQ ID NO: 159509 - DNA, 186 bp, synthetic construct
  misc_feature 1..186: note = Description of Artificial Sequence: Synthetic coding sequence
  source 1..186: mol_type = other DNA
atggaccccaactgcagctgcaccactggaggcagctgtgcctgtgccggcagctgcaagtgcaaggagtgcaagtgcaccagctgcaagaagtgctgctgcagctgctgccctgtgggctgtgccaagtgtgcccagggctgtgtgtgcaagggcagcagcgagaagtgccgctgctgtgcctag

SEQ ID NO: 159510 - DNA, 186 bp, synthetic construct
  misc_feature 1..186: note = Description of Artificial Sequence: Synthetic coding sequence
  source 1..186: mol_type = other DNA
atggaccccaactgcagctgtgccactggaggcagctgcacctgtgccggcagctgcaagtgcaaggagtgcaagtgcaccagctgcaagaagagctgctgcagctgctgccctgtgggctgtgccaagtgtgcccagggctgtgtgtgcaagggggccagcgagaagtgcagctgctgtgcctag

SEQ ID NO: 159511 - DNA, 384 bp, synthetic construct
  misc_feature 1..384: note = Description of Artificial Sequence: Synthetic coding sequence
  source 1..384: mol_type = other DNA
atggaccccaactgcagctgtgccactggaggcagctgcacctgtgccggcagctgcaagtgcaaggagtgcaagtgcaccagctgcaagaagtcagaatgtggggccatcagcaggaacctgggcctgtggctgcggctgggcggcaacagccggctggccctgagcgccagcttctggggcaccggcctgagcctgcccagcctgcctgtgtccttccccctgcaggccttctgccccaagttccgctggggccgcacagccttcttctcctgggacaccaaccccaactgcaccccctacggcttcagaacagagctgtgccagaccaagaagagcatcctgtgggtgtgggtgctgagcagcagccaggcctgctactag

SEQ ID NO: 159512 - DNA, 186 bp, synthetic construct
  misc_feature 1..186: note = Description of Artificial Sequence: Synthetic coding sequence
  source 1..186: mol_type = other DNA
atggaccccaactgcagctgtgccgccggcgtgtcctgcacctgtgccggcagctgcaagtgcaaggagtgcaagtgcaccagctgcaagaagagctgctgcagctgctgccctgtgggctgcagcaaatgtgcccagggctgtgtgtgcaagggggccagcgagaagtgcagctgctgtgactag

SEQ ID NO: 159513 - DNA, 189 bp, synthetic construct
  misc_feature 1..189: note = Description of Artificial Sequence: Synthetic coding sequence
  source 1..189: mol_type = other DNA
atggaccccaactgcagctgtgccgccgccggcgtgtcctgcacctgtgccggcagctgcaagtgcaaggagtgcaagtgcaccagctgcaagaagagctgctgcagctgctgccctgtgggctgcagcaaatgtgcccagggctgtgtgtgcaagggggccagcgagaagtgcagctgctgtgactag

SEQ ID NO: 159514 - DNA, 189 bp, synthetic construct
  misc_feature 1..189: note = Description of Artificial Sequence: Synthetic coding sequence
  source 1..189: mol_type = other DNA
atggaccccaactgcagctgtgccgccgccggcgtgtcctgcacctgtgccagcagctgcaagtgcaaggagtgcaagtgcaccagctgcaagaagagctgctgcagctgctgccctgtgggctgtgccaagtgtgcccagggctgcatctgcaagggggccagcgagaagtgcagctgctgtgcctag

SEQ ID NO: 159515 - DNA, 186 bp, synthetic construct
  misc_feature 1..186: note = Description of Artificial Sequence: Synthetic coding sequence
  source 1..186: mol_type = other DNA
atggaccccaactgcagctgtgccgccggcgtgtcctgcacctgtgccagcagctgcaagtgcaaggagtgcaagtgcaccagctgcaagaagagctgctgcagctgctgccctgtgggctgtgccaagtgtgcccagggctgcatctgcaagggggccagcgagaagtgcagctgctgtgcctag

SEQ ID NO: 159516 - DNA, 186 bp, synthetic construct
  misc_feature 1..186: note = Description of Artificial Sequence: Synthetic coding sequence
  source 1..186: mol_type = other DNA
atggaccccaactgcagctgtgaggccggcggcagctgtgcctgtgccggcagctgcaagtgcaagaagtgcaagtgcaccagctgcaagaagagctgctgcagctgctgccccctgggctgtgccaagtgtgcccagggctgcatctgcaagggggccagcgagaagtgcagctgctgtgcctag

SEQ ID NO: 159517 - DNA, 186 bp, synthetic construct
  misc_feature 1..186: note = Description of Artificial Sequence: Synthetic coding sequence
  source 1..186: mol_type = other DNA
atggaccccaactgcagctgcagccctgtgggcagctgtgcctgtgccggcagctgcaagtgcaaggagtgcaagtgcaccagctgcaagaagagctgctgcagctgctgccctgtgggctgtgccaagtgtgcccagggctgcatctgcaagggcaccagtgacaagtgcagctgctgtgcctag

SEQ ID NO: 159518 - DNA, 186 bp, synthetic construct
  misc_feature 1..186: note = Description of Artificial Sequence: Synthetic coding sequence
  source 1..186: mol_type = other DNA
atggaccccaactgcagctgtgccgccggggacagctgcacctgtgccggcagctgcaagtgcaaggagtgcaagtgcaccagctgcaagaagagctgctgcagctgctgccctgtgggctgtgccaagtgtgcccagggctgcatctgcaagggggccagtgacaagtgcagctgctgtgcctag

SEQ ID NO: 159519 - DNA, 207 bp, synthetic construct
  misc_feature 1..207: note = Description of Artificial Sequence: Synthetic coding sequence
  source 1..207: mol_type = other DNA
atggaccctgagacctgcccctgccccagcggcggcagctgcacctgtgccgacagctgcaagtgtgagggctgcaagtgcaccagctgcaagaagagctgctgcagctgctgcccagcagaatgtgagaagtgtgccaaggactgtgtgtgcaagggcggggaggccgctgaggccgaggccgagaagtgcagctgctgccagtag

SEQ ID NO: 159520 - DNA, 687 bp, synthetic construct
  misc_feature 1..687: note = Description of Artificial Sequence: Synthetic coding sequence
  source 1..687: mol_type = other DNA
atgaagatcaagccaggcttcatgggcaaggccaccccaccctatgatgtgcagttccacatggaggcctctgtggagaactgcatcatcgtgtccatgaacacagctgaccccggcagccagggcatcacccacagcctgctgctgcaggtgattgatgacaagggcagcatcctgccccccaacacagagggcaacatcggcatccgcatcaagcctgtgcggcctgtgtccctcttcatgtgctatgaaggagaccctgagaagacagccaaggtggagtgtggggacttctacaacacaggagaccggggcaagatggatgaggagggctacatctgcttcctgggccgcagtgatgacatcatcaatgccagcggctaccgcatcggccctgctgaggtggagagcgccctggtggagcaccctgctgtggccgagagcgctgtggtgggcagcccagaccccatccggggggaggtggtgaaggccttcatcgtgctgaccccccagttcctgagccatgacaaggaccagctgaccaaggagctgcagcagcacgtgaagtctgtgacagccccctacaagtaccccaggaaggtggagtttgtgtctgagctgcccaagaccatcaccgggaagattgaaaggaaggagctgaggaagaaggagaccggccagatgtag

SEQ ID NO: 159521 - DNA, 1527 bp, synthetic construct
  misc_feature 1..1527: note = Description of Artificial Sequence: Synthetic coding sequence
  source 1..1527: mol_type = other DNA
atggaggagggccccctgcccggcggcctgcccagcccagaagatgccatggtgacagagctgctgagccctgagggcccctttgcctctgaaaatattggcctgaaggcccctgtgaagtatgaagaagatgagttccacgtgttcaaggaggcctacctgggccctgctgaccccaaggagcctgtgctgcacgccttcaacccagccctgggcgctgactgcaagggccaggtgaaggccaagctggccggcggggacagtgatggaggagagctgctgggggagtacccaggcatccctgagctgagcgccctggaggatgtggccctgctgcaggccccccagcccccagcctgcaatgtgcacttcctgagcagcctgctgcctgcccacaggagccctgctgtgctgcccctgggcgcctgggtgctggagggcgccagccaccctggggtgaggatgatccctgtggagatcaaggaggccggcggcaccaccaccagcaacaaccctgaggaggccaccctgcagaacctgctggcccaggagagctgctgcaagttccccagcagccaggagctggaggatgccagctgctgcagcctgaagaaggacagcaaccccatggtgatctgccagctgaagggcggcacccagatgctgtgcatcgacaacagcaggacccgggagctgaaggccctgcacctggtgccccagtaccaggaccagaacaactacctgcagagtgatgtgcccaagcccatgacagccctggtgggccgcttcctgcctgccagcaccaagctgaacctgatcacccagcagctggagggcgccctgcccagcgtggtgaatggcagcgccttccccagcggcagcaccctgcccggcccccccaagatcaccctggccggctactgtgactgctttgccagcggggacttctgcaacaactgcaactgcaacaactgctgcaacaacctgcaccacgacatcgagcgcttcaaggccatcaaggcctgcctgggcagaaatcctgaggccttccagcccaagattggcaagggccagctgggcaatgtgaagccccagcacaacaagggctgcaactgcagaagaagtggctgcctgaagaactactgtgaatgttatgaggcccagatcatgtgcagcagcatctgcaagtgcatcggctgcaagaactatgaggagagccctgagaggaagaccctgatgtccatgcccaactacatgcagacaggaggcctggagggcagccactacctgccccccaccaagttcagcggcctgccccgcttcagccatgacagaagacccagcagctgcatctcctgggaggtggtggaggccacctgtgcctgcctgctggcccagggcgaggaggccgagaaggagcactgcagcaagtgcctggccgagcagatgatcctggaggagtttggccgctgcctgagccagatcctgcacacagagttcaagagcaagggcctgaagatggagtag

SEQ ID NO: 159522 - DNA, 756 bp, synthetic construct
  misc_feature 1..756: note = Description of Artificial Sequence: Synthetic coding sequence
  source 1..756: mol_type = other DNA
atggaggagggccccctgcccggcggcctgcccagcccagaagatgccatggtgacagagctgctgagccctgagggcccctttgcctctgaaaatattggcctgaaggcccctgtgaagtatgaagaagatgagttccacgtgttcaaggaggcctacctgggccctgctgaccccaaggagcctgtgctgcacgccttcaacccagccctgggcgctgactgcaagggccaggtgaaggccaagctggccggcggggacagtgatggaggagagctgctgggggagtacccaggcatccctgagctgagcgccctggaggatgtggccctgctgcaggccccccagcccccagcctgcaatgtgcacttcctgagcagcctgctgcctgcccacaggagccctgctgtgctgcccctgggcgcctgggtgctggagggcgccagccaccctggggtgaggatgatccctgtggagatcaaggaggccggcggcaccaccaccagcaacaaccctgaggaggccaccctgcagaacctgctggcccaggagagctgctgcaagttccccagcagccaggagctggaggatgccagctgctgcagcctgaagaaggacagcaaccccatggtgatctgccagctgaagggcggcacccagatgctgtgcatcgacaacagcaggacccgggagctgaaggccctgcacctggtgccccagtaccaggaccagaacaactacctgcagagcgcctag

SEQ ID NO: 159523 - DNA, 921 bp, synthetic construct
  misc_feature 1..921: note = Description of Artificial Sequence: Synthetic coding sequence
  source 1..921: mol_type = other DNA
atggaggagggccccctgcccggcggcctgcccagcccagaagatgccatggtgacagagctgctgagccctgagggcccctttgcctctgaaaatattggcctgaaggcccctgtgaagtatgaagaagatgagttccacgtgttcaaggaggcctacctgggccctgctgaccccaaggagcctgtgctgcacgccttcaacccagccctgggcgctgactgcaagggccaggtgaaggccaagctggccggcggggacagtgatggaggagagctgctgggggagtacccaggcatccctgagctgagcgccctggaggatgtggccctgctgcaggccccccagcccccagcctgcaatgtgcacttcctgagcagcctgctgcctgcccacaggagccctgctgtgctgcccctgggcgcctgggtgctggagggcgccagccaccctggggtgaggatgatccctgtggagatcaaggaggccggcggcaccaccaccagcaacaaccctgaggaggccaccctgcagaacctgctggcccaggagagctgctgcaagttccccagcagccaggagctggaggatgccagctgctgcagcctgaagaaggacagcaaccccatggtgatctgccagctgaagggcggcacccagatgctgtgcatcgacaacagcaggacccgggagctgaaggccctgcacctggtgccccagtaccaggaccagaacaactacctgcagagtgatgtgcccaagcccatgacagccctggtgggccgcttcctgcctgccagcaccaagctgaacctgatcacccagcagctggagggcgccctgcccagcgtggtgaatggcagcgccttccccagcggcagcaccctgcccggcccccccaagatcaccctggccggctag

SEQ ID NO: 159524 - DNA, 2262 bp, synthetic construct
  misc_feature 1..2262: note = Description of Artificial Sequence: Synthetic coding sequence
  source 1..2262: mol_type = other DNA
atgggagagcacagcccagacaacaacatcatctactttgaagcagaagaagatgagctgaccccagatgacaagatgctgcgctttgtggacaagaatggcctggtgcccagcagcagcggcaccgtgtatgacaggaccaccgtgctgattgagcaggaccccggcaccctggaggatgaagatgatgatggccagtgtggggagcacctgcccttcctggtgggcggggaggagggcttccacctgattgaccacgaggccatgagccagggctacgtgcagcacatcatcagcccagaccagatccacctgaccatcaaccctggcagcacccccatgcccaggaacatcgagggcgccaccctgaccctgcagagcgagtgcccagagaccaagaggaaggaggtgaagcgctaccagtgcacctttgagggctgccccaggacctacagcacagctggcaacctgcggacccaccagaagacccacagaggagagtacacctttgtgtgcaaccaggagggctgcggcaaggccttcctgaccagctacagcctgcgcatccacgtgcgggtgcacaccaaggagaagccctttgaatgtgatgtgcagggctgtgagaaggccttcaacaccctgtaccgcctgaaggcccaccagaggctgcacacaggcaagaccttcaactgtgagagcgagggctgcagcaagtacttcaccaccctgagtgacctgaggaagcacatccgcacccacactggagagaagcccttccgctgtgaccatgatggctgtgggaaggcctttgctgccagccaccacctgaagacccacgtgaggacccacactggagagcggcccttcttctgccccagcaatggctgtgagaagaccttcagcacccagtacagcctgaagagccacatgaagggccatgacaacaagggccacagctacaatgccctgccccagcacaatggaagtgaggacaccaaccacagcctgtgcctgagtgacctgagcctgctgagcacagacagcgagctgcgggagaacagcagcaccacccagggccaggacctgagcaccatcagccctgccatcatctttgagagcatgttccagaacagtgatgacacagccatccaggaggacccccagcagacagccagcctgacagagagcttcaatggagatgctgagagcgtgtctgatgtgccccccagcactggaaacagcgccagcctgagcctgcccctggtgctgcagcccggcctgtctgagcccccccagcccctgctgcctgccagcgcccccagcgcccctcctccagcccccagcctgggccctggcagccagcaggccgccttcggcaaccccccagccctgctgcagcccccagaggtgcctgtgccccacagcacccagtttgctgccaaccaccaggagttcctgccccacccccaggccccccagcccatcgtgcccggcctgtctgtggtggccggggccagcgccagcgctgctgctgtggccagcgctgtggccgccccagccccaccccagagcaccacagagcccctgcctgccatggtgcagaccctgcccctgggcgccaacagcgtgctgaccaacaaccccaccatcaccatcacccccacccccaacacagccatcctgcagagcagcctggtgatgggagagcagaacctgcagtggatcctgaatggagccaccagcagcccccagaaccaggagcagatccagcaggccagcaaggtggagaaggtgttcttcaccacagctgtgcctgtggccagcagccctggcagctctgtgcagcagatcggcctgtctgtgcctgtgatcatcatcaagcaggaggaggcctgccagtgccagtgtgcctgccgggacagcgccaaggagcgggccagcagcaggaggaagggctgcagcagccccccacctcctgagcccagcccccaggccccagatggccccagcctgcagctgcctgcccagaccttcagcagcgcccctgtgcccggcagcagcagcagcaccctgcccagcagctgtgagcagagccggcaggccgagacccccagcgacccccagacagagaccctgagcgccatggatgtgtctgagttcctgagcctgcagagcctggacacccccagcaacctgatccccatcgaggccctgctgcagggcgaggaggagatgggcctgaccagcagcttcagcaagtag

SEQ ID NO: 159525 - DNA, 603 bp, synthetic construct
  misc_feature 1..603: note = Description of Artificial Sequence: Synthetic coding sequence
  source 1..603: mol_type = other DNA
aagcagagccaggtgaagcgctaccagtgcacctttgagggctgccccaggacctacagcacagctggcaacctgcggacccaccagaagacccacagaggagagtacacctttgtgtgcaaccaggagggctgcggcaaggccttcctgaccagctacagcctgcgcatccacgtgcgggtgcacaccaaggagaagccctttgaatgtgatgtgcagggctgtgagaaggccttcaacaccctgtaccgcctgaaggcccaccagaggctgcacacaggcaagaccttcaactgtgagagcgagggctgcagcaagtacttcaccaccctgagtgacctgaggaagcacatccgcacccacactggagagaagcccttccgctgtgaccatgatggctgtgggaaggcctttgctgccagccaccacctgaagacccacgtgaggacccacactggagagcggcccttcttctgccccagcaatggctgtgagaagaccttcagcacccagtacagcctgaagagccacatgaagggccatgacaacaagggccacagctacaatgccctgccccagcacaatggaagtgagagcacctag

SEQ ID NO: 159526 - DNA, 2559 bp, synthetic construct
  misc_feature 1..2559: note = Description of Artificial Sequence: Synthetic coding sequence
  source 1..2559: mol_type = other DNA
atgctgatcacagagaggaagcacttccgcagcggccgcatcgcccagagcatgtctgaggccaacctgattgacatggaggccggcaagctgagcaagagctgcaacatcacagagtgccaggaccctgacctgctgcacaactggccagatgccttcaccctgcggggcaacaatgccagcaaggtggccaaccccttctggaaccagctgagcgccagcaaccccttcctggatgacatcacccagctgaggaacaacaggaagaggaacaacatcagcatcctgaaggaggaccccttcctgttctgccgggagattgaaaatggaaacagctttgacagcagtggagatgagctggatgtgcaccagctgctgcggcagaccagcagcaggaacagcggccgcagcaagtctgtgtctgagctgctggacatcctggatgacacagcccacgcccaccagagcatccacaacagcgaccagatcctgctgcatgacctggagtggctgaagaatgaccgggaggcctacaagatggcctggctgagccagaggcagctggcccggagctgcctggacctgaacaccatcagccagagccctggctgggcccagacccagctggccgaggtgaccatcgcctgcaaggtgaaccaccagggcggctctgtgcagctgcctgagagtgacatcaccgtgcacgtgccccagggccacgtggccgtgggggagttccaggaggtgtccctgcgggccttcctggaccccccccacatgctgaaccacgacctgagctgcaccgtgagccccctgctggagatcatgctgggcaacctgaacaccatggaggccctgctgctggagatgaagatcggggctgaggtgaggaaggaccccttcagccaggtgatgacagagatggtgtgcctgcacagcctgggcaaggagggccccttcaaggtgctgagcaactgctacatctacaaggacaccatccaggtgaagctgattgacctgagccaggtgatgtacctggtggtggccgcccaggccaaggccctgcccagccctgctgccaccatctgggactacatccacaagaccaccagcatcggcatctacggccccaagtacatccaccccagcttcaccgtggtgctgactgtgtgtggccacaactacatgcctggccagctgaccatcagtgacatcaagaagggcggcaagaacatcagccctgtggtgttccagctgtggggcaagcagagcttcctgctggacaagccccaggacctgagcatcagcatcttcagctgtgaccctgactttgaggtgaagacagaaggagagaggaaggagatcaagcagaagcagctggaggccggggaggtggtgcaccagcagttcctgttcagcctggtggagcaccgggagatgcacctgtttgacttctgtgtgcaggtggagcccccaaatggagagcctgtggcccagttcagcatcaccaccccagaccccacccccaacctgaagaggctgagcaacctgcccggctacctgcagaagaaggaggagatcaagagcgcccccctgagccccaagatcctggtgaagtaccccaccttccaggacaagaccctgaacttcagcaactatggagtgaccctgaaggctgtgctgcggcagagcaagattgactacttcctggagtacttcaagggggacaccatcgccctgctgggggagggcaaggtgaaggccatcggccagagcaaggtgaaggagtggtacgtgggcgtgctgcggggcaagattggcctggtgcactgcaagaatgtgaaggtgatcagcaaggagcaggtgatgttcatgtctgacagcgtcttcaccaccaggaacctgctggagcagatcgtgctgcccctgaagaagctgacctacatctacagcgtggtgctgaccctggtgtctgagaaggtgtatgactggaaggtgctggctgatgtgctgggctacagccacctgagcctggaggactttgaccagatccaggccgacaaggagagcgagaaggtgtcctatgtgatcaagaagctgaaggaggactgccacacagagaggaacaccaggaagttcctgtatgagctgattgtggccctgctgaagatggactgccaggagctggtggcccggctcatccaggaggccgctgtgctgaccagcgctgtgaagctgggcaagggctggagggagctggccgagaagctggtgcggctgaccaagcagcagatggaggcctatgagatcccccaccggggcaacacaggagatgtggccgtggagatgatgtggaagccagcctatgacttcctgtacacctggagcgcccactacggcaacaactacagagatgtgctgcaggacctgcagagcgccctggacaggatgaagaaccctgtgaccaagcactggagggagctgactggagtgctgatcctggtgaacagcctggaggtgctgcgggtgacagccttcagcaccagcgaggaggtgtag

SEQ ID NO: 159527 - DNA, 2559 bp, synthetic construct; identical to SEQ ID NO: 159526
  misc_feature 1..2559: note = Description of Artificial Sequence: Synthetic coding sequence
  source 1..2559: mol_type = other DNA

SEQ ID NO: 159528 - DNA, 1308 bp, synthetic construct
  misc_feature 1..1308: note = Description of Artificial Sequence: Synthetic coding sequence
  source 1..1308: mol_type = other DNA
atgctgctgggcggcccccccaggagccccaggagcggcaccagccccaagggcccctggagcagcactggacatgtgcagtttgggaagagcccccagacctggcccaggaggacccggcccaggagccctgagcctgctgcccccagcggcgtgcggggcagcacctggacccggcggcgggacaccccaagaagagctggccccacagccctgagccgctacgtgggccacctgtggatgggcagaagaccacccagccctgaggcccggggccctgtgcccaggagcagcgctgccagccgggcccggcgcagcctggccagccctggcatcagccctggccccctgacagccaccatcggcggcgctgtggccggcggcggcccccggcagggccgggcagaggcccacaaggaggtgtttcctggccagagggtgggcaagatggccgcccccatggagctgttctgctggagcggcggctggggcctgcccagcgtggacctggacagcctggccgtgctgacctacgcccgcttcaccggggcccccctgaaggtgcacaagatcagcaacccctggcagagccccagcggcaccctgcctgccctgcggaccagccatggagaggtgatctctgtgccccacaagatcatcacccacctgaggaaggaggtgcacaccttctggattgacaccaagaactacgtggaggtgaccaggaagtggtacgccgaggccatgcccttccccctgaacttcttcctgcccggccgcatgcagaggcagtacatggagcggctgcagctgctgactggagagcacaggccagaagatgaggaggagctggagaaggagctgtaccgggaggcccgggagtgcctgaccctgctgagccagaggctgggcagccagaagttcttctttggagatgccccagccagcctggatgcctttgtgttctcctacctggccctgctgctgcaggccaagctgcccagcggcaagctgcaggtgcacctgcggggcctgcacaacctgtgtgcctactgcacccacatcctgagcctgtacttcccctgggatggagctgaggtgcccccccagaggcagaccccagctggccctgagacagaggaggagccctacagaagaagaaaccagatcctgtctgtgctggccggcctggccgccatggtgggctacgccctgctgtctggaattgtgtccatccagagggccaccccagcccgggcccctggcaccaggaccctgggcatggccgaggaggatgaggaggagtag

SEQ ID NO: 159529 - DNA, 1401 bp, synthetic construct
  misc_feature 1..1401: note = Description of Artificial Sequence: Synthetic coding sequence
  source 1..1401: mol_type = other DNA
atgctgctgggcggcccccccaggagccccaggagcggcaccagccccaagggcccctggagcagcactggacatgtgcagtttgggaagagcccccagacctggcccaggaggacccggcccaggagccctgagcctgctgcccccagcggcgtgcggggcagcacctggacccggcggcgggacaccccaagaagagctggccccacagccctgagccgctacgtgggccacctgtggatgggcagaagaccacccagccctgaggcccggggccctgtgcccaggagcagcgctgccagccgggcccggcgcagcctggccagccctggcatcagccctggccccctgacagccaccatcggcggcgctgtggccggcggcggcccccggcagggccgggcagaggcccacaaggaggtgtttcctggccagagggtgggcaagatggccgcccccatggagctgttctgctggagcggcggctggggcctgcccagcgtggacctggacagcctggccgtgctgacctacgcccgcttcaccggggcccccctgaaggtgcacaagatcagcaacccctggcagagccccagcggcaccctgcctgccctgcggaccagccatggagaggtgatctctgtgccccacaagatcatcacccacctgaggaaggagaagtacaatgctgactatgacctgagcgcccggcagggcgctgacaccctggccttcatgagcctgctggaggagaagctgctgcctgtgctggtgcacaccttctggattgacaccaagaactacgtggaggtgaccaggaagtggtatgcagaggccatgcccttccccctgaacttcttcctgcccggccgcatgcagaggcagtacatggagcggctgcagctgctgaccggggagcacaggccagaagatgaggaggagctggagaaggagctgtaccgggaggccagagaatgtctgaccctgctgagccagaggctgggcagccagaagttcttctttggagatgccccagccagcctggatgcctttgtgttctcctacctggccctgctgctgcaggccaagctgcccagcggcaagctgcaggtgcacctgcggggcctgcacaacctgtgtgcctactgcacccacatcctgagcctgtacttcccctgggatggagctgaggtgcccccccagaggcagaccccagctggccctgagacagaggaggagccctacagaagaagaaaccagatcctgtctgtgctggccggcctggccgccatggtgggctacgccctgctgagcggcatcgtgtccatccagagggccaccccagcccgggcccctggcaccaggaccctgggcatggccgaggaggatgaggaggagtag

SEQ ID NO: 159530 - DNA, 951 bp, synthetic construct
  misc_feature 1..951: note = Description of Artificial Sequence: Synthetic coding sequence
  source 1..951: mol_type = other DNA
tgagaaggaggccaggacggcggggcccacggggctgtgctgctggtgcggggcctgggcgctgctgtgtctggccctggccagcccggccgggctgacctgtgccagatctactggtgcagcacagagggcacccaggaccagcagcccctggccgagcccttccgctaccctgtgtccctgggcggcaccctgcctgccctgcggaccagccacggggaggtgatctctgtgccccacaagatcatcacccacctgaggaaggagaagtacaatgctgactatgacctgagcgcccggcagggcgctgacaccctggccttcatgagcctgctggaggagaagctgctgcctgtgctggtgcacaccttctggattgacaccaagaactacgtggaggtgaccaggaagtggtacgccgaggccatgcccttccccctgaacttcttcctgcccggccgcatgcagaggcagtacatggagcggctgcagctgctgactggagagcacaggccagaagatgaggaggagctggagaaggagctgtaccgggaggcccgggagtgcctgaccctgctgagccagaggctgggcagccagaagttcttctttggagatgccccagccagcctggatgcctttgtgttctcctacctggccctgctgctgcaggccaagctgcccagcggcaagctgcaggtgcacctgcggggcctgcacaacctgtgtgcctactgcacccacatcctgagcctgtacttcccctgggatggagctgaggtgcccccccagaggcagaccccagctggccctgagacagaggaggagccctacagaagaagaaaccagatcctgtctgtgctggccggcctggccgccatggtgggctacgccctgctgtctggaattgtgtccatccagagggccaccccagcccgggcccctggatag

SEQ ID NO: 159531 - DNA, 1188 bp, synthetic construct
  misc_feature 1..1188: note = Description of Artificial Sequence: Synthetic coding sequence
  source 1..1188: mol_type = other DNA
atgaatggacctgtggatggcctgtgtgaccacagcctgtctgagggcgtcttcatgttcaccagcgagagcgtgggggagggccacccagacaagatctgtgaccagatcagtgatgctgtgctggatgcccacctgaagcaggaccccaatgccaaggtggcctgtgagaccgtgtgcaagacaggcatggtgctgctgtgtggggagatcacctccatggccatggtggactaccagagggtggtgcgggacaccatcaagcacatcggctatgatgattctgccaagggctttgacttcaagacctgcaatgtgctggtggccctggagcagcagagcccagacatcgcccagtgtgtgcacctggacagaaatgaggaggatgtgggcgctggggaccagggcctgatgtttggctacgccacagatgaaacagaggagtgcatgcccctgaccatcatcctggcccacaagctgaatgccaggatggctgacctgcggcgcagcggcctgctgccctggctgcggccagacagcaagacccaggtgacagtgcagtacatgcaggacaacggggccgtcatccctgtgcgcatccacaccatcgtcatctctgtgcagcacaatgaagacatcaccctggaggagatgagaagagccctgaaggagcaggtgatccgggctgtggtgcctgccaagtacctggatgaggacacagtgtaccacctgcagcccagcggccgcttcgtcatcggcggcccccagggagatgctggggtgacaggcaggaagatcatcgtggacacctatggaggctggggcgcccatggaggaggagccttcagcggcaaggactacaccaaggtggacagatctgctgcctatgctgcccgctgggtggccaagagcctggtgaaggccggcctgtgccggcgggtgctggtgcaggtgtcctatgccatcggcgtggccgagcccctgagcatcagcatcttcacctacggcaccagccagaagacagagcgggagctgctggatgtggtgcacaagaactttgacctgcggcctggggtcatcgtgcgggacctggacctgaagaagcccatctaccagaagacagcctgctacggccacttcggccgctctgagttcccctgggaggtgcccaggaagctggtgttctag

SEQ ID NO: 159532 - DNA, 1188 bp, synthetic construct; identical to SEQ ID NO: 159531
  misc_feature 1..1188: note = Description of Artificial Sequence: Synthetic coding sequence
  source 1..1188: mol_type = other DNA

SEQ ID NO: 159533 - DNA, 438 bp, synthetic construct
  misc_feature 1..438: note = Description of Artificial Sequence: Synthetic coding sequence
  source 1..438: mol_type = other DNA
gagagcgtgggggagggccacccagacaagatctgtgaccagatcagtgatgctgtgctggatgcccacctgaagcaggaccccaatgccaaggtggcctgtggctttgacttcaagacctgcaatgtgctggtggccctggagcagcagagcccagacatcgcccagtgtgtgcacctggacagaaatgaagaagatgtgggcgctggggaccagggcctgatgtttggctacgccacagatgaaacagaggagtgcatgcccctgaccatcatcctggcccacaagctgaatgccaggatggctgacctgcggcgcagcggcctgctgccctggctgcggccagacagcaagacccaggtgacagtgcagtacatgcaggacaatggagctgtgattcctgtgcgcatccacaccatcgtcatctctgtgcagtag

SEQ ID NO: 159534 - DNA, 1188 bp, synthetic construct
  misc_feature 1..1188: note = Description of Artificial Sequence: Synthetic coding sequence
  source 1..1188: mol_type = other DNA
atgaatggccagctgaatggcttccacgaggccttcatcgaggagggcaccttcctgttcaccagcgagagcgtgggggagggccacccagacaagatctgtgaccagatcagtgatgctgtgctggatgcccacctgcagcaggaccctgatgccaaggtggcctgtgagaccgtggccaagacaggcatgatcctgctggccggggagatcaccagcagagctgctgtggactaccagaaggtggtgcgggaggccgtgaagcacatcggctatgatgacagcagcaaaggatttgactacaagacctgcaatgtgctggtggccctggagcagcagagcccagacatcgcccagggcgtgcacctggacagaaatgaggaggacatcggggccggggaccagggcctgatgtttggctacgccacagatgaaacagaggagtgcatgcccctgaccatcgtgctggcccacaagctgaatgccaagctggccgagctgcggagaaatggcaccctgccctggctgcggccagacagcaagacccaggtgacagtgcagtacatgcaggacagaggagctgtgctgcccatccgggtgcacaccatcgtcatctctgtgcagcatgatgaggaggtgtgcctggatgagatgagagatgccctgaaggagaaggtgatcaaggctgtggtgcctgccaagtacctggatgaggacaccatctaccacctgcagcccagcggccgcttcgtcatcggcggcccccagggagatgctggcctgaccggcaggaagatcatcgtggacacctatggaggctggggcgcccatggaggaggagccttcagcggcaaggactacaccaaggtggacagatctgctgcctatgctgcccgctgggtggccaagagcctggtgaagggcggcctgtgccggcgggtgctggtgcaggtgtcctatgccatcggcgtgagccaccccctgagcatcagcatcttccactacggcaccagccagaagtctgagcgggagctgctggagatcgtgaagaagaactttgacctgcggcctggggtcatcgtgcgggacctggacctgaagaagcccatctaccagaggacagctgcctacggccacttcggccgggacagcttcccctgggaggtgcccaagaagctgaagtactag

SEQ ID NO: 159535 - DNA, 531 bp, synthetic construct
  misc_feature 1..531: note = Description of Artificial Sequence: Synthetic coding sequence
  source 1..531: mol_type = other DNA
atgaatggccagctgaatggcttccacgaggccttcatcgaggagggcaccttcctgttcaccagcgagagcgtgggggagggccacccagacaagatctgtgaccagattggagatgctggcctgactggaaggaagatcatcgtggacacctacggcggctggggcgcccacggcggcggggccttcagcggcaaggactacaccaaggtggacagatctgctgcctatgctgcccgctgggtggccaagagcctggtgaagggcggcctgtgcagaagagtgctggtgcaggtgtcctatgccatcggcgtgagccaccccctgagcatcagcatcttccactacggcaccagccagaagtctgagcgggagctgctggagatcgtgaagaagaactttgacctgcggcctggggtgattgtgcgggacctggacctgaagaagcccatctaccagaggacagctgcctacggccacttcggccgggacagcttcccctgggaggtgcccaagaagctgaagtactag

SEQ ID NO: 159536 - DNA, 549 bp, synthetic construct
  misc_feature 1..549: note = Description of Artificial Sequence: Synthetic coding sequence
  source 1..549: mol_type = other DNA
atggcccggctgctgtggctgctgcggggcctgaccctgggcacagccccccggcgggctgtgcggggccaggccggcggcggcggccctggcaccggccctggcctgggggaggccggcagcctggccacctgtgagctgcccctggccaagtctgagtggcagaagaagctgaccccagagcagttctacgtgacccgggagaagggcacagagccccccttcagcggcatctacctgaacaacaaggaggccggcatgtaccactgtgtgtgctgtgacagccccctcttcagcagcgagaagaagtactgcagcggcaccggctggcccagcttcagcgaggcccacggcaccagcggcagtgatgagagccacacaggcatcctgcggcggctggacaccagcctgggcagcgccaggacagaggtggtgtgcaagcagtgtgaggcccacctgggccacgtgtttcctgatggccctggccccaacggccagcgcttctgcatcaacagcgtggccctgaagttcaagcccaggaagcactag

SEQ ID NO: 159537 - DNA, 558 bp, synthetic construct
  misc_feature 1..558: note = Description of Artificial Sequence: Synthetic coding sequence
  source 1..558: mol_type = other DNA
atgtctgccttcaacctgctgcacctggtgaccaagagccagcctgtggccctgcgggcctgtggcctgcccagcggcagctgccgggacaagaagaactgcaaggtggtgttcagccagcaggagctgaggaagaggctgacccccctgcagtaccacgtgacccaggagaagggcacagagagcgcctttgaaggagagtacacccaccacaaggaccccggcatctacaagtgtgtggtgtgtggcacccccctcttcaagtctgagaccaagtttgattctggcagcggctggcccagcttccatgatgtgatcaacagcgaggccatcaccttcacagatgacttctcctatggcatgcaccgggtggagaccagctgcagccagtgtggggcccacctgggccacatctttgatgatggcccccggcccaccgggaagcgctactgcatcaacagcgctgccctgtccttcaccccagctgacagcagcggcacagctgagggcggcagcggcgtggccagccctgcccaggccgacaaggccgagctgtag

SEQ ID NO: 159538 - DNA, 579 bp, synthetic construct
  misc_feature 1..579: note = Description of Artificial Sequence: Synthetic coding sequence
  source 1..579: mol_type = other DNA
atgagccccaggaggaccctgccccggcccctgagcctgtgcctgagcctgtgcctgtgcctgtgcctggccgccgccctgggcagcgcccagagcggcagctgccgggacaagaagaactgcaaggtggtgttcagccagcaggagctgaggaagaggctgacccccctgcagtaccacgtgacccaggagaagggcacagaaagtgcctttgaaggagagtacacccaccacaaggaccccggcatctacaagtgtgtggtgtgtggcacccccctcttcaagtctgagaccaagtttgacagcggcagcggctggcccagcttccatgatgtgatcaacagcgaggccatcaccttcacagatgacttctcctatggcatgcaccgggtggagaccagctgcagccagtgtggggcccacctgggccacatctttgatgatggcccccggcccaccgggaagcgctactgcatcaacagcgctgccctgtccttcaccccagctgacagcagcggcacagctgagggcggcagcggcgtggccagccctgcccaggccgacaaggccgagctgtag

SEQ ID NO: 159539 - DNA, 495 bp, synthetic construct
  misc_feature 1..495: note = Description of Artificial Sequence: Synthetic coding sequence
  source 1..495: mol_type = other DNA
atgtctgccttcaacctgctgcacctggtgaccaagagccagcctgtggccctgcgggcctgtggcctgcccagcggcagctgccgggacaagaagaactgcaaggtggtgttcagccagcaggagctgaggaagaggctgacccccctgcagtaccacgtgacccaggagaagggcacagagagcgcctttgaaggagagtacacccaccacaaggaccccggcatctacaagtgtgtggtgtgtggcacccccctcttcaagtctgagaccaagtttgattctggcagcggctggcccagcttccatgatgtgatcaacagcgaggccatcaccttcacagatgacttctcctatggcatgcaccgggtggagaccagctgcagccagtgtggggcccacctgggccacatctttgatgatggcccccggcccaccgggaagcgctactgcatcaacagcgctgccctgtccttcaccccagctgacagctag

SEQ ID NO: 159540 - DNA, 558 bp, synthetic construct; identical to SEQ ID NO: 159537
  misc_feature 1..558: note = Description of Artificial Sequence: Synthetic coding sequence
  source 1..558: mol_type = other DNA

SEQ ID NO: 159541 - DNA, 354 bp, synthetic construct
  misc_feature 1..354: note = Description of Artificial Sequence: Synthetic coding sequence
  source 1..354: mol_type = other DNA
atgtctgccttcaacctgctgcacctggtgaccaagagccagcctgtggccctgcgggcctgtggcctgcccagcggcagctgccgggacaagaagaactgcaaggtggtgttcagccagcaggagctgaggaagaggctgacccccctgcagtaccacgtgacccaggagaagggcacagagagcgcctttgaaggagagtacacccaccacaaggaccccggcatctacaagtgtgtggtgtgtggcacccccctcttcaagtctgagaccaagtttgattctggcagcggctggcccagcttccatgatgtgatcaacagcgaggccatcaccttcacagatgacttctag

SEQ ID NO: 159542 - DNA, 2703 bp, synthetic construct
  misc_feature 1..2703: note = Description of Artificial Sequence: Synthetic coding sequence
  source 1..2703: mol_type = other DNA
atgaggctgtttgtgtctgatggagtgcccggctgcctgcctgtgctggccgctgctggccgggcccggggccgggcagaggtgctgatcagcacagtgggccctgaggactgtgtggtgcccttcctgacccggcccaaggtgcctgtgctgcagctggacagcggcaactacctgttcagcaccagcgccatctgccgctacttcttcctgctgagcggctgggagcaggatgacctgaccaaccagtggctggagtgggaggccacagagctgcagcctgccctgtctgctgccctgtactacctggtggtgcagggcaagaagggagaagatgtgctgggctctgtgcggcgggccctgacccacatcgaccacagcctgagccggcagaactgccccttcctggccggggagacagagagcctggccgacatcgtgctgtggggcgccctgtaccccctgctgcaggaccctgcctacctgcctgaggagctgagcgccctgcacagctggttccagaccctgagcacccaggagccctgccagagagctgctgagaccgtgctgaagcagcagggcgtgctggccctgcggccctacctgcagaagcagccccagcccagccctgctgagggccgggctgtgaccaatgaacctgaggaggaggagctggccaccctgtctgaggaggagatcgccatggctgtgacagcctgggagaagggcctggagagcctgccccccctgcggccccagcagaaccctgtgctgcctgtggccggggagagaaatgtgctgatcaccagcgccctgccctacgtgaacaacgtgccccacctgggcaacatcatcggctgtgtgctgtctgcagatgtgtttgcccgctacagccggctgcggcagtggaacaccctgtacctgtgtggcacagatgaatatggaacagccacagagaccaaggccctggaggagggcctgaccccccaggagatctgtgacaagtaccacatcatccatgctgacatctaccgctggttcaacatcagctttgacatcttcggccgcaccaccaccccccagcagaccaagatcacccaggacatcttccagcagctgctgaagaggggctttgtgctgcaggacacagtggagcagctgcgctgtgagcactgtgcccgcttcctggccgacagatttgtggagggcgtgtgccccttctgtggctatgaggaggcccggggggaccagtgtgacaagtgtgggaagctgatcaatgctgtggagctgaagaagccccagtgcaaggtgtgccgcagctgccctgtggtgcagagcagccagcacctgttcctggacctgcccaagctggagaagaggctggaggagtggctgggccgcaccctgcccggcagtgactggaccccaaatgcccagttcatcaccaggtcctggctgagagatggcctgaagccccgctgcatcacccgggacctgaagtggggcacccctgtgcccctggagggctttgaggacaaggtgttctacgtgtggtttgatgccaccatcggctacctgagcatcacagccaactacacagaccagtgggagcgctggtggaagaaccctgagcaggtggacctgtaccagttcatggccaaggacaacgtgcccttccacagcctggtgttcccctgcagcgccctgggcgctgaggacaactacaccctggtgagccacctgattgccacagagtacctgaactatgaagatggcaagttcagcaagagcagaggagtgggcgtgtttggagacatggcccaggacaccggcatcccagctgacatctggaggttctacctgctgtacatccggcctgagggccaggacagcgccttctcctggacagacctgctgctgaagaacaacagcgagctgctgaacaacctgggcaacttcatcaacagagctggcatgtttgtgtccaagttctttggaggctacgtgcctgagatggtgctgaccccagatgaccagaggctgctggcccacgtgaccctggagctgcagcactaccaccagctgctggagaaggtgcgcatcagagatgccctgcggagcatcctgaccatcagccgccacggcaaccagtacatccaggtgaatgagccctggaagaggatcaagggcagcgaggccgaccggcagagagctggcaccgtgacaggcctggccgtgaacattgctgccctgctgtctgtgatgctgcagccctacatgcccaccgtgtctgccaccatccaggcccagctgcagctgcccccaccagcctgcagcatcctgctgaccaacttcctgtgcaccctgcctgctggccaccagattggaacagtgagccccctcttccagaagctggagaatgaccagatcgagagcctgcggcagagatttggaggcggccaggccaagaccagccccaagccagctgtggtggagaccgtgaccacagccaagccccagcagatccaggccctgatggatgaggtgaccaagcagggcaacatcgtgcgggagctgaaggcccagaaggctgacaagaatgaggtggccgctgaggtggccaagctgctggacctgaagaagcagctggccgtggccgagggcaagcccccagaggcccccaagggcaagaagaagaagtag

SEQ ID NO: 159543 - DNA, 1908 bp, synthetic construct
  misc_feature 1..1908: note = Description of Artificial Sequence: Synthetic coding sequence
  source 1..1908: mol_type = other DNA
atggctgtgacagcctgggagaagggcctggagagcctgccccccctgcggccccagcagaaccctgtgctgcctgtggccggggagagaaatgtgctgatcaccagcgccctgccctacgtgaacaacgtgccccacctgggcaacatcatcggctgtgtgctgtctgcagatgtgtttgcccgctacagccggctgcggcagtggaacaccctgtacctgtgtggcacagatgaatatggaacagccacagagaccaaggccctggaggagggcctgaccccccaggagatctgtgacaagtaccacatcatccatgctgacatctaccgctggttcaacatcagctttgacatcttcggccgcaccaccaccccccagcagaccaagatcacccaggacatcttccagcagctgctgaagaggggctttgtgctgcaggacacagtggagcagctgcgctgtgagcactgtgcccgcttcctggccgacagatttgtggagggcgtgtgccccttctgtggctatgaggaggcccggggggaccagtgtgacaagtgtgggaagctgatcaatgctgtggagctgaagaagccccagtgcaaggtgtgccgcagctgccctgtggtgcagagcagccagcacctgttcctggacctgcccaagctggagaagaggctggaggagtggctgggccgcaccctgcccggcagtgactggaccccaaatgcccagttcatcaccaggtcctggctgagagatggcctgaagccccgctgcatcacccgggacctgaagtggggcacccctgtgcccctggagggctttgaggacaaggtgttctacgtgtggtttgatgccaccatcggctacctgagcatcacagccaactacacagaccagtgggagcgctggtggaagaaccctgagcaggtggacctgtaccagttcatggccaaggacaacgtgcccttccacagcctggtgttcccctgcagcgccctgggcgctgaggacaactacaccctggtgagccacctgattgccacagagtacctgaactatgaagatggcaagttcagcaagagcagaggagtgggcgtgtttggagacatggcccaggacaccggcatcccagctgacatctggaggttctacctgctgtacatccggcctgagggccaggacagcgccttctcctggacagacctgctgctgaagaacaacagcgagctgctgaacaacctgggcaacttcatcaacagagctggcatgtttgtgtccaagttctttggaggctacgtgcctgagatggtgctgaccccagatgaccagaggctgctggcccacgtgaccctggagctgcagcactaccaccagctgctggagaaggtgcgcatcagagatgccctgcggagcatcctgaccatcagccgccacggcaaccagtacatccaggtgaatgagccctggaagaggatcaagggcagcgaggccgaccggcagagagctggcaccgtgacaggcctggccgtgaacattgctgccctgctgtctgtgatgctgcagccctacatgcccaccgtgtctgccaccatccaggcccagctgcagctgcccccaccagcctgcagcatcctgctgaccaacttcctgtgcaccctgcctgctggccaccagattggaacagtgagccccctcttccagaagctggagaatgaccagatcgagagcctgcggcagagatttggaggcggccaggtgaggaagctgaaggctgtgcccagcctgcacaacagccacagcatcaccagcctcatcagcctgagcagcccccaccccagcctcttccccagctttggacctgctgccagcagcctgaccgtcttcctgagctgcctgaactag

SEQ ID NO: 159544 - DNA, 1641 bp, synthetic construct
  misc_feature 1..1641: note = Description of Artificial Sequence: Synthetic coding sequence
  source 1..1641: mol_type = other DNA
atgaggctgtttgtgtctgatggagtgcccggctgcctgcctgtgctggccgctgctggccgggcccggggccgggcagaggtgctgatcagcacagtgggccctgaggactgtgtggtgcccttcctgacccggcccaaggtgcctgtgctgcagctggacagcggcaactacctgttcagcaccagcgccatctgccgctacttcttcctgctgagcggctgggagcaggatgacctgaccaaccagtggctggagtgggaggccacagagctgcagcctgccctgtctgctgccctgtactacctggtggtgcagggcaagaagggagaagatgtgctgggctctgtgcggcgggccctgacccacatcgaccacagcctgagccggcagaactgccccttcctggccggggagacagagagcctggccgacatcgtgctgtggggcgccctgtaccccctgctgcaggaccctgcctacctgcctgaggagctgagcgccctgcacagctggttccagaccctgagcacccaggagccctgccagagagctgctgagaccgtgctgaagcagcagggcgtgctggccctgcggccctacctgcagaagcagccccagcccagccctgctgagggccgggctgtgaccaatgaacctgaggaggaggagctggccaccctgtctgaggaggagatcgccatggctgtgacagcctgggagaagggcctggagagcctgccccccctgcggccccagcagaaccctgtgctgcctgtggccggggagagaaatgtgctgatcaccagcgccctgccctacgtgaacaacgtgccccacctgggcaacatcatcggctgtgtgctgtctgcagatgtgtttgcccgctacagccggctgcggcagtggaacaccctgtacctgtgtggcacagatgaatatggaacagccacagagaccaaggccctggaggagggcctgaccccccaggagatctgtgacaagtaccacatcatccatgctgacatctaccgctggttcaacatcagctttgacatcttcggccgcaccaccaccccccagcagaccaagatcacccaggacatcttccagcagctgctgaagaggggctttgtgctgcaggacacagtggagcagctgcgctgtgagcactgtgcccgcttcctggccgacagatttgtggagggcgtgtgccccttctgtggctatgaggaggcccggggggaccagtgtgacaagtgtgggaagctgatcaatgctgtggagctgaagaagccccagtgcaaggtgtgccgcagctgccctgtggtgcagagcagccagcacctgttcctggacctgcccaagctggagaagaggctggaggagtggctgggccgcaccctgcccggcagtgactggaccccaaatgcccagttcatcaccaggtcctggctgagagatggcctgaagccccgctgcatcacccgggacctgaagtggggcacccctgtgcccctggagggctttgaggacaaggtgttctacgtgtggtttgatgccaccatcggctacctgagcatcacagccaactacacagaccagtgggagcgctggtggaagaaccctgagcagccctag

SEQ ID NO: 159545 - DNA, 1782 bp, synthetic construct
  misc_feature 1..1782: note = Description of Artificial Sequence: Synthetic coding sequence
  source 1..1782: mol_type = other DNA
atgctgcggacctctgtgctgcggctgctgggccgcactggagccagccggctgagcctgctggaggactttggcccccgctactacagcagcggcagcctgtctgctggagatgatgcctgtgatgtgcgggcctacttcaccacccccatcttctacgtgaatgctgccccccacatcggccacctgtacagcgccctgctggctgatgccctgtgccgccaccggcggctgcggggccccagcacagctgccacccgcttcagcactggaacagatgaacatggcctgaagatccagcaggccgccgccacagctggcctggcccccacagagctgtgtgacagagtgtctgagcagttccagcagctgttccaggaggccggcatcagctgcacagacttcatccgcaccacagaggcccggcaccgggtggccgtgcagcacttctggggcgtgctgaagagccggggcctgctgtacaagggcgtgtatgagggctggtactgtgccagtgatgagtgcttcctgcctgaggccaaggtgacccagcagcccggccccagcggggacagcttccctgtgtccctggagagcggccaccctgtgtcctggaccaaggaggagaactacatcttccggctgagccagttcaggaagcccctgcagcgctggctgcggggcaacccccaggccatcaccccagagcccttccaccacgtggtgctgcagtggctggatgaggagctgcctgacctgtctgtgtccagaagaagcagccacctgcactggggcatccctgtgcctggagatgacagccagaccatctacgtgtggctggatgccctggtgaactacctgaccgtcatcggctacccaaatgctgagttcaagtcctggtggccagccaccagccacatcatcggcaaggacatcctgaagttccacgccatctactggccagccttcctgctgggcgccggcatgagccccccccagaggatctgtgtgcacagccactggacagtgtgtggccagaagatgagcaagagcctgggcaatgtggtggaccccaggacctgcctgaaccgctacacagtggatggcttccgctacttcctgctgcggcagggcgtgcccaactgggactgtgactactatgatgagaaggtggtgaagctgctgaacagcgagctggctgatgccctgggcggcctgctgaaccgctgcacagccaagaggatcaaccccagcgagacctacccagccttctgcaccacctgcttccccagcgagcccggcctggtgggccccagcgtgcgggcccaggctgaagattatgccctggtgtctgctgtggccaccctgcccaagcaggtggccgaccactatgacaacttccgcatctacaaggccctggaggccgtgagcagctgtgtgcggcagaccaacggctttgtgcagagacatgccccctggaagctgaactgggagagccctgtggatgccccctggctgggcaccgtgctgcacgtggccctggagtgcctgcgggtgtttggcaccctgctgcagcctgtgacccccagcctggccgacaagctgctgagccggctgggcgtgtctgccagcgagaggagcctgggggagctgtacttcctgccccgcttctacggccacccctgcccctttgagggccgccgcctgggccctgagaccggcctgctcttcccccggctggaccagagcaggacctggctggtgaaggcccacaggacatag

SEQ ID NO: 159546 - DNA, 1563 bp, synthetic construct
  misc_feature 1..1563: note = Description of Artificial Sequence: Synthetic coding sequence
  source 1..1563: mol_type = other DNA
atgctgcggacctctgtgctgcggctgctgggccgcactggagccagccggctgagcctgctggaggactttggcccccgctactacagcagcggcagcctgtctgctggagatgatgcctgtgatgtgcgggcctacttcaccacccccatcttctacgtgaatgctgccccccacatcggccacctgtacagcgccctgctggctgatgccctgtgccgccaccggcggctgcggggccccagcacagctgccacccgcttcagcactggaacagatgaacatggcctgaagatccagcaggccgccgccacagctggcctggcccccacagagctgtgtgacagagtgtctgagcagttccagcagctgttccaggaggccggcatctcctggaccaaggaggagaactacatcttccggctgagccagttcaggaagcccctgcagcgctggctgcggggcaacccccaggccatcaccccagagcccttccaccacgtggtgctgcagtggctggatgaggagctgcctgacctgtctgtgagccgccgcagcagccacctgcactggggcatccctgtgcctggagatgacagccagaccatctacgtgtggctggatgccctggtgaactacctgactgtgattggctacccaaatgctgagttcaagtcctggtggccagccaccagccacatcatcggcaaggacatcctgaagttccacgccatctactggccagccttcctgctgggcgccggcatgagccccccccagaggatctgtgtgcacagccactggacagtgtgtggccagaagatgagcaagagcctgggcaatgtggtggaccccaggacctgcctgaaccgctacacagtggatggcttccgctacttcctgctgcggcagggcgtgcccaactgggactgtgactactatgatgagaaggtggtgaagctgctgaacagcgagctggctgatgccctgggcggcctgctgaaccgctgcacagccaagaggatcaaccccagcgagacctacccagccttctgcaccacctgcttccccagcgagcccggcctggtgggccccagcgtgcgggcccaggccgaggactatgccctggtgtctgctgtggccaccctgcccaagcaggtggccgaccactatgacaacttccgcatctacaaggccctggaggccgtgagcagctgtgtgcggcagaccaatggatttgtgcagagacatgccccctggaagctgaactgggagagccctgtggatgccccctggctgggcaccgtgctgcacgtggccctggagtgcctgcgggtgtttggcaccctgctgcagcctgtgacccccagcctggccgacaagctgctgagccggctgggcgtgtctgccagcgagaggagcctgggggagctgtacttcctgccccgcttctacggccacccctgcccctttgagggccggcggctgggccctgagaccggcctgctcttcccccggctggaccagagcaggacctggctggtgaaggcccacaggacatag

SEQ ID NO: 159547 - DNA, 1461 bp, synthetic construct
  misc_feature 1..1461: note = Description of Artificial Sequence: Synthetic coding sequence
  source 1..1461: mol_type = other DNA
atggtggccggcatgctgggcctgcgggaggagaagtctgaggaccaggacctgcagggcctgaaggacaagcccctgaagttcaagaaggtgaagaaggacaagaaggaggagaaggagggcaagcatgagcctgtgcagcccagcgcccaccacagcgctgagcctgctgaggccggcaaggccgagaccagcgagggcagcggcagcgccccagctgtgcctgaggccagcgccagccccaagcagaggaggagcatcatccgggaccggggccccatgtatgatgaccccaccctgcctgagggctggaccaggaagctgaagcagaggaagagcggccgctctgctgggaagtatgatgtgtacctgatcaacccccagggcaaggccttccgcagcaaggtggagctgattgcctactttgagaaggtgggggacaccagcctggaccccaatgactttgacttcaccgtgacaggccggggcagccccagcagaagagagcagaagccacccaagaagcccaagagccccaaggcccctggcaccggccggggccggggccggcccaagggcagcggcaccacccggcccaaggccgccaccagcgagggcgtgcaggtgaagagggtgctggagaagagccctgggaagctgctggtgaagatgcccttccagaccagccctgggggcaaggccgagggcggcggggccaccaccagcacccaggtgatggtgatcaagaggcctggcaggaagaggaaggccgaggccgacccccaggccatccccaagaagaggggcaggaagccaggctctgtggtggccgctgctgctgctgaggccaagaagaaggctgtgaaggagagcagcatccgctctgtgcaggagaccgtgctgcccatcaagaagaggaagacccgggagaccgtgtccattgaggtgaaggaggtggtgaagcccctgctggtgtccaccctgggggagaagagcggcaagggcctgaagacctgcaagagccctggcaggaagagcaaggagagcagccccaagggccgcagcagcagcgccagcagcccccccaagaaggagcaccaccaccaccaccaccacagcgagagccccaaggcccctgtgcccctgctgccccccctgcccccacctcctcctgagcctgagagcagcgaggaccccaccagccccccagagccccaggacctgagcagctctgtgtgcaaggaggagaagatgccccggggcggcagcctggagagtgatggctgccccaaggagcccgccaagacccagcctgctgtggccacagctgccacagctgctgagaagtacaagcacagaggagagggggagaggaaggacatcgtgagcagctccatgccccggcccaaccgggaggagcctgtggacagcaggacccctgtgacagagcgggtgtcctag

SEQ ID NO: 159548 - DNA, 816 bp, synthetic construct
  misc_feature 1..816: note = Description of Artificial Sequence: Synthetic coding sequence
  source 1..816: mol_type = other DNA
atggtggccggcatgctgggcctgcgggaggagaagtctgaggaccaggacctgcagggcctgaaggacaagcccctgaagttcaagaaggtgaagaaggacaagaaggaggagaaggagggcaagcatgagcctgtgcagcccagcgcccaccacagcgctgagcctgctgaggccggcaaggccgagaccagcgagggcagcggcagcgccccagctgtgcctgaggccagcgccagccccaagcagaggaggagcatcatccgggaccggggccccatgtatgatgaccccaccctgcctgagggctggaccaggaagctgaagcagaggaagagcggccgctctgctgggaagtatgatgtgtacctgatcaacccccagggcaaggccttccgcagcaaggtggagctgattgcctactttgagaaggtgggggacaccagcctggaccccaatgactttgacttcaccgtgacaggccggggcagccccagcagaagagagcagaagccacccaagaagcccaagagccccaaggcccctggcaccggccggggccggggccggcccaagggcagcggcaccacccggcccaaggccgccaccagcgagggcgtgcaggtgaagagggtgctggagaagagccctgggaagctgctggtgaagatgcccttccagaccagccctgggggcaaggccgagggcggcggggccaccaccagcacccaggtgatggtgatcaagaggcctggcaggaagaggagcccccgggcccccaggaccccaccagcccccctgagccccaggacatag

SEQ ID NO: 159549 - DNA, 153 bp, synthetic construct
  misc_feature 1..153: note = Description of Artificial Sequence: Synthetic coding sequence
  source 1..153: mol_type = other DNA
atggtggccggcatgctgggcctgcgggaggagaagtctgaggaccaggacctgcagggcctgaaggacaagcccctgaagttcaagaaggtgaagaaggacaagaaggaggagaaggagggcaagcatgagcctgtgcagcccagcgcctag

SEQ ID NO: 159550 - DNA, 1497 bp, synthetic construct
  misc_feature 1..1497: note = Description of Artificial Sequence: Synthetic coding sequence
  source 1..1497: mol_type = other DNA
atggctgctgctgctgctgctgcccccagcggcggcggcggcggcggggaggaggagcggctggaggagaagtctgaggaccaggacctgcagggcctgaaggacaagcccctgaagttcaagaaggtgaagaaggacaagaaggaggagaaggagggcaagcatgagcctgtgcagcccagcgcccaccacagcgctgagcctgctgaggccggcaaggccgagaccagcgagggcagcggcagcgccccagctgtgcctgaggccagcgccagccccaagcagaggaggagcatcatccgggaccggggccccatgtatgatgaccccaccctgcctgagggctggaccaggaagctgaagcagaggaagagcggccgctctgctgggaagtatgatgtgtacctgatcaacccccagggcaaggccttccgcagcaaggtggagctgattgcctactttgagaaggtgggggacaccagcctggaccccaatgactttgacttcaccgtgacaggccggggcagccccagcagaagagagcagaagccacccaagaagcccaagagccccaaggcccctggcaccggccggggccggggccggcccaagggcagcggcaccacccggcccaaggccgccaccagcgagggcgtgcaggtgaagagggtgctggagaagagccctgggaagctgctggtgaagatgcccttccagaccagccctgggggcaaggccgagggcggcggggccaccaccagcacccaggtgatggtgatcaagaggcctggcaggaagaggaaggccgaggccgacccccaggccatccccaagaagaggggcaggaagccaggctctgtggtggccgctgctgctgctgaggccaagaagaaggctgtgaaggagagcagcatccgctctgtgcaggagaccgtgctgcccatcaagaagaggaagacccgggagaccgtgtccattgaggtgaaggaggtggtgaagcccctgctggtgtccaccctgggggagaagagcggcaagggcctgaagacctgcaagagccctggcaggaagagcaaggagagcagccccaagggccgcagcagcagcgccagcagcccccccaagaaggagcaccaccaccaccaccaccacagcgagagccccaaggcccctgtgcccctgctgccccccctgcccccacctcctcctgagcctgagagcagcgaggaccccaccagccccccagagccccaggacctgagcagctctgtgtgcaaggaggagaagatgccccggggcggcagcctggagagtgatggctgccccaaggagcccgccaagacccagcctgctgtggccacagctgccacagctgctgagaagtacaagcacagaggagagggggagaggaaggacatcgtgagcagctccatgccccggcccaaccgggaggagcctgtggacagcaggacccctgtgacagagcgggtgtcctag

SEQ ID NO: 159551 - DNA, 1185 bp, synthetic construct
  misc_feature 1..1185: note = Description of Artificial Sequence: Synthetic coding sequence
  source 1..1185: mol_type = other DNA
atggtggccggcatgctgggcctgcgggaggagaagtctgaggaccaggacctgcagggcctgaaggacaagcccctgaagttcaagaaggtgaagaaggacaagaaggaggagaaggagggcaagcatgagcctgtgcagcccagcgcccaccacagcgctgagcctgctgaggccggcaaggccgagaccagcgagggcagcggcagcgccccagctgtgcctgaggccagcgccagccccaagcagaggaggagcatcatccgggaccggggccccatgtatgatgaccccaccctgcctgagggctggaccaggaagctgaagcagaggaagagcggccgctctgctgggaagtatgatgtgtacctgatcaacccccagggcaaggccttccgcagcaaggtggagctgattgcctactttgagaaggtgggggacaccagcctggaccccaatgactttgacttcaccgtgacaggccggggcagccccagcagaagagagcagaagccacccaagaagcccaagagccccaaggcccctggcaccggccggggccggggccggcccaagggcagcggcaccacccggcccaaggccgccaccagcgagggcgtgcaggtgaagagggtgctggagaagagccctgggaagctgctggtgaagatgcccttccagaccagccctgggggcaaggccgagggcggcggggccaccaccagcacccaggtgatggtgatcaagaggcctggcaggaagaggaaggccgaggccgacccccaggccatccccaagaagaggggcaggaagccaggctctgtggtggccgctgctgctgctgaggccaagaagaaggctgtgaaggagagcagcatccgctctgtgcaggagaccgtgctgcccatcaagaagaggaagacccgggagaccgtgtccattgaggtgaaggaggtggtgaagcccctgctggtgtccaccctgggggagaagagcggcaagggcctgaagacctgcaagagccctggcaggaagagcaaggagagcagccccaagggccgcagcagcagcgccagcagcccccccaagaaggagcaccaccaccaccaccaccacagcgagagccccaaggcccctgtgcccacccgcatcaaggctgctgtggtgagcagcccctatggatag

SEQ ID NO: 159552 - DNA, 1818 bp, synthetic construct
  misc_feature 1..1818: note = Description of Artificial Sequence: Synthetic coding sequence
  source 1..1818: mol_type = other DNA
atggccgaggactggctggactgcccagccctgggccctggctggaagagaagagaggtgttcaggaagagcggggccacctgtggccgcagtgacacctactaccagagccccactggagaccgcatccgcagcaaggtggagctgacccgctacctgggccctgcctgtgacctgaccctgtttgacttcaagcagggcatcctgtgctacccagcccccaaggcccaccctgtggccgtggccagcaagaagaggaagaagcccagcaggcctgccaagaccaggaagaggcaggtgggcccccagagcggggaggtgaggaaggaggcccccagagatgagaccaaggctgacacagacacagccccagccagcttccctgcccctggctgctgtgagaactgtggcatctccttctctggagatggcacccagaggcagaggctgaagaccctgtgcaaggactgccgggcccagagaattgccttcaaccgggagcagaggatgttcaagagggtgggctgtggggagtgtgccgcctgccaggtgacagaggactgtggggcctgcagcacctgcctgctgcagctgccccatgatgtggccagcggcctcttctgcaagtgtgagcggcggcgctgcctgcgcatcgtggagaggagccggggctgcggcgtgtgccggggctgccagacccaggaggactgtggccactgccccatctgcctgcggccccccaggcctggcctgcggcggcagtggaagtgtgtgcagaggcgctgcctgcggggcaagcacgcccggaggaaaggaggctgtgacagcaagatggccgcccggcggcggcctggggcccagcccctgcccccacctccacccagccagagccctgagcccacagagccccacccccgggccctggcccccagccccccagctgagttcatctactactgtgtggatgaagatgagctgcagccctacaccaacagacggcagaacagaaaatgtggggcctgtgccgcctgcctgcggaggatggactgtggccgctgtgacttctgctgtgacaagcccaagtttggaggcagcaaccagaagaggcagaagtgccgctggaggcagtgcctgcagtttgccatgaagaggctgctgcccagcgtgtggagcgagagtgaagatggagctggcagccccccaccctacagaagaaggaagaggcccagcagcgcccggcggcaccacctgggccccaccctgaagcccaccctggccaccaggacagcccagcctgaccacacccaggcccccaccaagcaggaggccggcggcggctttgtgctgcccccacctggaacagacctggtgttcctgcgggagggcgccagcagccctgtgcaggtgcccggccctgtggccgccagcacagaggccctgctgcaggaggcccagtgcagcggcctgtcctgggtggtggccctgccccaggtgaagcaggagaaggctgacacccaggatgagtggaccccaggcacagctgtgctgaccagccctgtgctggtgcccggctgccccagcaaggctgtggaccccggcctgcccagcgtgaagcaggagcccccagaccctgaggaggacaaggaggagaacaaggatgattctgccagcaagctggcccctgaggaggaggccggcggggccggcacccctgtgatcacagagatcttcagcctgggcggcacccgcttccgggacacagctgtgtggctgcccaggagcaaggacctgaagaagccaggggccaggaagcagtag

SEQ ID NO: 159553 - DNA, 1761 bp, synthetic construct
  misc_feature 1..1761: note = Description of Artificial Sequence: Synthetic coding sequence
  source 1..1761: mol_type = other DNA
atggccgaggactggctggactgcccagccctgggccctggctggaagagaagagaggtgttcaggaagagcggggccacctgtggccgcagtgacacctactaccagagccccactggagaccgcatccgcagcaaggtggagctgacccgctacctgggccctgcctgtgacctgaccctgtttgacttcaagcagggcatcctgtgctacccagcccccaaggcccaccctgtggccgtggccagcaagaagaggaagaagcccagcaggcctgccaagaccaggaagaggcaggtgggcccccagagcggggaggtgaggaaggaggcccccagagatgagaccaaggctgacacagacacagccccagccagcttccctgcccctggctgctgtgagaactgtggcatctccttctctggagatggcacccagaggcagaggctgaagaccctgtgcaaggactgccgggcccagagaattgccttcaaccgggagcagaggatgttcaagagggtgggctgtggggagtgtgccgcctgccaggtgacagaggactgtggggcctgcagcacctgcctgctgcagctgccccatgatgtggccagcggcctcttctgcaagtgtgagcggcggcgctgcctgcgcatcgtggagaggagccggggctgcggcgtgtgccggggctgccagacccaggaggactgtggccactgccccatctgcctgcggccccccaggcctggcctgcggcggcagtggaagtgtgtgcagaggcgctgcctgcggggcaagcacgcccggaggaaaggaggctgtgacagcaagatggccgcccggcggcggcctggggcccagcccctgcccccacctccacccagccagagccctgagcccacagagccccagccctacaccaacagacggcagaacagaaaatgtggggcctgtgccgcctgcctgcggaggatggactgtggccgctgtgacttctgctgtgacaagcccaagtttggaggcagcaaccagaagaggcagaagtgccgctggaggcagtgcctgcagtttgccatgaagaggctgctgcccagcgtgtggagcgagagtgaagatggagctggcagccccccaccctacagaagaaggaagaggcccagcagcgcccggcggcaccacctgggccccaccctgaagcccaccctggccaccaggacagcccagcctgaccacacccaggcccccaccaagcaggaggccggcggcggctttgtgctgcccccacctggaacagacctggtgttcctgcgggagggcgccagcagccctgtgcaggtgcccggccctgtggccgccagcacagaggccctgctgcaggccgtggaccccggcctgcccagcgtgaagcaggagcccccagaccctgaggaggacaaggaggagaacaaggatgacagcgccagcaagctggcccctgaggaggaggccggcggggccggcacccctgtgatcacagagatcttcagcctgggcggcacccgcttccgggacacagctgtgtggctgcccagcctgcagggccgccacagcggcagagaagatggctgcaaggtgtgggagacagaggacacagtggagcccaccagcacctcctggaacccccggggctggccaggcacccacgtgtccctgagccccccaccagcctccatgatgtgggtgtcctgcagaagatcctggtgccccagcagccagagctag

SEQ ID NO: 159554 - DNA, 1653 bp, synthetic construct
  misc_feature 1..1653: note = Description of Artificial Sequence: Synthetic coding sequence
  source 1..1653: mol_type = other DNA
atggccgaggactggctggactgcccagccctgggccctggctggaagagaagagaggtgttcaggaagagcggggccacctgtggccgcagtgacacctactaccagagccccactggagaccgcatccgcagcaaggtggagctgacccgctacctgggccctgcctgtgacctgaccctgtttgacttcaagcagggcatcctgtgctacccagcccccaaggcccaccctgtggccgtggccagcaagaagaggaagaagcccagcaggcctgccaagaccaggaagaggcaggtgggcccccagagcggggaggtgaggaaggaggcccccagagatgagaccaaggctgacacagacacagccccagccagcttccctgcccctggctgctgtgagaactgtggcatctccttctctggagatggcacccagaggcagaggctgaagaccctgtgcaaggactgccgggcccagagaattgccttcaaccgggagcagaggatgttcaagagggtgggctgtggggagtgtgccgcctgccaggtgacagaggactgtggggcctgcagcacctgcctgctgcagctgccccatgatgtggccagcggcctcttctgcaagtgtgagcggcggcgctgcctgcgcatcgtggagaggagccggggctgcggcgtgtgccggggctgccagacccaggaggactgtggccactgccccatctgcctgcggccccccaggcctggcctgcggcggcagtggaagtgtgtgcagaggcgctgcctgcggggcaagcacgcccggaggaaaggaggctgtgacagcaagatggccgcccggcggcggcctggggcccagcccctgcccccacctccacccagccagagccctgagcccacagagccccacccccgggccctggcccccagccccccagctgagttcatctactactgtgtggatgaagatgagctgcagccctacaccaacagacggcagaacagaaaatgtggggcctgtgccgcctgcctgcggaggatggactgtggccgctgtgacttctgctgtgacaagcccaagtttggaggcagcaaccagaagaggcagaagtgccgctggaggcagtgcctgcagtttgccatgaagaggctgctgcccagcgtgtggagcgagagtgaagatggagctggcagccccccaccctacagaagaaggaagaggcccagcagcgcccggcggcaccacctgggccccaccctgaagcccaccctggccaccaggacagcccagcctgaccacacccaggcccccaccaagcaggaggccggcggcggctttgtgctgcccccacctggaacagacctggtgttcctgcgggagggcgccagcagccctgtgcaggtgcccggccctgtggccgccagcacagaggccctgctgcaggccgtggaccccggcctgcccagcgtgaagcaggagcccccagaccctgaggaggacaaggaggagaacaaggatgattctgccagcaagctggcccctgaggaggaggccggcggggccggcacccctgtggagcccaccacccagccccagtacagcggcaactttgacaatgacctgtatgagatctacctgattgacatctag

SEQ ID NO: 159555 - DNA, 1650 bp, synthetic construct
  misc_feature 1..1650: note = Description of Artificial Sequence: Synthetic coding sequence
  source 1..1650: mol_type = other DNA
atggccgaggactggctggactgcccagccctgggccctggctggaagagaagagaggtgttcaggaagagcggggccacctgtggccgcagtgacacctactaccagagccccactggagaccgcatccgcagcaaggtggagctgacccgctacctgggccctgcctgtgacctgaccctgtttgacttcaagcagggcatcctgtgctacccagcccccaaggcccaccctgtggccgtggccagcaagaagaggaagaagcccagcaggcctgccaagaccaggaagaggcaggtgggcccccagagcggggaggtgaggaaggaggcccccagagatgagaccaaggctgacacagacacagccccagccagcttccctgcccctggctgctgtgagaactgtggcatctccttctctggagatggcacccagaggcagaggctgaagaccctgtgcaaggactgccgggcccagagaattgccttcaaccgggagcagaggatgttcaagagggtgggctgtggggagtgtgccgcctgccaggtgacagaggactgtggggcctgcagcacctgcctgctgcagctgccccatgatgtggccagcggcctcttctgcaagtgtgagcggcggcgctgcctgcgcatcgtggagaggagccggggctgcggcgtgtgccggggctgccagacccaggaggactgtggccactgccccatctgcctgcggccccccaggcctggcctgcggcggcagtggaagtgtgtgcagaggcgctgcctgcggggcaagcacgcccggaggaaaggaggctgtgacagcaagatggccgcccggcggcggcctggggcccagcccctgcccccacctccacccagccagagccctgagcccacagagccccacccccgggccctggcccccagccccccagctgagttcatctactactgtgtggatgaagatgagctgaagaggctgctgcccagcgtgtggagcgagagtgaagatggagctggcagccccccaccctacagaagaaggaagaggcccagcagcgcccggcggcaccacctgggccccaccctgaagcccaccctggccaccaggacagcccagcctgaccacacccaggcccccaccaagcaggaggccggcggcggctttgtgctgcccccacctggaacagacctggtgttcctgcgggagggcgccagcagccctgtgcaggtgcccggccctgtggccgccagcacagaggccctgctgcaggaggcccagtgcagcggcctgtcctgggtggtggccctgccccaggtgaagcaggagaaggctgacacccaggatgagtggaccccaggcacagctgtgctgaccagccctgtgctggtgcccggctgccccagcaaggctgtggaccccggcctgcccagcgtgaagcaggagcccccagaccctgaggaggacaaggaggagaacaaggatgattctgccagcaagctggcccctgaggaggaggccggcggggccggcacccctgtgatcacagagatcttcagcctgggcggcacccgcttccgggacacagctgtgtggctgcccaggagcaaggacctgaagaagccaggggccaggaagcagtag

SEQ ID NO: 159556 - DNA, 1512 bp, synthetic construct
  misc_feature 1..1512: note = Description of Artificial Sequence: Synthetic coding sequence
  source 1..1512: mol_type = other DNA
atggccgaggactggctggactgcccagccctgggccctggctggaagagaagagaggtgttcaggaagagcggggccacctgtggccgcagtgacacctactaccagagccccactggagaccgcatccgcagcaaggtggagctgacccgctacctgggccctgcctgtgacctgaccctgtttgacttcaagcagggcatcctgtgctacccagcccccaaggcccaccctgtggccgtggccagcaagaagaggaagaagcccagcaggcctgccaagaccaggaagaggcaggtgggcccccagagcggggaggtgaggaaggaggcccccagagatgagaccaaggctgacacagacacagccccagccagcttccctgcccctggctgctgtgagaactgtggcatctccttctctggagatggcacccagaggcagaggctgaagaccctgtgcaaggactgccgggcccagagaattgccttcaaccgggagcagaggatgttcaagagggtgggctgtggggagtgtgccgcctgccaggtgacagaggactgtggggcctgcagcacctgcctgctgcagctgccccatgatgtggccagcggcctcttctgcaagtgtgagcggcggcgctgcctgcgcatcgtggagaggagccggggctgcggcgtgtgccggggctgccagacccaggaggactgtggccactgccccatctgcctgcggccccccaggcctggcctgcggcggcagtggaagtgtgtgcagaggcgctgcctgcggggcaagcacgcccggaggaaaggaggctgtgacagcaagatggccgcccggcggcggcctggggcccagcccctgcccccacctccacccagccagagccctgagcccacagagccccacccccgggccctggcccccagccccccagctgagttcatctactactgtgtggatgaagatgagctgaagaggctgctgcccagcgtgtggagcgagagtgaagatggagctggcagccccccaccctacagaagaaggaagaggcccagcagcgcccggcggcaccacctgggccccaccctgaagcccaccctggccaccaggacagcccagcctgaccacacccaggcccccaccaagcaggaggccggcggcggctttgtgctgcccccacctggaacagacctggtgttcctgcgggagggcgccagcagccctgtgcaggtgcccggccctgtggccgccagcacagaggccctgctgcaggccgtggaccccggcctgcccagcgtgaagcaggagcccccagaccctgaggaggacaaggaggagaacaaggatgattctgccagcaagctggcccctgaggaggaggccggcggggccggcacccctgtgatcacagagatcttcagcctgggcggcacccgcttccgggacacagctgtgtggctgcccaggagcaaggacctgaagaagccaggggccaggaagcagtag

SEQ ID NO: 159557 - DNA, 1671 bp, synthetic construct
  misc_feature 1..1671: note = Description of Artificial Sequence: Synthetic coding sequence
  source 1..1671: mol_type = other DNA
atggccgaggactggctggactgcccagccctgggccctggctggaagagaagagaggtgttcaggaagagcggggccacctgtggccgcagtgacacctactaccagagccccactggagaccgcatccgcagcaaggtggagctgacccgctacctgggccctgcctgtgacctgaccctgtttgacttcaagcagggcatcctgtgctacccagcccccaaggcccaccctgtggccgtggccagcaagaagaggaagaagcccagcaggcctgccaagaccaggaagaggcaggtgggcccccagagcggggaggtgaggaaggaggcccccagagatgagaccaaggctgacacagacacagccccagccagcttccctgcccctggctgctgtgagaactgtggcatctccttctctggagatggcacccagaggcagaggctgaagaccctgtgcaaggactgccgggcccagagaattgccttcaaccgggagcagaggatgttcaagagccggggctgcggcgtgtgccggggctgccagacccaggaggactgtggccactgccccatctgcctgcggcccccccggcccggcctgcggcggcagtggaagtgtgtgcagaggcgctgcctgcggggcaagcacgcccggaggaagggcggctgtgacagcaagatggccgccaggagaagacctggggcccagcccctgcccccacctccacccagccagagccctgagcccacagagccccacccccgggccctggcccccagccccccagctgagttcatctactactgtgtggatgaagatgagctgcagccctacaccaacagacggcagaacagaaaatgtggggcctgtgccgcctgcctgcggaggatggactgtggccgctgtgacttctgctgtgacaagcccaagtttggaggcagcaaccagaagaggcagaagtgccgctggaggcagtgcctgcagtttgccatgaagaggctgctgcccagcgtgtggagcgagagtgaagatggagctggcagccccccaccctacagaagaaggaagaggcccagcagcgcccggcggcaccacctgggccccaccctgaagcccaccctggccaccaggacagcccagcctgaccacacccaggcccccaccaagcaggaggccggcggcggctttgtgctgcccccacctggaacagacctggtgttcctgcgggagggcgccagcagccctgtgcaggtgcccggccctgtggccgccagcacagaggccctgctgcaggaggcccagtgcagcggcctgtcctgggtggtggccctgccccaggtgaagcaggagaaggctgacacccaggatgagtggaccccaggcacagctgtgctgaccagccctgtgctggtgcccggctgccccagcaaggctgtggaccccggcctgcccagcgtgaagcaggagcccccagaccctgaggaggacaaggaggagaacaaggatgacagcgccagcaagctggcccctgaggaggaggccggcggggccggcacccctgtgatcacagagatcttcagcctgggcggcacccgcttccgggacacagctgtgtggctgcccaggagcaaggacctgaagaagccaggggccaggaagcagtag

SEQ ID NO: 159558 - DNA, 1818 bp, synthetic construct; identical to SEQ ID NO: 159552
  misc_feature 1..1818: note = Description of Artificial Sequence: Synthetic coding sequence
  source 1..1818: mol_type = other DNA

SEQ ID NO: 159559 - DNA, 1512 bp, synthetic construct; identical to SEQ ID NO: 159556
  misc_feature 1..1512: note = Description of Artificial Sequence: Synthetic coding sequence
  source 1..1512: mol_type = other DNA

SEQ ID NO: 159560 - DNA, 1650 bp, synthetic construct; identical to SEQ ID NO: 159555
  misc_feature 1..1650: note = Description of Artificial Sequence: Synthetic coding sequence
  source 1..1650: mol_type = other DNA

SEQ ID NO: 159561 - DNA, 1818 bp, synthetic construct; identical to SEQ ID NO: 159552
  misc_feature 1..1818: note = Description of Artificial Sequence: Synthetic coding sequence
  source 1..1818: mol_type = other DNA

SEQ ID NO: 159562 - DNA, 1971 bp, synthetic construct
  misc_feature 1..1971: note = Description of Artificial Sequence: Synthetic coding sequence
  source 1..1971: mol_type = other DNA
atgggcggcttccggctgaggactggaagaaatgctgccctgaacagcgaccggctgctgctgctgcctgtggcctccatggccgaggactggctggactgcccagccctgggccctggctggaagagaagagaggtgttcaggaagagcggggccacctgtggccgcagtgacacctactaccagagccccactggagaccgcatccgcagcaaggtggagctgacccgctacctgggccctgcctgtgacctgaccctgtttgacttcaagcagggcatcctgtgctacccagcccccaaggcccaccctgtggccgtggccagcaagaagaggaagaagcccagcaggcctgccaagaccaggaagaggcaggtgggcccccagagcggggaggtgaggaaggaggcccccagagatgagaccaaggctgacacagacacagccccagccagcttccctgcccctggctgctgtgagaactgtggcatctccttctctggagatggcacccagaggcagaggctgaagaccctgtgcaaggactgccgggcccagagaattgccttcaaccgggagcagaggatgttcaagagggtgggctgtggggagtgtgccgcctgccaggtgacagaggactgtggggcctgcagcacctgcctgctgcagctgccccatgatgtggccagcggcctcttctgcaagtgtgagcggcggcgctgcctgcgcatcgtggagaggagccggggctgcggcgtgtgccggggctgccagacccaggaggactgtggccactgccccatctgcctgcggccccccaggcctggcctgcggcggcagtggaagtgtgtgcagaggcgctgcctgcggcacctggcccaccggctgcggcggcggcaccagcgctgccagaggaggacccccctggccgtggcccccccaacaggcaagcacgcccggaggaagggcggctgtgacagcaagatggccgccaggagaagacctggggcccagcccctgcccccacctccacccagccagagccctgagcccacagagccccacccccgggccctggcccccagccccccagctgagttcatctactactgtgtggatgaagatgagctgcagccctacaccaacagacggcagaacagaaaatgtggggcctgtgccgcctgcctgcggaggatggactgtggccgctgtgacttctgctgtgacaagcccaagtttggaggcagcaaccagaagaggcagaagtgccgctggaggcagtgcctgcagtttgccatgaagaggctgctgcccagcgtgtggagcgagagtgaagatggagctggcagccccccaccctacagaagaaggaagaggcccagcagcgcccggcggcaccacctgggccccaccctgaagcccaccctggccaccaggacagcccagcctgaccacacccaggcccccaccaagcaggaggccggcggcggctttgtgctgcccccacctggaacagacctggtgttcctgcgggagggcgccagcagccctgtgcaggtgcccggccctgtggccgccagcacagaggccctgctgcaggaggcccagtgcagcggcctgtcctgggtggtggccctgccccaggtgaagcaggagaaggctgacacccaggatgagtggaccccaggcacagctgtgctgaccagccctgtgctggtgcccggctgccccagcaaggctgtggaccccggcctgcccagcgtgaagcaggagcccccagaccctgaggaggacaaggaggagaacaaggatgacagcgccagcaagctggcccctgaggaggaggccggcggggccggcacccctgtgatcacagagatcttcagcctgggcggcacccgcttccgggacacagctgtgtggctgcccaggagcaaggacctgaagaagccaggggccaggaagcagtag

SEQ ID NO: 159563 - DNA, 1611 bp, synthetic construct
  misc_feature 1..1611: note = Description of Artificial Sequence: Synthetic coding sequence
  source 1..1611: mol_type = other DNA
atggccgaggactggctggactgcccagccctgggccctggctggaagagaagagaggtgttcaggaagagcggggccacctgtggccgcagtgacacctactaccagagccccactggagaccgcatccgcagcaaggtggagctgacccgctacctgggccctgcctgtgacctgaccctgtttgacttcaagcagggcatcctgtgctacccagcccccaaggcccaccctgtggccgtggccagcaagaagaggaagaagcccagcaggcctgccaagaccaggaagaggcaggtgggcccccagagcggggaggtgaggaaggaggcccccagagatgagaccaaggctgacacagacacagccccagccagcttccctgcccctggctgctgtgagaactgtggcatctccttctctggagatggcacccagaggcagaggctgaagaccctgtgcaaggactgccgggcccagagaattgccttcaaccgggagcagaggatgttcaagagggtgggctgtggggagtgtgccgcctgccaggtgacagaggactgtggggcctgcagcacctgcctgctgcagctgccccatgatgtggccagcggcctcttctgcaagtgtgagcggcggcgctgcctgcgcatcgtggagaggagccggggctgcggcgtgtgccggggctgccagacccaggaggactgtggccactgccccatctgcctgcggccccccaggcctggcctgcggcggcagtggaagtgtgtgcagaggcgctgcctgcggggcaagcacgcccggaggaaaggaggctgtgacagcaagatggccgcccggcggcggcctggggcccagcccctgcccccacctccacccagccagagccctgagcccacagagccccagccctacaccaacagacggcagaacagaaaatgtggggcctgtgccgcctgcctgcggaggatggactgtggccgctgtgacttctgctgtgacaagcccaagtttggaggcagcaaccagaagaggcagaagtgccgctggaggcagtgcctgcagtttgccatgaagaggctgctgcccagcgtgtggagcgagagtgaagatggagctggcagccccccaccctacagaagaaggaagaggcccagcagcgcccggcggcaccacctgggccccaccctgaagcccaccctggccaccaggacagcccagcctgaccacacccaggcccccaccaagcaggaggccggcggcggctttgtgctgcccccacctggaacagacctggtgttcctgcgggagggcgccagcagccctgtgcaggtgcccggccctgtggccgccagcacagaggccctgctgcaggccgtggaccccggcctgcccagcgtgaagcaggagcccccagaccctgaggaggacaaggaggagaacaaggatgacagcgccagcaagctggcccctgaggaggaggccggcggggccggcacccctgtgatcacagagatcttcagcctgggcggcacccgcttccgggacacagctgtgtggctgcccaggagcaaggacctgaagaagccaggggccaggaagcagtag

SEQ ID NO: 159564 - DNA, 1893 bp, synthetic construct
  misc_feature 1..1893: note = Description of Artificial Sequence: Synthetic coding sequence
  source 1..1893: mol_type = other DNA
atggccgaggactggctggactgcccagccctgggccctggctggaagagaagagaggtgttcaggaagagcggggccacctgtggccgcagtgacacctactaccagagccccactggagaccgcatccgcagcaaggtggagctgacccgctacctgggccctgcctgtgacctgaccctgtttgacttcaagcagggcatcctgtgctacccagcccccaaggcccaccctgtggccgtggccagcaagaagaggaagaagcccagcaggcctgccaagaccaggaagaggcaggtgggcccccagagcggggaggtgaggaaggaggcccccagagatgagaccaaggctgacacagacacagccccagccagcttccctgcccctggctgctgtgagaactgtggcatctccttctctggagatggcacccagaggcagaggctgaagaccctgtgcaaggactgccgggcccagagaattgccttcaaccgggagcagaggatgttcaagagggtgggctgtggggagtgtgccgcctgccaggtgacagaggactgtggggcctgcagcacctgcctgctgcagctgccccatgatgtggccagcggcctcttctgcaagtgtgagcggcggcgctgcctgcgcatcgtggagaggagccggggctgcggcgtgtgccggggctgccagacccaggaggactgtggccactgccccatctgcctgcggccccccaggcctggcctgcggcggcagtggaagtgtgtgcagaggcgctgcctgcggcacctggcccaccggctgcggcggcggcaccagcgctgccagaggaggacccccctggccgtggcccccccaacaggcaagcacgcccggaggaagggcggctgtgacagcaagatggccgccaggagaagacctggggcccagcccctgcccccacctccacccagccagagccctgagcccacagagccccacccccgggccctggcccccagccccccagctgagttcatctactactgtgtggatgaagatgagctgcagccctacaccaacagacggcagaacagaaaatgtggggcctgtgccgcctgcctgcggaggatggactgtggccgctgtgacttctgctgtgacaagcccaagtttggaggcagcaaccagaagaggcagaagtgccgctggaggcagtgcctgcagtttgccatgaagaggctgctgcccagcgtgtggagcgagagtgaagatggagctggcagccccccaccctacagaagaaggaagaggcccagcagcgcccggcggcaccacctgggccccaccctgaagcccaccctggccaccaggacagcccagcctgaccacacccaggcccccaccaagcaggaggccggcggcggctttgtgctgcccccacctggaacagacctggtgttcctgcgggagggcgccagcagccctgtgcaggtgcccggccctgtggccgccagcacagaggccctgctgcaggaggcccagtgcagcggcctgtcctgggtggtggccctgccccaggtgaagcaggagaaggctgacacccaggatgagtggaccccaggcacagctgtgctgaccagccctgtgctggtgcccggctgccccagcaaggctgtggaccccggcctgcccagcgtgaagcaggagcccccagaccctgaggaggacaaggaggagaacaaggatgacagcgccagcaagctggcccctgaggaggaggccggcggggccggcacccctgtgatcacagagatcttcagcctgggcggcacccgcttccgggacacagctgtgtggctgcccaggagcaaggacctgaagaagccaggggccaggaagcagtag

SEQ ID NO: 159565 - DNA, 1704 bp, synthetic construct
  misc_feature 1..1704: note = Description of Artificial Sequence: Synthetic coding sequence
  source 1..1704: mol_type = other DNA
atggccgaggactggctggactgcccagccctgggccctggctggaagagaagagaggtgttcaggaagagcggggccacctgtggccgcagtgacacctactaccagagccccactggagaccgcatccgcagcaaggtggagctgacccgctacctgggccctgcctgtgacctgaccctgtttgacttcaagcagggcatcctgtgctacccagcccccaaggcccaccctgtggccgtggccagcaagaagaggaagaagcccagcaggcctgccaagaccaggaagaggcaggtgggcccccagagcggggaggtgaggaaggaggcccccagagatgagaccaaggctgacacagacacagccccagccagcttccctgcccctggctgctgtgagaactgtggcatctccttctctggagatggcacccagaggcagaggctgaagaccctgtgcaaggactgccgggcccagagaattgccttcaaccgggagcagaggatgttcaagagccggggctgcggcgtgtgccggggctgccagacccaggaggactgtggccactgccccatctgcctgcggcccccccggcccggcctgcggcggcagtggaagtgtgtgcagaggcgctgcctgcggggcaagcacgcccggaggaagggcggctgtgacagcaagatggccgccaggagaagacctggggcccagcccctgcccccacctccacccagccagagccctgagcccacagagccccacccccgggccctggcccccagccccccagctgagttcatctactactgtgtggatgaagatgagctgccctacaccaacagacggcagaacagaaaatgtggggcctgtgccgcctgcctgcggaggatggactgtggccgctgtgacttctgctgtgacaagcccaagtttggaggcagcaaccagaagaggcagaagtgccgctggaggcagtgcctgcagtttgccatgaagaggctgctgcccagcgtgtggagcgagagtgaagatggagctggcagccccccaccctacagaagaaggaagaggcccagcagcgcccggcggcaccacctgggccccaccctgaagcccaccctggccaccaggacagcccagcctgaccacacccaggcccccaccaagcaggaggccggcggcggctttgtgctgcccccacctggaacagacctggtgttcctgcgggagggcgccagcagccctgtgcaggtgcccggccctgtggccgccagcacagaggccctgctgcaggaggcccagtgcagcggcctgtcctgggtggtggccctgccccaggtgaagcaggagaaggctgacacccaggatgagtggaccccaggcacagctgtgctgaccagccctgtgctggtgcccggctgccccagcaaggctgtggaccccggcctgcccagcgtgaagcaggagcccccagaccctgaggaggacaaggaggagaacaaggatgattctgccagcaagctggcccctgaggaggaggccggcggggccggcacccctgtgatcacagagatcttcagcctgggcggcacccgcttccgggacacagctgtgtggctgccccgctactaccacctggccctggactggaagtgcaactgtggctaccacctgtgctgccgctctgtgctggtgccctag

SEQ ID NO: 159566 - DNA, 1608 bp, synthetic construct
  misc_feature 1..1608: note = Description of Artificial Sequence: Synthetic coding sequence
  source 1..1608: mol_type = other DNA
atggccgaggactggctggactgcccagccctgggccctggctggaagagaagagaggtgttcaggaagagcggggccacctgtggccgcagtgacacctactaccagagccccactggagaccgcatccgcagcaaggtggagctgacccgctacctgggccctgcctgtgacctgaccctgtttgacttcaagcagggcatcctgtgctacccagcccccaaggcccaccctgtggccgtggccagcaagaagaggaagaagcccagcaggcctgccaagaccaggaagaggcaggtgggcccccagagcggggaggtgaggaaggaggcccccagagatgagaccaaggctgacacagacacagccccagccagcttccctgcccctggctgctgtgagaactgtggcatctccttctctggagatggcacccagaggcagaggctgaagaccctgtgcaaggactgccgggcccagagaattgccttcaaccgggagcagaggatgttcaagagggtgggctgtggggagtgtgccgcctgccaggtgacagaggactgtggggcctgcagcacctgcctgctgcagctgccccatgatgtggccagcggcctcttctgcaagtgtgagcggcggcgctgcctgcgcatcgtggagaggagccggggctgcggcgtgtgccggggctgccagacccaggaggactgtggccactgccccatctgcctgcggccccccaggcctggcctgcggcggcagtggaagtgtgtgcagaggcgctgcctgcggggcaagcacgcccggaggaaaggaggctgtgacagcaagatggccgcccggcggcggcctggggcccagcccctgcccccacctccacccagccagagccctgagcccacagagccccacccccgggccctggcccccagccccccagctgagttcatctactactgtgtggatgaagatgagctgaagaggctgctgcccagcgtgtggagcgagagtgaagatggagctggcagccccccaccctacagaagaaggaagaggcccagcagcgcccggcggcaccacctgggccccaccctgaagcccaccctggccaccaggacagcccagcctgaccacacccaggcccccaccaagcaggaggccggcggcggctttgtgctgcccccacctggaacagacctggtgttcctgcgggagggcgccagcagccctgtgcaggtgcccggccctgtggccgccagcacagaggccctgctgcaggccgtggaccccggcctgcccagcgtgaagcaggagcccccagaccctgaggaggacaaggaggagaacaaggatgattctgccagcaagctggcccctgaggaggaggccggcggggccggcacccctgtgatcacagagatcttcagcctgggcggcacccgcttccgggacacagctgtgtggctgccccgggccggcacccgggagggcaagatggatgtgaagtgtggccggcccaggacccagtggagcccccgggcccgggccggcacccatgaagatggcctggagcccatgtctgtgagccaccacctgcagctgaggtag

SEQ ID NO: 159567 - DNA, 1968 bp, synthetic construct
  misc_feature 1..1968: note = Description of Artificial Sequence: Synthetic coding sequence
  source 1..1968: mol_type = other DNA
atggccgaggactggctggactgcccagccctgggccctggctggaagagaagagaggtgttcaggaagagcggggccacctgtggccgcagtgacacctactaccagagccccactggagaccgcatccgcagcaaggtggagctgacccgctacctgggccctgcctgtgacctgaccctgtttgacttcaagcagggcatcctgtgctacccagcccccaaggcccaccctgtggccgtggccagcaagaagaggaagaagcccagcaggcctgccaagaccaggaagaggcaggtgggcccccagagcggggaggtgaggaaggaggcccccagagatgagaccaaggctgacacagacacagccccagccagcttccctgcccctggctgctgtgagaactgtggcatctccttctctggagatggcacccagaggcagaggctgaagaccctgtgcaaggactgccgggcccagagaattgccttcaaccgggagcagaggatgttcaagagggtgggctgtggggagtgtgccgcctgccaggtgacagaggactgtggggcctgcagcacctgcctgctgcagctgccccatgatgtggccagcggcctcttctgcaagtgtgagcggcggcgctgcctgcgcatcgtggagaggagccggggctgcggcgtgtgccggggctgccagacccaggaggactgtggccactgccccatctgcctgcggccccccaggcctggcctgcggcggcagtggaagtgtgtgcagaggcgctgcctgcggggcaagcacgcccggaggaaaggaggctgtgacagcaagatggccgcccggcggcggcctggggcccagcccctgcccccacctccacccagccagagccctgagcccacagagccccacccccgggccctggcccccagccccccagctgagttcatctactactgtgtggatgaagatgagctgcagccctacaccaacagacggcagaacagaaaatgtggggcctgtgccgcctgcctgcggaggatggactgtggccgctgtgacttctgctgtgacaagcccaagtttggaggcagcaaccagaagaggcagaagtgccgctggaggcagtgcctgcagtttgccatgaagaggctgctgcccagcgtgtggagcgagagtgaagatggagctggcagccccccaccctacagaagaaggaagaggcccagcagcgcccggcggcaccacctgggccccaccctgaagcccaccctggccaccaggacagcccagcctgaccacacccaggcccccaccaagcaggaggccggcggcggctttgtgctgcccccacctggaacagacctggtgttcctgcgggagggcgccagcagccctgtgcaggtgcccggccctgtggccgccagcacagaggccctgctgcaggaggcccagtgcagcggcctgtcctgggtggtggccctgccccaggtgaagcaggagaaggctgacacccaggatgagtggaccccaggcacagctgtgctgaccagccctgtgctggtgcccggctgccccagcaaggctgtggaccccggcctgcccagcgtgaagcaggagcccccagaccctgaggaggacaaggaggagaacaaggatgattctgccagcaagctggcccctgaggaggaggccggcggggccggcacccctgtgatcacagagatcttcagcctgggcggcacccgcttccgggacacagctgtgtggctgcccagcctgcagggccgccacagcggccgggaggatggctgcaaggtgtgggagacagaagatactgtggagcccaccagcacctcctggaacccccggggctggccaggcacccacgtgtccctgagccccccaccagcctccatgatgtgggtgtcctgccgccgctcctggtgccccagcagccagagctag

SEQ ID NO: 159568 - DNA, 1236 bp, synthetic construct
  misc_feature 1..1236: note = Description of Artificial Sequence: Synthetic coding sequence
  source 1..1236: mol_type = other DNA
atgagggcccaccctgggggcggccgctgctgcccagagcaggaggagggggagagcgctgctgggggcagcggggccggcggggacagcgccatcgagcagggcggccagggcagcgccctggcccccagccctgtgtctggagtgcggcgggagggcgcccggggcggcggccggggccggggccgctggaagcaggccggccggggcggcggcgtgtgtggccggggccggggccggggccggggccggggccggggccggggccggggccggggccggggccggcccccatctgggggcagcggcctgggcggagatggcggcggctgcggcggcggcggcagcggcggcggcggggccccccggcgggagcctgtgcccttccccagcggcagcgctggccctggcccccggggcccccgggccacagagagcggcaagaggatggactgcccagccctgcccccaggctggaagaaggaggaggtgatcaggaagagcggcctgtctgctgggaagagtgatgtgtactacttcagccccagcggcaagaagttccgcagcaagccccagctggcccgctacctgggcaacacagtggacctgagcagctttgacttcagaacaggcaagatgatgcccagcaagctgcagaagaacaagcagaggctgagaaatgaccccctgaaccagaacaagggcaagccagacctgaacaccaccctgcccatccggcagacagccagcatcttcaagcagcctgtgaccaaggtgaccaaccaccccagcaacaaggtgaagagtgacccccagaggatgaatgagcagccccggcagctgttctgggagaagaggctgcagggcctgagcgccagtgatgtgacagagcagatcatcaagaccatggagctgcccaagggcctgcagggcgtgggccctggcagcaatgatgagaccctgctgtctgctgtggccagcgccctgcacaccagcagcgcccccatcaccggccaggtgtctgctgctgtggagaagaacccagctgtgtggctgaacaccagccagcccctgtgcaaggccttcatcgtgacagatgaggacatcaggaagcaggaggagcgggtgcagcaggtgaggaagaagctggaggaggccctgatggctgacatcctgagcagagctgctgacacagaggagatggacatcgagatggattctggagatgaggcctag

SEQ ID NO: 159569 - DNA, 909 bp, synthetic construct
  misc_feature 1..909: note = Description of Artificial Sequence: Synthetic coding sequence
  source 1..909: mol_type = other DNA
atgagggcccaccctgggggcggccgctgctgcccagagcaggaggagggggagagcgctgctgggggcagcggggccggcggggacagcgccatcgagcagggcggccagggcagcgccctggcccccagccctgtgtctggagtgcggcgggagggcgcccggggcggcggccggggccggggccgctggaagcaggccggccggggcggcggcgtgtgtggccggggccggggccggggccggggccggggccggggccggggccggggccggggccggggccggcccccatctgggggcagcggcctgggcggagatggcggcggctgcggcggcggcggcagcggcggcggcggggccccccggcgggagcctgtgcccttccccagcggcagcgctggccctggcccccggggcccccgggccacagagagcggcaagaggatggactgcccagccctgcccccaggctggaagaaggaggaggtgatcaggaagagcggcctgtctgctgggaagagtgatgtgtactacttcagccccagcggcaagaagttccgcagcaagccccagctggcccgctacctgggcaacacagtggacctgagcagctttgacttcagaacaggcaagatgatgcccagcaagctgcagaagaacaagcagaggctgagaaatgaccccctgaaccagaacaagctgcgctggaacacccacaggcctgccccctggcacgccctgagccggctgtgcctgctgatccgctgcctgctgtgcctggagtgtgcctaccccctgcccctgcacctggtgaacagctacagcagcaagacccagctgcactgcctgcacctgtgggaggcctgcccagcctacagccggcagaaccagagcttccccccatag

SEQ ID NO: 159570 - DNA, 909 bp, synthetic construct; identical to SEQ ID NO: 159569
  misc_feature 1..909: note = Description of Artificial Sequence: Synthetic coding sequence
  source 1..909: mol_type = other DNA

SEQ ID NO: 159571 - DNA, 876 bp, synthetic construct
  misc_feature 1..876: note = Description of Artificial Sequence: Synthetic coding sequence
  source 1..876: mol_type = other DNA
atggagaggaagcgctgggagtgcccagccctgccccagggctgggagcgggaggaggtgccccggcgcagcggcctgtctgctggccacagagatgtgttctactacagccccagcggcaagaagttccgcagcaagccccagctggcccgctacctgggcggctccatggacctgagcacctttgacttcagaacaggcaagatgctgatgagcaagatgaacaagagccggcagagggtgcgctatgacagcagcaaccaggtgaagggcaagccagacctgaacacagccctgcctgtgcggcagacagccagcatcttcaagcagcctgtgaccaagatcaccaaccaccccagcaacaaggtgaagagtgacccccagaaggctgtggaccagccccggcagctgttctgggagaagaagctgagcggcctgaatgcctttgatattgctgaggagctggtgaagaccatggacctgcccaagggcctgcagggcgtgggccctggctgcacagatgagaccctgctgagcgccatcgccagcgccctgcacaccagcaccatgcccatcaccggccagctgtctgctgctgtggagaagaaccctggggtgtggctgaacaccacccagcccctgtgcaaggccttcatggtgacagatgaggacatcaggaagcaggaggagctggtgcagcaggtgaggaagaggctggaggaggccctgatggctgacatgctggcccacgtggaggagctggccagagatggagaggcccccctggacaaggcctgtgccgaggatgatgatgaagaagatgaggaggaggaggaggaggagccagaccctgaccctgagatggagcacgtgtag

SEQ ID NO: 159572 - DNA, 780 bp, synthetic construct
  misc_feature 1..780: note = Description of Artificial Sequence: Synthetic coding sequence
  source 1..780: mol_type = other DNA
atggagaggaagagccccagcggcaagaagttccgcagcaagccccagctggcccgctacctgggcggctccatggacctgagcacctttgacttcagaacaggcaagatgctgatgagcaagatgaacaagagccggcagagggtgcgctatgacagcagcaaccaggtgaagggcaagccagacctgaacacagccctgcctgtgcggcagacagccagcatcttcaagcagcctgtgaccaagatcaccaaccaccccagcaacaaggtgaagagtgacccccagaaggctgtggaccagccccggcagctgttctgggagaagaagctgagcggcctgaatgcctttgatattgctgaggagctggtgaagaccatggacctgcccaagggcctgcagggcgtgggccctggctgcacagatgagaccctgctgagcgccatcgccagcgccctgcacaccagcaccatgcccatcaccggccagctgtctgctgctgtggagaagaaccctggggtgtggctgaacaccacccagcccctgtgcaaggccttcatggtgacagatgaggacatcaggaagcaggaggagctggtgcagcaggtgaggaagaggctggaggaggccctgatggctgacatgctggcccacgtggaggagctggccagagatggagaggcccccctggacaaggcctgtgccgaggatgatgatgaagaagatgaggaggaggaggaggaggagccagaccctgaccctgagatggagcacgtgtag

SEQ ID NO: 159573 - DNA, 4485 bp, synthetic construct
  misc_feature 1..4485: note = Description of Artificial Sequence: Synthetic coding sequence
  source 1..4485: mol_type = other DNA
atgaatggaggcaaggaatgtgatggaggagacaaggagggcggcctgcctgccatccaggtgcctgtgggctggcagaggagagtggaccagaatggagtgctgtatgtgagccccagcggcagcctgctgagctgcctggagcaggtgaagacctacctgctgacagatggcacctgcaagtgtggcctggagtgccccctcatcctgcccaaggtgttcaactttgaccccggggctgctgtgaagcagaggacagcagaagatgtgaaggcagatgaagatgtgaccaagctgtgcatccacaagaggaagatcatcgctgtggccaccctgcacaagtccatggaggccccccaccccagcctggtgctgaccagccctgggggcggcaccaatgccacccctgtggtgcccagccgggccgccacccccaggtctgtgaggaacaagagccatgagggcatcaccaacagcgtgatgcctgagtgcaagaaccccttcaagctgatgattggcagcagcaatgccatgggccgcctgtatgtgcaggagctgcccggcagccagcagcaggagctgcaccctgtgtacccccggcagaggctgggcagcagcgagcacggccagaagagccccttccggggcagccacggcggcctgcccagccctgccagcagcggcagccagatctatggagatggcagcatcagccccaggacagaccccctgggcagcccagatgtgttcaccaggagcaaccctggcttccacggggcccccaacagcagccccatccacctgaacagaacacccctgagccccccatctgtgatgctgcacggcagccctgtgcagagcagctgtgccatggccggccgcaccaacatccccctgagccccaccctgaccaccaagagccctgtgatgaagaagcccatgtgcaacttcagcaccaacatggagatcccccgggccatgttccaccacaagccaccccagggccccccacctcctcctccacccagctgtgccctgcagaagaagcccctgaccagcgagaaggaccccctgggcatcctggaccccatccccagcaagcctgtgaaccagaaccctgtgatcatcaaccccaccagcttccacagcaatgtgcacagccaggtgcccatgatgaatgtgtccatgcctcctgctgtggtgcccctgcccagcaacctgcccctgcccaccgtgaagccaggccacatgaaccacggcagccacgtgcagagggtgcagcacagcgccagcaccagcctgagccccagccctgtgaccagccctgtgcacatgatgggcaccggcatcggcagaattgaggccagcccccagaggagccgcagcagcagcaccagcagtgaccacggcaacttcatgatgcctcctgtgggcccccaggccaccagcagcggcatcaaggtgcccccaagaagccccaggagcaccatcggcagcccccggcccagcatgcccagcagccccagcaccaagagtgatggccaccaccagtacaaggacatccccaaccccctgattgctggcatcagcaatgtgctgaacacccccagcagcgctgccttccccacagccagcgctggcagcagctctgtgaagagccagcccggcctgctgggcatgcccctgaaccagatcctgaaccagcacaatgctgccagcttccctgccagcagcctgctgtctgctgctgccaaggcccagctggccaaccagaacaagctggccggcaacaacagcagcagcagcagcaacagcggggctgtggccggcagcggcaacacagagggccacagcaccctgaacaccatgtttcctcccacagccaacatgctgctgcccaccggggagggccagagcggccgggccgccctgcgggacaagctgatgagccagcagaaggatgccctgaggaagaggaagcagccccccaccaccgtgctgagcctgctgcggcagagccagatggacagcagcgctgtgcccaagccaggccctgacctgctgaggaagcagggccagggcagcttccccatcagctccatgagccagctgctgcagagcatgagctgccagagcagccacctgagcagcaacagcaccccaggctgtggggccagcaacacagccctgccctgcagcgccaaccagctgcacttcacagaccccagcatgaacagctctgtgctgcagaacatccccctgcggggggaggccgtgcactgccacaatgccaacaccaactttgtgcacagcaacagccctgtgcccaaccaccacctggccggcctcatcaaccagatccaggccagcggcaactgtggcatgctgagccagagcggcatggccctgggcaacagcctgcaccccaaccccccccagagccgcatcagcaccagcagcacccctgtgatccccaacagcatcgtgtcctcctacaaccagaccagcagcgaggccggcggcagcggccccagcagcagcatcgccatcgccggcaccaaccacccagccatcaccaagaccacctctgtgctgcaggatggagtcatcgtgaccacagctgctggcaaccccctgcagagccagctgcccatcggcagtgacttcccctttgtgggccaggagcacgccctgcacttccccagcaacagcaccagcaacaaccacctgccccaccccctgaaccccagcctgctgagcagcctgcccatcagcctgcctgtgaaccagcagcacctgctgaaccagaacctgctgaacatcctgcagcccagcgctggggagggggacatgagcagcatcaacaacaccctgagcaaccaccagctgacccacctgcagagcctgctgaacaacaaccagatgtttcctcccaaccagcagcagcagcagctgctgcagggctaccagaacctgcaggccttccagggccagagcaccatcccctgcccagccaacaacaaccccatggcctgcctcttccagaacttccaggtgaggatgcaggaggatgctgccctgctgaacaagaggatcagcacccagcccggcctgacagccctgcctgagaaccccaacaccaccctgccccccttccaggacaccccctgtgagctgcagcccagaattgaccccagcctgggccagcaggtgaaggatggcctggtggtgggcggccctggagatgcctctgtggatgccatctacaaggctgtggtggatgctgccagcaagggcatgcaggtggtgatcaccacagctgtgaacagcaccacccagatcagccccatcccagccctgagcgccatgtctgccttcaccgccagcatcggggaccccctgaacctgagcagcgctgtgtctgctgtgattcatggaagaaacatgggcggcgtggaccatgatggccgcctgaggaacagcagaggagcccggctgcccaagaacctggaccacggcaagaatgtgaatgaaggagatggctttgagtacttcaagagcgccagctgccacaccagcaagaagcagtgggatggagagcagagccccagaggagagaggaaccgctggaagtatgaggagttcctggaccaccctggccacatccacagcagcccctgccacgagcggcccaacaacgtgtccaccctgcccttcctgcctggagagcagcaccccatcctgctgccccccaggaactgccctggggacaagatcctggaggagaacttccgctacaacaactacaagaggaccatgatgtccttcaaggagcggctggagaacacagtggagcgctgtgcccacatcaatggaaaccggccccggcagagccggggctttggagagctgctgagcacagccaagcaggacctggtgctggaggagcagagccccagcagcagcaacagcctggagaacagcctggtgaaggactacatccactacaatggagacttcaatgccaagtctgtgaatggctgtgtgcccagccccagtgatgccaagagcatcagcagtgaagatgacctgagaaatccagacagccccagcagcaatgaactcatccactaccggcccaggaccttcaacgtgggggacctggtgtggggccagatcaagggcctgacctcctggccaggcaagctggtgcgggaggatgatgtgcacaacagctgccagcagagccctgaggagggcaaggtggagcctgagaagctgaagaccctgacagagggcctggaggcctacagccgggtgaggaagaggaacaggaagagcggcaagctgaacaaccacctggaggccgccatccacgaggccatgtctgagctggacaagatgtctggaacagtgcaccagatcccccagggcgaccggcagatgaggcctcccaagcccaagaggaggaagatcagcaggtag

SEQ ID NO: 159574 - DNA, 2178 bp, synthetic construct
  misc_feature 1..2178: note = Description of Artificial Sequence: Synthetic coding sequence
  source 1..2178: mol_type = other DNA
atggctgctgccagcgctgtgtctgtgctgctggtggccgctgagaggaaccgctggcaccggctgcccagcctgctgctgccccccaggacctgggtgtggaggcagaggaccatgaagtacaccacagccactggaagaaacatcaccaaggtgctgattgccaacagaggagagatcgcctgccgggtgatgaggacagccaagaagctgggcgtgcagacagtggccgtgtacagcgaggccgacaggaacagcatgcacgtggacatggctgatgaggcctacagcatcggccctgcccccagccagcagagctacctgtccatggagaagatcatccaggtggccaagaccagcgctgcccaggccatccaccctggctgcggcttcctgtctgagaacatggagtttgctgagctgtgcaagcaggagggcatcatcttcatcggccccccaccttctgccatccgggacatgggcatcaagagcaccagcaagagcatcatggctgctgctggggtgcctgtggtggagggctaccacggggaggaccagagcgaccagtgcctgaaggagcacgcccggcgcatcggctaccctgtgatgatcaaggctgtgcggggcggcggcggcaagggcatgagaattgtgcgctctgagcaggagttccaggagcagctggagagcgcccggcgggaggccaagaagagcttcaatgatgatgccatgctgattgagaagtttgtggacacccccaggcatgtggaggtgcaggtgtttggagaccaccacggcaatgctgtgtacctgtttgagcgggactgcagcgtgcagaggaggcaccagaagatcatcgaggaggccccagcccctggcatcaagtctgaggtgaggaagaagctgggggaggccgctgtgcgggccgccaaggctgtgaactacgtgggcgccggcaccgtggagttcatcatggacagcaagcacaacttctgcttcatggagatgaacacccggctgcaggtggagcaccctgtgacagagatgatcactggaacagacctggtggagtggcagctgagaattgctgctggggagaagatccccctgagccaggaggagatcaccctgcagggccacgcctttgaggcccgcatctatgcagaggaccccagcaacaacttcatgcctgtggccggccccctggtgcacctgagcacccccagggctgaccccagcacccgcatcgagaccggggtgcggcagggagatgaggtgtctgtgcactatgaccccatgattgccaagctggtggtgtgggccgctgaccggcaggccgccctgaccaagctgcgctacagcctgcggcagtacaacatcgtgggcctgcacaccaacatcgacttcctgctgaacctgagcggccaccctgagtttgaagctggaaatgtgcacacagacttcatcccccagcaccacaagcagctgctgctgagcaggaaggctgctgccaaggagagcctgtgccaggccgccctgggcctcatcctgaaggagaaggccatgacagacaccttcaccctgcaggcccatgaccagttcagccccttcagcagcagcagtggaagaaggctgaacatctcctacaccaggaacatgaccctgaaggatggcaagaacaacgtggccatcgctgtgacctacaaccatgatggcagctacagcatgcagatcgaggacaagaccttccaggtgctgggcaacctgtacagcgagggggactgcacctacctgaagtgcagcgtgaatggagtggccagcaaggccaagctgatcatcctggagaacaccatctacctgttcagcaaggagggcagcattgaaattgacatccctgtgcccaagtacctgagctctgtgagcagccaggagacccagggcggccccctggcccccatgacaggcaccatcgagaaggtgtttgtgaaggccggggacaaggtgaaggccggggacagcctgatggtgatgattgccatgaagatggagcacaccatcaagagccccaaggatggcaccgtgaagaaggtgttctaccgggagggcgcccaggccaacagacacacccccctggtggagtttgaggaggaggagagtgacaagcgggagagcgagtag

SEQ ID NO: 159575 - DNA, 1728 bp, synthetic construct
  misc_feature 1..1728: note = Description of Artificial Sequence: Synthetic coding sequence
  source 1..1728: mol_type = other DNA
atggagaagatcatccaggtggccaagaccagcgctgcccagcacatccagagcatcatggctgctgctggggtgcctgtggtggagggctaccacggggaggaccagagcgaccagtgcctgaaggagcacgcccggcgcatcggctaccctgtgatgatcaaggctgtgcggggcggcggcggcaagggcatgagaattgtgcgctctgagcaggagttccaggagcagctggagagcgcccggcgggaggccaagaagagcttcaatgatgatgccatgctgattgagaagtttgtggacacccccaggcatgtggaggtgcaggtgtttggagaccaccacggcaatgctgtgtacctgtttgagcgggactgcagcgtgcagaggaggcaccagaagatcatcgaggaggccccagcccctggcatcaagtctgaggtgaggaagaagctgggggaggccgctgtgcgggccgccaaggctgtgaactacgtgggcgccggcaccgtggagttcatcatggacagcaagcacaacttctgcttcatggagatgaacacccggctgcaggtggagcaccctgtgacagagatgatcactggaacagacctggtggagtggcagctgagaattgctgctggggagaagatccccctgagccaggaggagatcaccctgcagggccacgcctttgaggcccgcatctatgcagaggaccccagcaacaacttcatgcctgtggccggccccctggtgcacctgagcacccccagggctgaccccagcacccgcatcgagaccggggtgcggcagggagatgaggtgtctgtgcactatgaccccatgattgccaagctggtggtgtgggccgctgaccggcaggccgccctgaccaagctgcgctacagcctgcggcagtacaacatcgtgggcctgcacaccaacatcgacttcctgctgaacctgagcggccaccctgagtttgaagctggaaatgtgcacacagacttcatcccccagcaccacaagcagctgctgctgagcaggaaggctgctgccaaggagagcctgtgccaggccgccctgggcctcatcctgaaggagaaggccatgacagacaccttcaccctgcaggcccatgaccagttcagccccttcagcagcagcagtggaagaaggctgaacatctcctacaccaggaacatgaccctgaaggatggcaagaacaacgtggccatcgctgtgacctacaaccatgatggcagctacagcatgcagatcgaggacaagaccttccaggtgctgggcaacctgtacagcgagggggactgcacctacctgaagtgcagcgtgaatggagtggccagcaaggccaagctgatcatcctggagaacaccatctacctgttcagcaaggagggcagcattgaaattgacatccctgtgcccaagtacctgagctctgtgagcagccaggagacccagggcggccccctggcccccatgacaggcaccatcgagaaggtgtttgtgaaggccggggacaaggtgaaggccggggacagcctgatggtgatgattgccatgaagatggagcacaccatcaagagccccaaggatggcaccgtgaagaaggtgttctaccgggagggcgcccaggccaacagacacacccccctggtggagtttgaggaggaggagagtgacaagcgggagagcgagtag

SEQ ID NO: 159576 - DNA, 1425 bp, synthetic construct
  misc_feature 1..1425: note = Description of Artificial Sequence: Synthetic coding sequence
  source 1..1425: mol_type = other DNA
atggctgctgccagcgctgtgtctgtgctgctggtggccgctgagaggaaccgctggcaccggctgcccagcctgctgctgccccccaggacctgggtgtggaggcagaggaccatgaagtacaccacagccacagatgaggcctacagcatcggccctgcccccagccagcagagctacctgtccatggagaagatcatccaggtggccaagaccagcgctgcccaggccatccaccctggctgcggcttcctgtctgagaacatggagtttgctgagctgtgcaagcaggagggcatcatcttcatcggccccccacccagcgccatccgggacatgggcatcaagagcaccagcaagagcatcatggctgctgctggggtgcctgtggtggagggctaccatggagaggaccagagcgaccagtgcctgaaggagcacgccaggagaattggctaccctgtgatgatcaaggctgtgcggggcggcggcggcaagggcatgagaattgtgcgctctgagcaggagttccaggagcagctggagagcgcccggcgggaggccaagaagagcttcaatgatgatgccatgctgattgagaagtttgtggacacccccaggcatgtggaggtgcaggtgtttggagaccaccacggcaatgctgtgtacctgtttgagcgggactgcagcgtgcagaggaggcaccagaagatcatcgaggaggccccagcccctggcatcaagtctgaggtgaggaagaagctgggggaggccgctgtgcgggccgccaaggctgtgaactacgtgggcgccggcaccgtggagttcatcatggacagcaagcacaacttctgcttcatggagatgaacacccggctgcaggtggagcaccctgtgacagagatgatcaccggcacagacctggtggagtggcagctgagaattgctgctggggagaagatccccctgagccaggaggagatcaccctgcagggccacgcctttgaggcccgcatctatgcagaggaccccagcaacaacttcatgcctgtggccggccccctggtgcacctgagcacccccagggctgaccccagcaccagaattgaaacaggagtgcggcagggagatgaggtgtctgtgcactatgaccccatgattgccaagctggtggtgtgggccgctgaccggcaggccgccctgaccaagctgcgctacagcctgcggcagtacaacatcgtgggcctgcacaccaacctgaccagctacagcacctgcctggccacccagagcctgaagctgggcacctgcaccctcatcagcagcctgaacaccaccaacagctgctgcagcgtgggccgcctgcagcccaagagcctgtatgcccggcagccctgggtgagcagcagcaggaggaagccctag

SEQ ID NO: 159577 - DNA, 1281 bp, synthetic construct
  misc_feature 1..1281: note = Description of Artificial Sequence: Synthetic coding sequence
  source 1..1281: mol_type = other DNA
atggagtttgctgagctgtgcaagcaggagggcatcatcttcatcggccccccacccagcgccatccgggacatgggcatcaagagcaccagcaagagcatcatggctgctgctggggtgcctgtggtggagggctaccatggagaggaccagagcgaccagtgcctgaaggagcacgccaggagaattggctaccctgtgatgatcaaggctgtgcggggcggcggcggcaagggcatgagaattgtgcgctctgagcaggagttccaggagcagctggagagcgcccggcgggaggccaagaagagcttcaatgatgatgccatgctgattgagaagtttgtggacacccccaggcatgtggaggtgcaggtgtttggagaccaccacggcaatgctgtgtacctgtttgagcgggactgcagcgtgcagaggaggcaccagaagatcatcgaggaggccccagcccctggcatcaagtctgaggtgaggaagaagctgggggaggccgctgtgcgggccgccaaggctgtgaactacgtgggcgccggcaccgtggagttcatcatggacagcaagcacaacttctgcttcatggagatgaacacccggctgcaggtggagcaccctgtgacagagatgatcaccggcacagacctggtggagtggcagctgagaattgctgctggggagaagatccccctgagccaggaggagatcaccctgcagggccacgcctttgaggcccgcatctatgcagaggaccccagcaacaacttcatgcctgtggccggccccctggtgcacctgagcacccccagggctgaccccagcaccagaattgaaacaggagtgcggcagggagatgaggtgtctgtgcactatgaccccatgattgccaagctggtggtgtgggccgctgaccggcaggccgccctgaccaagctgcgctacagcctgcggcagtacaacatcgtgggcctgcacaccaacatcgacttcctgctgaacctgagcggccaccctgagtttgaggccggaaatgtgcacacagacttcatcccccagcaccacaagcagctgctgctgagcaggaaggccgccgccaaggagagcctgtgccaggccgccctgggcctcatcctgaaggagaaggccatgacagacaccttcaccctgcaggcccatgaccagttcagccccttcagcagcagcagcggccggcggctgaacatctcctacaccaggaacatgaccctgaaggatggcaagaacaactag

SEQ ID NO: 159578 - DNA, 603 bp, synthetic construct
  misc_feature 1..603: note = Description of Artificial Sequence: Synthetic coding sequence
  source 1..603: mol_type = other DNA
atggagaagatcatccaggtggccaagaccagcgctgcccaggccatccaccctggctgcggcttcctgtctgagaacatggagtttgctgagctgtgcaagcaggagggcatcatcttcatcggccccccacccagcgccatccgggacatgggcatcaagagcaccagcaagagcatcatggctgctgctggggtgcctgtggtggagggctaccatggagaggaccagagcgaccagtgcctgaaggagcacgccaggagaattggctaccctgtgatgatcaaggctgtgcggggcggcggcggcaagggcatgagaattgtgcgctctgagcaggagttccaggagcagctggagagcgcccggcgggaggccaagaagagcttcaatgatgatgccatgctgattgagaagtttgtggacacccccaggcatgtggaggtgcaggtgtttggagaccaccacggcaatgctgtgtacctgtttgagcgggactgcagcgtgcagaggaggcaccagaagatcatcgaggaggccccagcccctggcatcaagtctgaggtgaggaagaagggccgcagctgcagccagagctgctag

SEQ ID NO: 159579 - DNA, 1578 bp, synthetic construct
  misc_feature 1..1578: note = Description of Artificial Sequence: Synthetic coding sequence
  source 1..1578: mol_type = other DNA
atgtgggccgtgctgcggctggccctgcggccctgtgcccgggccagccctgctggcccccgggcctaccacggggacagcgtggccagcctgggcacccagcctgacctgggcagcgccctgtaccaggagaactacaagcagatgaaggccctggtgaaccagctgcacgagcgggtggagcacatcaagctgggcggcggggagaaggcccgggccctgcacatcagccggggcaagctgctgccccgggagagaattgacaacctgattgatcctggcagccccttcctggagctgagccagtttgctggctaccagctgtatgacaatgaggaggtgcctgggggcggcatcatcactggaattggccgggtgtctggagtggagtgcatgatcatcgccaatgatgccaccgtgaagggcggggcctactaccctgtgacagtgaagaagcagctgcgggcccaggagatcgccatgcagaaccggctgccctgcatctacctggtggacagcggcggggcctacctgccccggcaggctgatgtgtttcctgaccgggaccactttggaagaaccttctacaaccaggccatcatgagcagcaagaacatcgcccaggtgaaggccgccactggagaggaggtgtctgctgaggacctgggcggcgctgacctgcactgcaggaagagcggcgtgtctgaccactgggccctggatgaccaccacgccctgcacctgaccaggaaggtggtgaggaacctgaactaccagaagaagctggatgtgaccatcgagcccagcgaggagcccctcttcccagcagatgagctgtatggcatcgtgggcgccaacctgaagaggagctttgatgtgcgggaggtgattgcccgcatcgtggatggcagccgcttcacagagttcaaggccttctatggagacaccctggtgactggatttgcccgcatcttcggctaccctgtgggcatcgtgggcaacaatggagtgctcttcagcgagagcgccaagaagggcacccactttgtgcagctgtgctgccagaggaacatccccctgctcttcctgcagaacatcaccggcttcatggtgggccgggagtatgaagctgagggcatcgccaaggatggagccaagatggtggccgctgtggcctgtgcccaggtgcccaagatcaccctcatcattggaggcagctatggagctggcaactacggcatgtgtggccgggcctacagcccccgcttcctgtacatctggcccaatgcccgcatctctgtgatgggcggggagcaggccgccaacgtgctggccaccatcaccaaggaccagagggcccgggagggcaagcagttcagcagcgcagatgaagctgccctgaaggagcccatcatcaagaagtttgaggaggagggcaacccctactacagcagcgcccgggtgtgggatgatggcatcatcgaccctgctgacacccggctggtgctgggcctgtccttctctgctgccctgaatgcccccatcgagaagacagactttggcatcttcaggatgtag

SEQ ID NO: 159580 - DNA, 1692 bp, synthetic construct
  misc_feature 1..1692: note = Description of Artificial Sequence: Synthetic coding sequence
  source 1..1692: mol_type = other DNA
atgtgggccgtgctgcggctggccctgcggccctgtgcccgggccagccctgctggcccccgggcctaccacggggacagcgtggccagcctgggcacccagcctgacctgggcagcgccctgtaccaggagaactacaagcagatgaaggccctggtgaaccagctgcacgagcgggtggagcacatcaagctgggcggcggggagaaggcccgggccctgcacatcagccggggcaagctgctgccccgggagagaattgacaacctgattgatcctggcagccccttcctggagctgagccagtttgctggctaccagctgtatgacaatgaggaggtgcctgggggcggcatcatcactggaattggccgggtgtctggagtggagtgcatgatcatcgccaatgatgccaccgtgaagggcggggcctactaccctgtgacagtgaagaagcagctgcgggcccaggagatcgccatgcagaaccggctgccctgcatctacctggtggacagcggcggggcctacctgccccggcaggctgatgtgtttcctgaccgggaccactttggaagaaccttctacaaccaggccatcatgagcagcaagaacatcgcccagattgctgtggtgatgggcagctgcacagctgggggcgcctacgtgcctgccatggctgatgagaacatcatcgtgaggaagcagggcaccatcttcctggccggcccccccctggtgaaggccgccactggagaggaggtgtctgctgaggacctgggcggcgctgacctgcactgcaggaagagcggcgtgtctgaccactgggccctggatgaccaccacgccctgcacctgaccaggaaggtggtgaggaacctgaactaccagaagaagctggatgtgaccatcgagcccagcgaggagcccctcttcccagcagatgagctgtatggcatcgtgggcgccaacctgaagaggagctttgatgtgcgggaggtgattgcccgcatcgtggatggcagccgcttcacagagttcaaggccttctatggagacaccctggtgactggatttgcccgcatcttcggctaccctgtgggcatcgtgggcaacaatggagtgctcttcagcgagagcgccaagaagggcacccactttgtgcagctgtgctgccagaggaacatccccctgctcttcctgcagaacatcaccggcttcatggtgggccgggagtatgaagctgagggcatcgccaaggatggagccaagatggtggccgctgtggcctgtgcccaggtgcccaagatcaccctcatcattggaggcagctatggagctggcaactacggcatgtgtggccgggcctacagcccccgcttcctgtacatctggcccaatgcccgcatctctgtgatgggcggggagcaggccgccaacgtgctggccaccatcaccaaggaccagagggcccgggagggcaagcagttcagcagcgcagatgaagctgccctgaaggagcccatcatcaagaagtttgaggaggagggcaacccctactacagcagcgcccgggtgtgggatgatggcatcatcgaccctgctgacacccggctggtgctgggcctgtccttctctgctgccctgaatgcccccatcgagaagacagactttggcatcttcaggatgtag

SEQ ID NO: 159581 - DNA, 870 bp, synthetic construct
  misc_feature 1..870: note = Description of Artificial Sequence: Synthetic coding sequence
  source 1..870: mol_type = other DNA
atggccaagcacatccagaaggagatccagaggggcgtggagagctgggtgtccctgggcaacagaagaccccacctgagcatcatcctggtgggggacaacccagccagccacacctacgtgaggaacaagatccgggccgccagcgctgtgggcatctgcagcgagctgatcctgaagcccaaggatgtgtcccaggaggagctgctggatgtgacagaccagctgaacatggacccccgggtgtctggcatcctggtgcagctgcccctgcctgaccacgtggatgagaggaccatctgcaatggcatcgcccctgagaaggatgtggatggcttccacatcatcaacatcggccgcctgtgcctggaccagcacagcctcatcccagccacagccagcgctgtgtgggagatcatcaagaggacaggcatccagaccttcggcaagaatgtggtggtggccggccgcagcaagaatgtgggcatgcccatcgccatgctgctgcacacagatggagaacatgagaggcctggaggagatgccaccgtgaccatcgcccaccgctacacccccaaggagcagctgaagatccacacccagctggccgacatcatcatcgtggccgccggcatccccaagctgatcaccagtgacatggtgaaggagggcgctgctgtgattgatgtgggcatcaactacgtgcatgaccctgtgacaggcaagaccaagctggtgggagatgtggactttgaagctgtgaagaagaaggccggcttcatcacccctgtgcctggaggagtgggccccatgacagtggccatgctgctgaagaacaccctgctggccgccaagaagatcatctactag

SEQ ID NO: 159582 - DNA, 672 bp, synthetic construct
  misc_feature 1..672: note = Description of Artificial Sequence: Synthetic coding sequence
  source 1..672: mol_type = other DNA
atggccaagcacatccagaaggagatccagaggggcgtggagagctgggtgtccctgggcaacagaagaccccacctgagcatcatcctggtgggggacaacccagccagccacacctacgtgaggaacaagatccgggccgccagcgctgtgggcatctgcagcgagctgatcctgaagcccaaggatgtgtcccaggaggagctgctggatgtgacagaccagctgaacatggacccccgggtgtctggcatcctggtgcagctgcccctgcctgaccacgtggatgagaggaccatctgcaatggcatcgcccctgagaaggatgtggatggcttccacatcatcaacatcggccgcctgtgcctggaccagcacagcctcatcccagccacagccagcgctgtgtgggagatcatcaagaggacaggcatccagaccttcggcaagaatgtggtggtggccggccgcagcaagaatgtgggcatgcccatcgccatgctgctgcacacagatggagaacatgagaggcctggaggagatgccaccgtgaccatcgcccaccgctacacccccaaggagcagctgaagatccacacccagctggccgacatcatcatcgtggccgctgagcgcttccaccactttgcccaggacctgagcaacagctag

SEQ ID NO: 159583 - DNA, 762 bp, synthetic construct
  misc_feature 1..762: note = Description of Artificial Sequence: Synthetic coding sequence
  source 1..762: mol_type = other DNA
atggccaagcacatccagaaggagatccagaggggcgtggagagctgggtgtccctgggcaacagaagaccccacctgagcatcatcctggtgggggacaacccagccagccacacctacgtgaggaacaagatccgggccgccagcgctgtgggcatctgcagcgagctgatcctgaagcccaaggatgtgtcccaggaggagctgctggatgtgacagaccagctgaacatggacccccgggtgtctggcatcctggtgcagctgcccctgcctgaccacgtggatgagaggaccatctgcaatggcatcgcccctgagaaggatgtggatggcttccacatcatcaacatcggccgcctgtgcctggaccagcacagcctcatcccagccacagccagcgctgtgtgggagatcatcaagaggacaggcatccagaccttcggcaagaatgtggtggtggccggccgcagcaagaatgtgggcatgcccatcgccatgctgctgcacacagatggagaacatgagaggcctggaggagatgccaccgtgaccatcgcccaccgctacacccccaaggagcagctgaagatccacacccagctggccgacatcatcatcgtggccgccggcatccccaagctgatcaccagtgacatggtgaaggagggcgctgctgtgattgatgtgggcatcaactacgtgcatgaccctgtgacaggcaagaccaagctggtgggagatgtggactttgaggcctag

SEQ ID NO: 159584 - DNA, 1044 bp, synthetic construct
  misc_feature 1..1044: note = Description of Artificial Sequence: Synthetic coding sequence
  source 1..1044: mol_type = other DNA
atgacagtgcctgtgcggggcttcagcctgctgcggggccgcctgggccgggccccagccctgggccgcagcacagcccccagcgtgcgggcccctggagagcccggcagcgccttccggggcttccgcagcagtggagtgagacatgaggccatcatcatctctggaacagagatggccaagcacatccagaaggagatccagaggggcgtggagagctgggtgtccctgggcaacagaagaccccacctgagcatcatcctggtgggggacaacccagccagccacacctacgtgaggaacaagatccgggccgccagcgctgtgggcatctgcagcgagctgatcctgaagcccaaggatgtgtcccaggaggagctgctggatgtgacagaccagctgaacatggacccccgggtgtctggcatcctggtgcagctgcccctgcctgaccacgtggatgagaggaccatctgcaatggcatcgcccctgagaaggatgtggatggcttccacatcatcaacatcggccgcctgtgcctggaccagcacagcctcatcccagccacagccagcgctgtgtgggagatcatcaagaggacaggcatccagaccttcggcaagaatgtggtggtggccggccgcagcaagaatgtgggcatgcccatcgccatgctgctgcacacagatggagaacatgagaggcctggaggagatgccaccgtgaccatcgcccaccgctacacccccaaggagcagctgaagatccacacccagctggccgacatcatcatcgtggccgccggcatccccaagctgatcaccagtgacatggtgaaggagggcgctgctgtgattgatgtgggcatcaactacgtgcatgaccctgtgacaggcaagaccaagctggtgggagatgtggactttgaagctgtgaagaagaaggccggcttcatcacccctgtgcctggaggagtgggccccatgacagtggccatgctgctgaagaacaccctgctggccgccaagaagatcatctactag

SEQ ID NO: 159585 - DNA, 441 bp, synthetic construct
  misc_feature 1..441: note = Description of Artificial Sequence: Synthetic coding sequence
  source 1..441: mol_type = other DNA
atggacccccgggtgtctggcatcctggtgcagctgcccctgcctgaccacgtggatgagaggaccatctgcaatggaattgcccctgagaaggatgtggatggcttccacatcatcaacatcggccgcctgtgcctggaccagcacagcctcatcccagccacagccagcgctgtgtgggagatcatcaagaggacaggcatccagaccttcggcaagaatgtggtggtggccggccgcagcaagaatgtgggcatgcccatcgccatgctgctgcacacagatggagagcacgagaggcctggaggagatgccaccgtgaccatcgcccaccgctacacccccaaggagcagctgaagatccacacccagctggccgacatcatcatcgtggccgctgagcgcttccaccactttgcccaggacctgagcaacagctag

SEQ ID NO: 159586 - DNA, 1257 bp, synthetic construct
  misc_feature 1..1257: note = Description of Artificial Sequence: Synthetic coding sequence
  source 1..1257: mol_type = other DNA
atgcccatgctgctgccccacccccaccagcacttcctgaagggcctgctgcgggcccccttccgctgctaccacttcatcttccacagcagcacccacctgggcagcggcatcccctgtgcccagcccttcaacagcctgggcctgcactgcaccaagtggatgctgctgagtgatggcctgaagaggaagctgtgtgtgcagaccaccctgaaggaccacacagagggcctgagtgacaaggagcagagatttgtggacaagctgtacacaggcctcatccagggccagagggcctgcctggccgaggccatcaccctggtggagagcacccacagcaggaagaaggagctggcccaggtgctgctgcagaaggtgctgctgtaccaccgggagcaggagcagagcaacaagggcaagcccctggccttccgggtgggcctgagcggccccccaggggccggcaagagcaccttcatcgagtactttgggaagatgctgacagagcggggccacaagctgtctgtgctggccgtggaccccagcagctgcaccagcggcggcagcctgctgggggacaagaccaggatgacagagctgagccgggacatgaatgcctacatccggcccagccccacccggggcaccctgggcggcgtgaccaggaccaccaatgaggccatcctgctgtgtgagggcgccggctatgacatcatcctgattgaaacagtgggcgtgggccagagcgagtttgctgtggccgacatggtggacatgtttgtgctgctgctgcccccagctggaggagatgagctgcagggcatcaagaggggcatcatcgagatggctgacctggtggccgtgaccaagagtgatggagacctgattgtgcctgcccggcgcatccaggccgagtatgtgtctgccctgaagctgctgaggaagaggagccaggtgtggaagcccaaggtgatccgcatcagcgcccggtctggagagggcatcagcgagatgtgggacaagatgaaggacttccaggacctgatgctggccagcggggagctgacagccaagaggaggaagcagcagaaggtgtggatgtggaacctgatccaggagagcgtgctggagcacttccgcacccaccccaccgtgcgggagcagatccccctgctggagcagaaggtgctgattggagccctgagccctggcctggccgctgacttcctgctgaaggccttcaagagccgggactag

SEQ ID NO: 159587 - DNA, 1275 bp, synthetic construct
  misc_feature 1..1275: note = Description of Artificial Sequence: Synthetic coding sequence
  source 1..1275: mol_type = other DNA
atgcccatgctgctgccccacccccaccagcacttcctgaagggcctgctgcgggcccccttccgctgctaccacttcatcttccacagcagcacccacctgggcagcggcatcccctgtgcccagcccttcaacagcctgggcctgcactgcaccaagtggatgctgctgagtgatggcctgaagaggaagctgtgtgtgcagaccaccctgaaggaccacacagagggcctgagtgacaaggagcagagatttgtggacaagctgtacacaggcctcatccagggccagagggcctgcctggccgaggccatcaccctggtggagagcacccacagcaggaagaaggagctggcccaggtgctgctgcagaaggtgctgctgtaccaccgggagcaggagcagagcaacaagggcaagcccctggccttccgggtgggcctgagcggccccccaggggccggcaagagcaccttcatcgagtactttgggaagatgctgacagagcggggccacaagctgtctgtgctggccgtggaccccagcagctgcaccagcggcggcagcctgctgggggacaagaccaggatgacagagctgagccgggacatgaatgcctacatccggcccagccccacccggggcaccctgggcggcgtgaccaggaccaccaatgaggccatcctgctgtgtgagggcgccggctatgacatcatcctgattgaaacagtgggcgtgggccagagcgagtttgctgtggccgacatggtggacatgtttgtgctgctgctgcccccagctggaggagatgagctgcagggcatcaagaggggcatcatcgagatggctgacctggtggccgtgaccaagagtgatggagacctgattgtgcctgcccggcgcatccaggccgagtatgtgtctgccctgaagctgctgaggaagaggagccaggtgtggaagcccaaggtgatccgcatcagcgcccggtctggagagggcatcagcgagatgtgggacaagatgaaggacttccaggacctgatgctggccagcggggagctgacagccaagaggaggaagcagcagaaggtgtggatgtggaacctgatccaggagagcgtgctggagcacttccgcacccaccccaccgtgcgggagcagatccccctgctggagcagaaggtgctgattggagccctgagccctggcctggccgctgacttcctgctgaaggccctgaaggccgagaccaacaagatccaccctgtgtag

SEQ ID NO: 159588 - DNA, 414 bp, synthetic construct
  misc_feature 1..414: note = Description of Artificial Sequence: Synthetic coding sequence
  source 1..414: mol_type = other DNA
atggctgacctggtggccgtgaccaagagtgatggagacctgattgtgcctgcccggcgcatccaggccgagtatgtgtctgccctgaagctgctgaggaagaggagccaggtgtggaagcccaaggtgatccgcatcagcgcccggagcggggagggcatcagcgagatgtgggacaagatgaaggacttccaggacctgatgctggccagcggggagctgacagccaagaggaggaagcagcagaaggtgtggatgtggaacctgatccaggagagcgtgctggagcacttccgcacccaccccaccgtgcgggagcagatccccctgctggagcagaaggtgctgattggagccctgagccctggcctggccgctgacttcctgctgaaggccttcaagagccgggactag

SEQ ID NO: 159589 - DNA, 480 bp, synthetic construct
  misc_feature 1..480: note = Description of Artificial Sequence: Synthetic coding sequence
  source 1..480: mol_type = other DNA
atggccggcctgaccaggtttgccctggagctggtgacagagaagggccacacctttgctgaggagctgcagaagatccagtgcaccctgcaggatgtgggcagcgccctggccaccccctgcagcagcgcccgggaggcccacctgaagtacaccaccttcaaggccggccccatcctggagctggagcagtggattgacaagtacaccagccagctgccccccctgacagccttcatcctgcccagcggcggcaagatcagcagcgccctgcacttctgcagagctgtgtgcagaagagctgagaggagagtggtgcccctggtgcagatgggagaaacagatgccaacgtggccaagttcctgaaccggctgagtgactacctgttcaccctggcccgctatgctgccatgaaggagggcaaccaggagaagatctacatgaagaatgaccccagcgctgagagcgagggcctgtag

SEQ ID NO: 159590 - DNA, 753 bp, synthetic construct
  misc_feature 1..753: note = Description of Artificial Sequence: Synthetic coding sequence
  source 1..753: mol_type = other DNA
atggctgtgtgtggcctgggcagccggctgggcctgggcagccggctgggcctgcggggctgcttcggggccgcccggctgctgtacccccgcttccagagccggggcccccagggcgtggaggatggagaccggccccagcccagcagcaagaccccccgcatccccaagatctacaccaagacaggagacaagggcttcagcagcaccttcaccggggagcggcggcccaaggatgaccaggtgtttgaagctgtgggcaccacagatgagctgagcagcgccatcggctttgccctggagctggtgacagagaagggccacacctttgctgaggagctgcagaagatccagtgcaccctgcaggatgtgggcagcgccctggccaccccctgcagcagcgcccgggaggcccacctgaagtacaccaccttcaaggccggccccatcctggagctggagcagtggattgacaagtacaccagccagctgccccccctgacagccttcatcctgcccagcggcggcaagatcagcagcgccctgcacttctgcagagctgtgtgccggcgggcagagcggcgggtggtgcccctggtgcagatgggagaaacagatgccaacgtggccaagttcctgaaccggctgagtgactacctgttcaccctggcccgctatgctgccatgaaggagggcaaccaggagaagatctacatgaagaatgaccccagcgctgagagcgagggcctgtag

SEQ ID NO: 159591 - DNA, 849 bp, synthetic construct
  misc_feature 1..849: note = Description of Artificial Sequence: Synthetic coding sequence
  source 1..849: mol_type = other DNA
atggagcccaaggtggccgagctgaagcagaagattgaggacaccctgtgcccctttggatttgaggtgtaccccttccaggtggcctggtacaatgagctgctgcccccagccttccacctgcccctgcccggccccaccctggccttcctggtgctgagcaccccagccatgtttgaccgggccctgaagcccttcctgcagagctgccacctgaggatgctgacagatcctgtggaccagtgtgtggcctaccacctgggccgggtgcgggagagcctgcctgagctgcagatcgagatcatcgctgactatgaggtgcaccccaacagaagacccaagatcctggcccagacagctgcccacgtggccggggccgcctactactaccagaggcaggatgtggaggccgacccctggggcaaccagaggatcagcggcgtgtgcatccaccccaggtttggaggctggtttgccatccggggcgtggtgctgctgcccggcatcgaggtgcctgacctgccccccaggaagccccatgactgtgtgcccaccagggctgaccgcatcgccctgctggagggcttcaacttccactggagggactggacctacagagatgctgtgaccccccaggagcgctacagcgaggagcagaaggcctacttcagcaccccaccagcccagaggctggccctgctgggcctggcccagcccagcgagaagcccagcagccccagcccagacctgcccttcaccaccccagcccccaagaagccaggcaaccccagccgggcccgctcctggctgagcccccgggtgagccccccagccagccctggcccctag

SEQ ID NO: 159592 - DNA, 891 bp, synthetic construct
  misc_feature 1..891: note = Description of Artificial Sequence: Synthetic coding sequence
  source 1..891: mol_type = other DNA
atggccaacgtgctgtgcaacagagcccggctggtgtcctacctgcccggcttctgcagcctggtgaagagggtggtgaaccccaaggccttcagcacagctggcagcagcggcagtgatgagagccacgtggccgccgcccccccagacatctgcagcaggacagtgtggccagatgagaccatgggccccttcggcccccaggaccagcgcttccagctgcccggcaacatcggctttgactgccacctgaatggaacagccagccagaagaagagcctggtgcacaagaccctgcctgatgtgctggccgagcccctgagcagcgagagacatgaatttgtgatggcccagtatgtgaatgagttccagggcaatgatgcccctgtggagcaggagatcaacagcgctgagacctactttgaaagtgcccgggtggagtgtgccatccagacctgcccagagctgctgaggaaggactttgagagcctcttccctgaggtggccaacgggaagctgatgatcctgactgtgacccagaagaccaagaatgacatgacagtgtggagcgaggaggtggagattgagcgggaggtgctgctggagaagttcatcaacggggccaaggagatctgctacgccctgcgggcagagggctactgggccgacttcatcgaccccagcagcggcctggccttcttcggcccctacaccaacaacaccctgtttgaaacagatgagcgctaccgccacctgggcttctctgtggatgacctgggctgctgcaaggtgatccgccacagcctgtggggcacccacgtggtggtgggcagcatcttcaccaatgccaccccagacagccacatcatgaagaagctgagcggcaactag

SEQ ID NO: 159593 - DNA, 891 bp, synthetic construct; identical to SEQ ID NO: 159592
  misc_feature 1..891: note = Description of Artificial Sequence: Synthetic coding sequence
  source 1..891: mol_type = other DNA

SEQ ID NO: 159594 - DNA, 531 bp, synthetic construct
  misc_feature 1..531: note = Description of Artificial Sequence: Synthetic coding sequence
  source 1..531: mol_type = other DNA
atggcccgggtgctgaaggctgctgctgccaatgctgtgggcctcttcagccggctgcaggcccccatccccaccgtgcgggccagcagcaccagccagcccctggaccaggtgactggatctgtgtggaacctgggccgcctgaaccacgtggccatcgctgtgcctgacctggagaaggccgccgccttctacaagaacatcctgggcgcccaggtgtctgaggccgtgcccctgcctgagcacggcgtgtctgtggtgtttgtgaacctgggcaacaccaagatggagctgctgcaccccctgggccgggacagccccatcgccggcttcctgcagaagaacaaggccggcggcatgcaccacatctgcatcgaggtggacaacatcaatgctgctgtgatggacctgaagaagaagaagatccgcagcctgtctgaggaggtgaagattggagcccacggcaagcctgtgatcttcctgcaccccaaggactgtggcggcgtgctggtggagctggagcaggcctag

SEQ ID NO: 159595 - DNA, 2070 bp, synthetic construct
  misc_feature 1..2070: note = Description of Artificial Sequence: Synthetic coding sequence
  source 1..2070: mol_type = other DNA
atgattgagatggctgctgagaaggagcccttcctggtgcctgcccctcctccacccctgaaggatgagagcggcggcggcggcggccccaccgtgcccccccaccaggaggccgccagcggggagctgcggggcggcacagagcggggccctggccgctgtgcccccagcgctggcagccctgctgctgctgtgggccgggagagccctggagctgctgccaccagcagcagcggcccccaggcccagcagcacagaggaggcggcccccaggcccagagccatggagaggcccggctgagtgaccccccaggccgggccgcccccccagatgtgggggaggagcggcggggcggcggcggcacagagctgggccccccagccccaccccggcccagaaatggctaccagccccacaggcctcctgggggcggcggcggcaagagaagaaacagctgcaatgtgggcggcggcggcggcggcttcaagcacccagccttcaagagaagaagaagagtgaacagcgactgtgacagcgtgctgcccagcaacttcctgctgggcggcaacatctttgaccccctgaacctgaacagcctgctggatgaggaggtgtccaggaccctgaatgctgagacccccaagagcagccccctgcctgccaagggccgggaccctgtggagatcctgatccccaaggacatcacagaccccctgagcctgaacacctgcacagatgagggccacgtggtgctggccagccccctgaagacaggcaggaagaggcaccgccaccggggccagcaccaccagcagcagcaggccgccggcggcagcgagagccaccctgtgcccccaacagcccccctgacccccctgctgcatggagagggcgccagccagcagcccaggcaccggggccagaacagagatgccccccagccctatgagctgaacacagccatcaactgcagagatgaggtggtgagccccctgcccagcgccctgcagggccccagcggcagcctgagcgcccccccagctgccagcgtcatcagcgccccacccagcagcagcagccgccacaggaagagaagaaggaccagcagcaagtctgaggccggggcccggggcggcggccagggcagcaaggagaagggccggggctcctggggcggccgccaccaccaccaccaccccctgcctgctgctggcttcaagaagcagcagaggaagttccagtatggcaactactgcaagtactacggctacagaaaccccagctgtgaagatggccgcctgcgggtgctgaagccagagtggttccggggcagagatgtgctggacctgggctgcaatgtgggccacctgaccctgagcatcgcctgcaagtggggccccagcaggatggtgggcctggacatcgacagccgcctcatccacagcgcccggcagaacatccgccactacctgtctgaggagctgcggctgcccccccagaccctggagggggaccccggggctgagggggaggagggcaccaccaccgtgaggaagaggagctgcttccctgccagcctgacagccagccggggccccatcgccgccccccaggtgcccctggatggagctgacacctctgtgttccccaacaacgtggtgtttgtgactggaaactacgtgctggacagagatgacctggtggaggcccagaccccagaatatgatgtggtgctgtgcctgagcctgaccaagtgggtgcacctgaactggggagatgagggcctgaagaggatgttccgccgcatctaccgccacctgcggcctgggggcatcctggtgctggagccccagccctggagcagctatggcaagaggaagaccctgacagagaccatctacaagaactactaccgcatccagctgaagccagagcagttcagcagctacctgaccagcccagatgtgggcttcagcagctatgagctggtggccaccccccacaacaccagcaagggcttccagaggcctgtgtacctgttccacaaggcccggagccccagccactag

SEQ ID NO: 159596 - DNA, 663 bp, synthetic construct
  misc_feature 1..663: note = Description of Artificial Sequence: Synthetic coding sequence
  source 1..663: mol_type = other DNA
atggtgggcctggacatcgacagccgcctcatccacagcgcccggcagaacatccgccactacctgtctgaggagctgcggctgcccccccagaccctggagggggaccctggagctgagggggaggagggcaccaccaccgtgaggaagaggagctgcttccctgccagcctgacagccagccggggccccatcgccgccccccaggtgcccctggatggagctgacaccagcgtcttccccaacaacgtggtgtttgtgacaggcaactacgtgctggacagagatgacctggtggaggcccagaccccagaatatgatgtggtgctgtgcctgagcctgaccaagtgggtgcacctgaactggggagatgagggcctgaagaggatgttccgccgcatctaccgccacctgcggcctgggggcatcctggtgctggagccccagccctggagcagctatggcaagaggaagaccctgacagagaccatctacaagaactactaccgcatccagctgaagccagagcagttcagcagctacctgaccagcccagatgtgggcttcagcagctatgagctggtggccaccccccacaacaccagcaagggcttccagaggcctgtgtacctgttccacaaggcccggagccccagccactag

SEQ ID NO: 159597 - DNA, 852 bp, synthetic construct
  misc_feature 1..852: note = Description of Artificial Sequence: Synthetic coding sequence
  source 1..852: mol_type = other DNA
atggccagcggcaccaccaccacagctgtgaagattggcatcattggaggcaccggcctggatgatcctgagatcctggagggccgcacagagaagtatgtggacaccccatttgggaagcccagtgatgccctgatcctgggcaagatcaagaatgtggactgtgtgctgctggcccggcacggccggcagcacaccatcatgcccagcaaggtgaactaccaggccaacatctgggccctgaaggaggagggctgcacccacgtgattgtgaccacagcctgtggcagcctgcgggaggagatccagcccggggacatcgtcatcatcgaccagttcatcgacaggaccaccatgaggccccagagcttctatgatggcagccacagctgtgcccggggcgtgtgccacatccccatggccgagcccttctgccccaagacccgggaggtgctgattgaaacagccaagaagctgggcctgcgctgccacagcaagggcaccatggtgaccatcgagggcccccgcttcagcagcagagctgagagcttcatgttccgcacctggggcgcagatgtgatcaacatgaccaccgtgcctgaggtggtgctggccaaggaggccggcatctgctacgccagcatcgccatggccacagattatgactgctggaaggagcacgaggaggccgtgtctgtggacagagtgctgaagaccctgaaggaaaatgccaacaaggccaagagcctgctgctgaccaccatcccccagatcggcagcacagagtggagcgagaccctgcacaacctgaagaacatggcccagttctctgtgctgctgcccaggcactag

SEQ ID NO: 159598 - DNA, 468 bp, synthetic construct
  misc_feature 1..468: note = Description of Artificial Sequence: Synthetic coding sequence
  source 1..468: mol_type = other DNA
atggctgctgagaccagaaatgtggccggggctgaggcccccccaccccagaagcgctactaccggcagagggcccacagcaaccccatggctgaccacaccctgcgctaccctgtgaagccagaggagatggactggagcgagctgtacccagagttctttgcccccctgacccagaaccagagccatgatgaccccaaggacaagaaggagaagagggcccaggcccaggtggagtttgctgacatcggctgcggctatggaggcctgctggccgacaaggatgtgctgcccctgccccggcccaccttccaggccgacaaggcccaggtggccaaccaccagagccacccagccagccgcatctgcctgcgggccaagtcctggggcgccggcgtgtaccacaacagatgtgccggggccacccggctggatgtgcacagcttccggcgggcccccaccgtgtag

SEQ ID NO: 159599 - DNA, 831 bp, synthetic construct
  misc_feature 1..831: note = Description of Artificial Sequence: Synthetic coding sequence
  source 1..831: mol_type = other DNA
atggctgctgagaccagaaatgtggccggggctgaggcccccccaccccagaagcgctactaccggcagagggcccacagcaaccccatggctgaccacaccctgcgctaccctgtgaagccagaggagatggactggagcgagctgtacccagagttctttgcccccctgacccagaaccagagccatgatgaccccaaggacaagaaggagaagagggcccaggcccaggtggagtttgctgacatcggctgcggctatggaggcctgctggtggagctgagccccctcttcccagacaccctcatcctgggcctggagatccgggtgaaggtgtctgactatgtgcaggaccgcatccgggccctgcgggccgccccagctgggggcttccagaacatcgcctgcctgcggagcaatgccatgaagcacctgcccaacttcttctacaagggccagctgaccaagatgttcttcctgttcccagacccccacttcaagaggaccaagcacaagtggaggatcatcagccccaccctgctggccgagtatgcctacgtgctgcgggtgggcggcctggtgtacaccatcacagatgtgctggagctgcatgactggatgtgcacccactttgaggagcaccccctgtttgagcgggtgcccctggaggacctgtctgaagatcctgtggtgggccacctgggcaccagcacagaggagggcaagaaggtgctgagaaatggaggcaagaacttccctgccatcttccgccgcatccaggaccctgtgctgcaggccgtgaccagccagaccagcctgcccggccactag

SEQ ID NO: 159600 - DNA, 2274 bp, synthetic construct
  misc_feature 1..2274: note = Description of Artificial Sequence: Synthetic coding sequence
  source 1..2274: mol_type = other DNA
atggccgaggtgggccgcacaggcatctcctacccaggggccctgctgccccagggcttctgggccgctgtggaggtgtggctggagcggccccaggtggccaacaagaggctgtgtggggcccggctggaggcccgctggagcgctgccctgccctgtgccgaggcccggggccctggcaccagcgctggcagcgagcagaaggagcggggccctggccctggccagggcagccctgggggcggccctggccccaggagcctgagcggccctgagcagggcacagcctgctgtgagctggaggaggcccagggccagtgccagcaggaggaggcccagcgggaggccgcctctgtgcccctgcgggacagcggccaccctggccacgccgagggccgggagggggacttccctgctgctgacctggacagcctgtgggaggacttcagccagagcctggcccggggcaacagcgagctgctggccttcctgaccagcagtggagctggcagccagcctgaggcccagcgggagctggatgtggtgctgaggacagtcatccccaagaccagcccccactgccccctgaccaccccccggcgggagatcgtggtgcaggatgtgctgaatggcaccatcaccttcctgcccctggaggaggatgatgagggcaacctgaaggtgaagatgagcaatgtgtaccagatccagctgagccacagcaaggaggagtggttcatctctgtgctgatcttctgcccagagcgctggcacagtgatggcatcgtgtaccccaagcccacctggctgggggaggagctgctggccaagctggccaagtggagcgtggagaacaagaagagtgacttcaagagcaccctgagcctcatcagcatcatgaagtacagcaaggcctaccaggagctgaaggagaagtacaaggagatggtgaaggtgtggccagaggtgacagatcctgagaagtttgtgtatgaagatgtggccatcgccgcctacctgctgatcctgtgggaggaggagagagctgagcggcggctgacagcccggcagagctttgtggacctgggctgtggaaatggcctgctggtgcacatcctgagcagcgagggccaccctggccggggcattgatgtgagaagaaggaagatctgggacatgtatggcccccagacccagctggaggaggatgccatcaccccaaatgacaagaccctcttcccagatgtggactggctgattggcaaccacagtgatgagctgaccccctggatccctgtgattgctgcccggagcagctacaactgccgcttctttgtgctgccctgctgcttctttgacttcatcggccgctacagccggcggcagagcaagaagacccagtaccgggagtacctggacttcatcaaggaggtgggcttcacctgtggcttccacgtggatgaggactgcctgcgcatccccagcaccaagagggtgtgcctggtgggcaagagcaggacctaccccagcagccgggaggcctctgtggatgagaagaggacccagtacatcaagagcagaagaggctgccctgtgagccccccaggctgggagctgagccccagcccccgctgggtggccgccggcagcgctggccactgtgatggccagcaggccctggatgcccgggtgggctgtgtgacccgggcctgggccgctgagcacggggccggcccccaggccgagggcccctggctgcccggcttccacccccgggagaaggccgagcgggtgaggaactgtgccgccctgccccgggacttcatcgaccaggtggtgctgcaggtggccaacctgctgctgggcggcaagcagctgaacaccaggagcagcagaaatggcagcctgaagacctggaatggaggagagagcctgagcctggccgaggtggccaatgagctggacacagagaccctgcggcggctgaagagagaatgtggcggcctgcagaccctgctgaggaacagccaccaggtgttccaggtggtgaatggccgggtgcacatccgggactggagggaggagaccctgtggaagaccaagcagcctgaggccaagcagaggctgctgtctgaggcctgcaagacccggctgtgctggttcttcatgcaccacccagatggctgtgccctgagcacagactgctgcccctttgcccacggccctgctgagctgcggccccccaggaccacccccaggaagaagatctcctag

SEQ ID NO: 159601 - DNA, 1236 bp, synthetic construct
  misc_feature 1..1236: note = Description of Artificial Sequence: Synthetic coding sequence
  source 1..1236: mol_type = other DNA
atgtgcatcaagttcagctctgtgattgccaagaagaatgaacgctggcacagtgatggcatcgtgtaccccaagcccacctggctgggggaggagctgctggccaagctggccaagtggagcgtggagaacaagaagagtgacttcaagagcaccctgagcctcatcagcatcatgaagtacagcaaggcctaccaggagctgaaggagaagtacaaggagatggtgaaggtgtggccagaggtgacagatcctgagaagtttgtgtatgaagatgtggccatcgccgcctacctgctgatcctgtgggaggaggagcgggcagagcggcggctgacagcccggcagagctttgtggacctgggctgtggaaatggcctgctggtgcacatcctgagcagcgagggccaccctggccggggcattgatgtgagaagaaggaagatctgggacatgtatggcccccagacccagctggaggaggatgccatcaccccaaatgacaagaccctcttcccagatgtggactggctgattggcaaccacagtgatgagctgaccccctggatccctgtgattgctgcccggagcagctacaactgccgcttctttgtgctgccctgctgcttctttgacttcatcggccgctacagccggcggcagagcaagaagacccagtaccgggagtacctggacttcatcaaggaggtgggcttcacctgtggcttccacgtggatgaggactgcctgcgcatccccagcaccaagagggtgtgcctggtgggcaagagcaggacctaccccagcagccgggaggcctctgtggatgagaagaggacccagtacatcaagagccggcggggctgccctgtgtccccacctggctgggagctgagccccagcccccgctgggtggccgccggcagcgctggccactgtgatggccagcaggccctggatgcccgggtgggctgtgtgacccgggcctgggccgctgagcacggggccggcccccaggccgagggcccctggctgcccggcttccacccccgggagaaggccgagcgggtgaggaactgtgccgccctgccccgggacttcatcgaccaggtggtgctgcaggtggccaacctgctgctgggcggcaagcagctgaacaccaggagcagcagaaatggcagcctgaagacctggaatggaggcggcaagctgagcaccatcctgggccggggctag

SEQ ID NO: 159602 - DNA, 1743 bp, synthetic construct
  misc_feature 1..1743: note = Description of Artificial Sequence: Synthetic coding sequence
  source 1..1743: mol_type = other DNA
atgtctgacacctggagcagcatccaggcccacaagaagcagctggacagcctgcgggagcggctgcagaggaggaggaagcaggacagcggccacctggacctgaggaaccctgaggccgccctgagccccaccttcagaagtgacagccctgtgcccacagcccccaccagcggcggccccaagcccagcacagccagcgctgtgcctgagctggccacagatcctgagctggagaagaagctgctgcaccacctgagtgacctggccctgaccctgcccacagatgctgtgtccatctgcctggccatcagcaccccagatgccccagccacccaggatggagtggagagcctgctgcagaagtttgctgcccaggagctgattgaggtgaagaggggcctgctgcaggatgatgcccaccccaccctggtgacctacgccgaccacagcaagctgagcgccatgatgggcgctgtggccgagaagaagggccctggagaggtggccggcaccgtgacaggccagaagagaagagctgagcaggacagcaccaccgtggccgcctttgccagcagcctggtgtctggcctgaacagcagcgccagcgagcccgccaaggagcccgccaagaagagcaggaagcatgctgccagtgatgtggacctggagattgagagcctgctgaaccagcagagcaccaaggagcagcagagcaagaaggtgtcccaggagatcctggagctgctgaacaccaccacagccaaggagcagagcatcgtggagaagttccgcagccggggccgggcccaggtgcaggagttctgtgactatggcaccaaggaggagtgcatgaaggccagtgatgctgaccggccctgcaggaagctgcacttccgccgcatcatcaacaagcacacagatgagagcctgggggactgcagcttcctgaacacctgcttccacatggacacctgcaagtatgtgcactatgaaattgatgcctgcatggattctgaggcccctggcagcaaggaccacacccccagccaggagctggccctgacccagagcgtgggcggggacagcagcgctgacaggctcttccccccccagtggatctgctgtgacatccgctacctggatgtgtccatcctgggcaagtttgctgtggtgatggctgaccccccctgggacatccacatggagctgccctacggcaccctgacagatgatgagatgaggcggctgaacatccctgtgctgcaggatgatggcttcctgttcctgtgggtgacaggccgggccatggagctgggccgggagtgcctgaacctgtggggctatgagcgggtggatgagatcatctgggtgaagaccaaccagctgcagaggatcatcagaactggaagaacaggccactggctgaaccacggcaaggagcactgcctggtgggcgtgaagggcaacccccagggcttcaaccagggcctggactgtgatgtgattgtggccgaggtgcgcagcaccagccacaagccagatgagatctacggcatgattgagcggctgagccctggcaccaggaagattgagctgtttggccggccccacaacgtgcagcccaactggatcaccctgggcaaccagctggatggcatccacctgctggaccctgatgtggtggcccgcttcaagcagcgctacccagatggcatcatcagcaagcccaagaacctgtag

SEQ ID NO: 159603 - DNA, 492 bp, synthetic construct
  misc_feature 1..492: note = Description of Artificial Sequence: Synthetic coding sequence
  source 1..492: mol_type = other DNA
atgtctgacacctggagcagcatccaggcccacaagaagcagctggacagcctgcgggagcggctgcagaggaggaggaagcaggacagcggccacctggacctgaggaaccctgaggccgccctgagccccaccttcagaagtgacagccctgtgcccacagcccccaccagcggcggccccaagcccagcacagccagcgctgtgcctgagctggccacagatcctgagctggagaagaagctgctgcaccacctgagtgacctggccctgaccctgcccacagatgctgtgtccatctgcctggccatcagcaccccagatgccccagccacccaggatggagtggagagcctgctgcagaagtttgctgcccaggagctgattgaggtgaagaggggcctgctgcaggatgatgcccaccccaccctggtgacctacgccgaccacagcaagctgagcgccatgatgggcgctgtggccgagaagtag

SEQ ID NO: 159604 - DNA, 462 bp, synthetic construct
  misc_feature 1..462: note = Description of Artificial Sequence: Synthetic coding sequence
  source 1..462: mol_type = other DNA
atgtctgacacctggagcagcatccaggcccacaagaagcagctggacagcctgcgggagcggctgcagaggaggaggaagcaggacagcggccacctggacctgaggaaccctgaggccgccctgagccccaccttcagaagtgacagccctgtgcccacagcccccaccagcggcggccccaagcccagcacagccagcgctgtgcctgagctggccacagatcctgagctggagaagaagctgctgcaccacctgagtgacctggccctgaccctgcccacagatgctgtgtccatctgcctggccatcagcaccccagatgccccagccacccaggatggagtggagagcctgctgcagaagtttgctgcccaggagctgattgagcacaggaaccagcagaggagccagcccaggaaccagggcaacatgctgccccagatgctgatctggaggtag

SEQ ID NO: 159605 - DNA, 879 bp, synthetic construct
  misc_feature 1..879: note = Description of Artificial Sequence: Synthetic coding sequence
  source 1..879: mol_type = other DNA
atgctgggcgcctgggccgtggagggcacagctgtggccctgctgcggctgctgctgctgctgctgcccccagccatccggggccctggcctgggcgtggccggcgtggccggggccgccggggccggcctgcctgagagcgtcatctgggccgtgaatgctggaggagaggcccacgtggatgtgcacggcatccacttcaggaaggaccccctggagggccgggtgggccgggccagtgactatggcatgaagctgcccatcctgcggagcaaccctgaggaccagatcctgtaccagacagagcgctacaatgaggagaccttcggctatgaggtgcccatcaaggaggagggggactatgtgctggtgctgaagtttgctgaggtgtactttgcccagagccagcagaaggtgtttgatgtgcggctgaatggacatgtggtggtgaaggacctggacatctttgacagagtgggccacagcacagcccatgatgagatcatccccatgagcatcaggaagggcaagctgtctgtgcagggcgaggtgtccaccttcaccgggaagctgtacattgaatttgtgaagggctactatgacaaccccaaggtgtgtgccctgtacatcatggccggcaccgtggatgatgtgcccaagctgcagccccaccctggcctggagaagaaggaggaggaggaggaggaggaggagtatgatgagggcagcaacctgaagaagcagaccaacaagaacagagtgcagagcggccccaggacccccaacccctatgccagtgacaacagcagcctgatgttccccatcctggtggcctttggagtcttcatccccaccctcttctgcctgtgccgcctgtag

SEQ ID NO: 159606 - DNA, 1035 bp, synthetic construct
  misc_feature 1..1035: note = Description of Artificial Sequence: Synthetic coding sequence
  source 1..1035: mol_type = other DNA
atgctgtctgaggtgctgctggtgtctgcccctgggaaggtgatcctgcatggagagcacgctgtggtgcacggcaaggtggccctggccgtgtccctgaacctgcggaccttcctgcggctgcagccccacagcaatggcaaggtggacctgagcctgcccaacatcggcatcaagagggcctgggatgtggcccggctgcagagcctggacaccagcttcctggagcagggagatgtgaccacccccaccagcgagcaggtggagaagctgaaggaggtggccggcctgcctgatgactgtgctgtgacagagcggctggccgtgctggccttcctgtacctgtacctgagcatctgcaggaagcagcgctggaccaaggaggacctggagctgatcaacaagtgggccttccagggcgagaggatgattcatggcaaccccagcggcgtggacaatgctgtgtccacctggggcggggccctgcgctaccaccagggcaagatcagcagcctgaagaggagccctgccctgcagatcctgctgaccaacaccaaggtgcccaggaacacccgggccctggtggccggcgtgaggaaccggctgctgaagtttcctgagatcgtggcccccctgctgaccagcattgatgccatcagcctggagtgtgagcgggtgctgggggagatgggagaggccccagcccctgagcagtacctggtgctggaggagctgattgacatgaaccagcaccacctgaatgccctgggcgtgggccacgccagcctggaccagctgtgccaggtgacccgggcccggggcctgcacagcaagctgaccggggccggcggcggcggctgcggcatcaccctgctgaagccaggcctggagcagcctgaggtggaggccaccaagcaggccctgaccagctgtggctttgactgcctggagaccagcatcggggcccctggggtgtccatccacagcgccaccagcctggacagccgggtgcagcaggccctggatggcctgtag

SEQ ID NO: 159607 - DNA, 516 bp, synthetic construct
  misc_feature 1..516: note = Description of Artificial Sequence: Synthetic coding sequence
  source 1..516: mol_type = other DNA
atgctgtctgaggtgctgctggtgtctgcccctgggaaggtgatcctgcatggagagcacgctgtggtgcacggcaaggtggccctggccgtgtccctgaacctgcggaccttcctgcggctgcagccccacagcaatggcaaggtggacctgagcctgcccaacatcggcatcaagagggcctgggatgtggcccggctgcagagcctggacaccagcttcctggagcagggagatgtgaccacccccaccagcgagcaggtggagaagctgaaggaggtggccggcctgcctgatgactgtgctgtgacagagcggctggccgtgctggccttcctgtacctgtacctgagcatctgcaggaagcagagggccctgcccagcctggacatcgtggtgtggagcgagctgcccccaggagctggcctgggcagcagcgctgcctacagcgtgtgcctggccgccgccctgctgactgtgtgtgaggagatccccaaccccctgaaggatggatag

SEQ ID NO: 159608 - DNA, 1035 bp, synthetic construct; identical to SEQ ID NO: 159606
  misc_feature 1..1035: note = Description of Artificial Sequence: Synthetic coding sequence
  source 1..1035: mol_type = other DNA

SEQ ID NO: 159609 - DNA, 609 bp, synthetic construct
  misc_feature 1..609: note = Description of Artificial Sequence: Synthetic coding sequence
  source 1..609: mol_type = other DNA
atgattcatggcaaccccagcggcgtggacaatgctgtgtccacctggggcggggccctgcgctaccaccagggcaagatcagcagcctgaagaggagccctgccctgcagatcctgctgaccaacaccaaggtgcccaggaacacccgggccctggtggccggcgtgaggaaccggctgctgaagtttcctgagatcgtggcccccctgctgaccagcattgatgccatcagcctggagtgtgagcgggtgctgggggagatgggagaggccccagcccctgagcagtacctggtgctggaggagctgattgacatgaaccagcaccacctgaatgccctgggcgtgggccacgccagcctggaccagctgtgccaggtgacccgggcccggggcctgcacagcaagctgaccggggccggcggcggcggctgcggcatcaccctgctgaagccaggcctggagcagcctgaggtggaggccaccaagcaggccctgaccagctgtggctttgactgcctggagaccagcatcggggcccctggggtgtccatccacagcgccaccagcctggacagccgggtgcagcaggccctggatggcctgtag

SEQ ID NO: 159610 - DNA, 606 bp, synthetic construct
  misc_feature 1..606: note = Description of Artificial Sequence: Synthetic coding sequence
  source 1..606: mol_type = other DNA
atgctgtctgaggtgctgctggtgtctgcccctgggaaggtgatcctgcatggagagcacgctgtggtgcacggcaaggtggccctggccgtgtccctgaacctgcggaccttcctgcggctgcagccccacagcaatggcaaggtggacctgagcctgcccaacatcggcatcaagagggcctgggatgtggcccggctgcagagcctggacaccagcttcctggagcagggagatgtgaccacccccaccagcgagcaggtggagaagctgaaggaggtggccggcctgcctgatgactgtgctgtgacagagcggctggccgtgctggccttcctgtacctgtacctgagcatctgcaggaagcagagggccctgcccagcctggacatcgtggtgtggagcgagctgcccccaggagctggcctgggcagcagcgctgcctacagcgtgtgcctggccgccgccctgctgactgtgtgtgaggagatccccaaccccctgaaggatggagactgtgtgaaccgctggaccaaggaggacctggagctgatcaacaagtgggccttccagggcgagaggatgattcatggcaaccccagctag

SEQ ID NO: 159611 - DNA, 1563 bp, synthetic construct
  misc_feature 1..1563: note = Description of Artificial Sequence: Synthetic coding sequence
  source 1..1563: mol_type = other DNA
atgcccagcctggtggtgtctggcatcatggagagaaatggaggctttggagagctgggctgcttcggcggcagcgccaaggaccggggcctgctggaggatgagcgggccctgcagctggccctggaccagctgtgcctgctgggcctgggggagcccccagcccccacagctggggaggatggcggcggcggcggcggcggggccccagcccagcctgctgccccaccccagcctgcccctcctcctcctcctgctgcccccccagctgcccccacagctgccccagctgcccagaccccccagcccccaacagcccccaagggggccagtgatgccaagctgtgtgccctgtacaaggaggccgagctgcggctgaagggcagcagcaacaccacagaatgtgtgcctgtgcccaccagcgagcacgtggccgagatcgtgggccggcagggctgcaagatcaaggccctgcgggccaagaccaacacctacatcaagacccctgtgcggggggaggagcctgtgttcatggtgacaggccggcgggaggatgtggccacagcccggcgggagatcatctctgctgctgagcacttctccatgatccgggccagcaggaacaagagcggggccgccttcggcgtggccccagccctgcccggccaggtgaccatccgggtgcgggtgccctacagagtggtgggcctggtggtgggccccaagggggccaccatcaagaggatccagcagcagaccaacacctacatcatcacccccagccgggaccgggaccctgtgtttgagatcactggagcccctggaaatgtggagcgggcccgggaggagattgagacccacatcgctgtgaggacaggcaagatcctggagtacaacaatgaaaatgacttcctggccggcagcccagatgctgccatcgacagccgctacagtgatgcctggagggtgcaccagcccggctgcaagcccctgagcaccttccggcagaacagcctgggctgcatcggggagtgtggggtggacagcggctttgaggccccccggctgggggagcagggcggggactttggctatggaggctacctgtttcctggctatggagtgggcaagcaggatgtgtactacggcgtggccgagaccagcccccccctgtgggccggccaggagaatgccacccccacctctgtgctcttcagcagcgccagcagcagcagcagcagcagcgccaaggcccgggccggccccccaggggcccacaggagccctgccaccagcgctggccctgagctggccggcctgccccggcggcccccaggagagcccctgcagggcttcagcaagctgggcggcggcggcctgcggagccctgggggcggccgggactgcatggtgtgctttgaaagtgaggtgacagctgccctggtgccctgtggccacaacctcttctgcatggagtgtgctgtgcgcatctgtgagaggacagatcctgagtgccctgtgtgccacatcacagccacccaggccatccgcatcttctcctag

SEQ ID NO: 159612 - DNA, 1710 bp, synthetic construct
  misc_feature 1..1710: note = Description of Artificial Sequence: Synthetic coding sequence
  source 1..1710: mol_type = other DNA
atgcccagcagcctgtttgctgacctggagagaaatggcagcggcggcggcggcggcggcagcagcggcggcggggagaccctggatgaccagagggccctgcagctggccctggaccagctgagcctgctgggcctggacagtgatgaaggagccagcctgtatgattctgagcccaggaagaagtctgtgaacatgacagaatgtgtgcctgtgcccagcagcgagcacgtggccgagatcgtgggccggcagggctgcaagatcaaggccctgcgggccaagaccaacacctacatcaagacccctgtgcggggggaggagcctgtgtttgtggtgacaggcaggaaggaggatgtggccatggcccggcgggagatcatctctgctgctgagcacttctccatgatccgggccagcaggaacaagaacacagccctgaatggagctgtgcccggcccccccaacctgcccggccagaccaccatccaggtgcgggtgccctacagagtggtgggcctggtggtgggccccaagggggccaccatcaagaggatccagcagcagacccacacctacatcgtgacccccagccgggacaaggagcctgtgtttgaggtgacaggcatgccagaaaatgtggaccgggcccgggaggagattgaggcccacatcgccctgaggactggaggcatcatcgagctgacagatgaaaatgacttccacgccaacggcacagatgtgggctttgacctgcaccacggcagcggcggcagcggccctggcagcctgtggagcaagcccacccccagcatcacccccaccccaggcaggaagcccttcagcagctacagaaatgacagcagcagcagcctgggcagcgccagcacagacagctactttggaggcggcaccagcagcagcgctgctgccacccagaggctggccgactacagcccccccagccctgccctgagctttgcccacaacggcaacaacaacaacaatggaaatggctacacctacacagctggaggagaggcctctgtgcccagcccagatggctgcccagagctgcagcccacctttgatcctgccccagcccctcctcctggggcccccctcatctgggcccagtttgagaggagccctgggggcggccctgctgcccctgtgagcagcagctgcagcagcagcgccagcagcagcgccagcagcagctctgtggtgtttcctgggggcggggccagcgcccccagcaatgccaacctgggcctgctggtgcaccggcggctgcaccctggcaccagctgcccccggctgagcccccccctgcacatggcccctggagctggggagcaccacctggcccggcgggtgcggagtgaccccggcggcggcggcctggcctatgctgcctatgccaacggcctgggcgcccagctgcccggcctgcagcccagcgacaccagcggcagcagcagcagcagcagcagcagcagcagcagcagcagcagcagcagcggcctgcggaggaagggcagccgggactgcagcgtgtgctttgagagcgaggtgattgctgccctggtgccctgtggccacaacctcttctgcatggagtgtgccaaccgcatctgtgagaagtctgagccagaatgtcctgtgtgccacacagctgtgacccaggccatccgcatcttctcctag

SEQ ID NO: 159613 - DNA, 1980 bp, synthetic construct
  misc_feature 1..1980: note = Description of Artificial Sequence: Synthetic coding sequence
  source 1..1980: mol_type = other DNA
atgcccagcggcagcagcgctgccctggccctggccgccgccccagcccccctgccccagcccccacctcctcctcctcctcctcctccacccctgcccccacccagcggcggccctgagctggagggagatggcctgctgctgcgggagcggctggccgccctgggcctggatgaccccagccctgctgagcccggggccccagccctgcgggccccagctgctgctgcccagggccaggcccggcgggctgctgagctgagccctgaggagcgggcccctcctggccggcctggggcccctgaggccgctgagctggagctggaggaggatgaggaggagggggaggaggccgagctggatggagacctgctggaggaggaggagctggaggaggccgaggaggaggacaggagcagcctgctgctgctgagccccccagctgccacagccagccagacccagcagatccctgggggcagcctgggctctgtgctgctgcctgctgccaggtttgatgcccgggaggccgctgctgctgctgctgctgctggggtgctgtatggaggagatgatgcccagggcatgatggccgccatgctgagccacgcctacggccctgggggctgtggggctgctgctgctgccctgaatggagagcaggccgccctgctgcggaggaagtctgtgaacaccacagaatgtgtgcctgtgcccagcagcgagcacgtggccgagatcgtgggccggcagggctgcaagatcaaggccctgcgggccaagaccaacacctacatcaagacccctgtgcggggggaggagcccatctttgtggtgacaggcaggaaggaggatgtggccatggccaagcgggagatcctgtctgctgctgagcacttctccatgatccgggccagcaggaacaagaatggacctgccctgggcggcctgagctgcagccccaacctgcccggccagaccaccgtgcaggtgcgggtgccctacagagtggtgggcctggtggtgggccccaagggggccaccatcaagaggatccagcagcagacccacacctacatcgtgacccccagccgggacaaggagcctgtgtttgaggtgacaggcatgccagaaaatgtggaccgggcccgggaggagattgagatgcacatcgccatgaggactggaaactacatcgagctgaatgaggagaatgacttccactacaacggcacagatgtgtcctttgagggcggcaccctgggcagcgcctggctgagcagcaaccctgtgccccccagccgggccaggatgatcagcaactacagaaatgacagcagcagcagcctgggcagcggcagcacagacagctacttcggcagcaaccggctggccgacttcagccccaccagccccttcagcactggaaacttctggtttggagacaccctgcccagcgtgggcagcgaggacctggccgtggacagccctgcctttgacagcctgcccaccagcgcccagaccatctggaccccatttgagcctgtgaaccccctgagcggcttcggcagtgaccccagcggcaacatgaagacccagaggcggggcagccagcccagcaccccccggctgagccccaccttccctgagagcattgagcaccccctggcccggcgggtgcggagtgacccccccagcactggaaaccacgtgggcctgcccatctacatcccagccttcagcaatggcaccaacagctacagcagcagcaatggaggcagcaccagcagcagccccccagagagcaggaggaagcatgactgtgtgatctgctttgaaaatgaggtgattgctgccctggtgccctgtggccacaacctcttctgcatggagtgtgccaacaagatctgtgagaagaggacccccagctgccctgtgtgccagacagctgtgacccaggccatccagatccacagctag

SEQ ID NO: 159614 - DNA, 498 bp, synthetic construct
  misc_feature 1..498: note = Description of Artificial Sequence: Synthetic coding sequence
  source 1..498: mol_type = other DNA
tggcgctggaccagctgcagaagaagtggctggggcgccctggccaccaggacccggcggggccggcccggcaccccacctccaccccggcccagccccccagatgtgtttgctggctttgccccccaccctgctgccctgggcccccccaccctgctggccgaccagatgtctgtcatcggcagcaggaagaagtctgtgaacatgacagaatgtgtgcctgtgcccagcagcgagcacgtggccgagatcgtgggccggcagggctgcaagatcaaggccctgcgggccaagaccaacacctacatcaagacccctgtgcggggggaggagcccgtcttcatcgtgactggaagaaaagaagatgtggagatggccaagcgggagatcctgtctgctgctgagcacttcagcatcatccgggccaccaggagcaaggccggcggcctgcctggagctgcccagggcccccccaacctgcccggccagaccacctag

SEQ ID NO: 159615 - DNA, 2001 bp, synthetic construct
  misc_feature 1..2001: note = Description of Artificial Sequence: Synthetic coding sequence
  source 1..2001: mol_type = other DNA
atgcccagcagcctgggccagccagatggcggcggcggcggcggcggcggcggcggcggcgtgggcgccgccggggaggaccccggccctggccctgcccctcctcctgagggcgcccaggaggccgccccagccccccggcccccacctgagccagatgatgctgctgctgccctgcggctggccctggaccagctgagcgccctgggcctgggcggggccggggacacagatgaggagggcgctgctggagatggagctgctgctgctgggggcgcagatggaggagctgcccctgagcctgtgcccccagatggccctgaggccggggccccacccaccctggccccagctgtggcccctggcagcctgcccctgctggaccccaatgccagccccccacctcctcctccaccccggcccagccccccagatgtgtttgctggctttgccccccaccctgctgccctgggcccccccaccctgctggccgaccagatgtctgtcatcggcagcaggaagaagtctgtgaacatgacagaatgtgtgcctgtgcccagcagcgagcacgtggccgagatcgtgggccggcagggctgcaagatcaaggccctgcgggccaagaccaacacctacatcaagacccctgtgcggggggaggagcccgtcttcatcgtgactggaagaaaagaagatgtggagatggccaagcgggagatcctgtctgctgctgagcacttcagcatcatccgggccaccaggagcaaggccggcggcctgcctggagctgcccagggcccccccaacctgcccggccagaccaccatccaggtgcgggtgccctacagagtggtgggcctggtggtgggccccaagggggccaccatcaagaggatccagcagaggacccacacctacatcgtgaccccaggccgggacaaggagcctgtgtttgctgtgacaggcatgccagaaaatgtggaccgggcccgggaggagattgaggcccacatcaccctgaggactggagccttcacagatgctggccctgacagcgacttccacgccaatggaacagatgtgtgcctggacctgctgggcgctgctgccagcctgtgggccaagacccccaaccagggcagaagaccacccacagccacagctggcctgcggggggacacagccctgggcgcccccagcgcccctgaggccttctacgccggcagcagaggaggccccagcgtgcctgaccccggccctgccagcccctacagcggcagcggaaatggaggctttgccttcggggctgagggccctggggcccctgtgggcacagctgccccagatgactgtgactttggatttgattttgacttcctggccctggacctgactgtgcctgctgctgccaccatctgggccccctttgaaagagctgcccccctgcctgccttcagcggctgcagcacagtgaatggagcccctggccccccagctgctggggcccggcgcagcagcggggccggcacccccaggcacagccccaccctgcctgagcccggcggcctgcggctggagctgcccctgagcagaagaggagccccagaccctgtgggcgccctgtcctggaggcctccccagggccctgtgtccttccctggaggagctgccttcagcacagccaccagcctgcccagcagccctgctgctgctgcctgtgcccccctggacagcggggccagcgagaacagcaggaagcccccatctgccagcagcgccccagccctggccagagaatgtgtggtgtgtgccgagggggaggtgatggccgccctggtgccctgtggccacaacctcttctgcatggactgtgctgtgcgcatctgtgggaagtctgagccagaatgtcctgcctgcaggaccccagccacccaggccatccgggtggagacagagaccccccagcccggcggggccagcgccctgcagaggcagtactag

SEQ ID NO: 159616 - DNA, 1956 bp, synthetic construct
  misc_feature 1..1956: note = Description of Artificial Sequence: Synthetic coding sequence
  source 1..1956: mol_type = other DNA
atgcccagcagcctgggccagccagatggcggcggcggcggcggcggcggcggcggcggcgtgggcgccgccggggaggaccccggccctggccctgcccctcctcctgagggcgcccaggaggccgccccagccccccggcccccacctgagccagatgatgctgctgctgccctgcggctggccctggaccagctgagcgccctgggcctgggcggggccggggacacagatgaggagggcgctgctggagatggagctgctgctgctgggggcgcagatggaggagctgcccctgagcctgtgcccccagatggccctgaggccggggccccacccaccctggccccagctgtggcccctggcagcctgcccctgctggaccccaatgccagccccccacctcctcctccaccccggcccagccccccagatgtgtttgctggctttgccccccaccctgctgccctgggcccccccaccctgctggccgaccagatgtctgtcatcggcagcaggaagaagtctgtgaacatgacagaatgtgtgcctgtgcccagcagcgagcacgtggccgagatcgtgggccggcagggctgcaagatcaaggccctgcgggccaagaccaacacctacatcaagacccctgtgcggggggaggagcccgtcttcatcgtgactggaagaaaagaagatgtggagatggccaagcgggagatcctgtctgctgctgagcacttcagcatcatccgggccaccaggagcaaggccggcggcctgcctggagctgcccagggcccccccaacctgcccggccagaccaccatccaggtgcgggtgccctacagagtggtgggcctggtggtgggccccaagggggccaccatcaagaggatccagcagaggacccacacctacatcgtgaccccaggccgggacaaggagcctgtgtttgctgtgacaggcatgccagaaaatgtggaccgggcccgggaggagattgaggcccacatcaccctgaggactggagccttcacagatgctggccctgacagcgacttccacgccaatggaacagatgtgtgcctggacctgctgggcgctgctgccagcctgtgggccaagacccccaaccagggcagaagaccacccacagccacagctggcctgcggggggacacagccctgggcgcccccagcgcccctgaggccttctacgccggcagcagaggaggccccagcgtgcctgaccccggccctgccagcccctacagcggcagcggaaatggaggctttgccttcggggctgagggccctggggcccctgtgggcacagctgccccagatgactgtgactttggatttgattttgacttcctggccctggacctgactgtgcctgctgctgccaccatctgggccccctttgaaagagctgcccccctgcctgccttcagcggctgcagcacagtgaatggagcccctggccccccagctgctggggcccggcgcagcagcggggccggcacccccaggcacagccccaccctgcctgagcccggcggcctgcggctggagctgcccctgagcagaagaggagccccagaccctgtgggcgccctgtcctggaggcctccccagggccctgtgtccttccctggaggagctgccttcagcacagccaccagcctgcccagcagccctgctgctgctgcctgtgcccccctggacagcggggccagcgagaacagcaggaagcccccatctgccagcagcgccccagccctggccagagaatgtgtggtgtgtgccgagggggaggtgatggccgccctggtgccctgtggccacaacctcttctgcatggactgtgctgtgcgcatctgtgggaagtctgagccagaatgtcctgcctgcaggaccccagccacccaggccatccacatcttctcctag

SEQ ID NO: 159617 - DNA, 966 bp, synthetic construct
  misc_feature 1..966: note = Description of Artificial Sequence: Synthetic coding sequence
  source 1..966: mol_type = other DNA
atgcagtgccgcctgccccggggcctggccggggccctgctgaccctgctgtgcatgggcctgctgtgcctgcgctaccacctgaacctgagcccccagagggtgcagggcaccccagagctgagccagcccaaccctggcccccccaagctgcagctgcatgatgtgttcatcgctgtgaagaccacccgggccttccaccggctgcggctggagctgctgctggacacctgggtgtccaggacccgggagcagacctttgtgttcacagacagcccagacaagggcctgcaggagcggctgggcagccacctggtggtgaccaactgcagcgctgagcacagccacccagccctgagctgcaagatggctgctgagtttgacaccttcctggccagcggcctgcgctggttctgccacgtggatgatgacaactacgtgaacccccgggccctgctgcagctgctgcgggccttccccctggccagagatgtgtatgtgggccggcccagcctgaaccggcccatccacgccagcgagccccagccccacaacagaacccggctggtgcagttctggtttgccaccggcggggccggcttctgcatcaacaggaagctggccctgaagatggccccctgggccagcggcagccgcttcatggacaccagcgccctgatccggctgcctgatgactgcaccatgggctacatcatcgagtgcaagctgggcggccgcctgcagcccagccccctcttccacagccacctggagaccctgcagctgctgaggacagcccagctgcctgagcaggtgaccctgtcctatggagtgtttgagggcaagctgaatgtcatcaagctgcagggccccttcagccctgaggaggaccccagccgcttccgcagcctgcactgcctgctgtacccagacaccccctggtgcccccagctgggcgccaggtag

SEQ ID NO: 159618 - DNA, 924 bp, synthetic construct
  misc_feature 1..924: note = Description of Artificial Sequence: Synthetic coding sequence
  source 1..924: mol_type = other DNA
atgcagtgccgcctgccccggggcctggccggggccctgctgaccctgctgtgcatgggcctgctgtgcctgcgctaccacctgaacctgagcccccagagggtgcagggcaccccagagctgagccagcccaaccctggcccccccaagctgcagctgcatgatgtgttcatcgctgtgaagaccacccgggccttccaccggctgcggctggagctgctgctggacacctgggtgtccaggacccgggagcaggtgaccaggagccacctggtggtgaccaactgcagcgctgagcacagccacccagccctgagctgcaagatggctgctgagtttgacaccttcctggccagcggcctgcgctggttctgccacgtggatgatgacaactacgtgaacccccgggccctgctgcagctgctgcgggccttccccctggccagagatgtgtatgtgggccggcccagcctgaaccggcccatccacgccagcgagccccagccccacaacagaacccggctggtgcagttctggtttgccaccggcggggccggcttctgcatcaacaggaagctggccctgaagatggccccctgggccagcggcagccgcttcatggacaccagcgccctgatccggctgcctgatgactgcaccatgggctacatcatcgagtgcaagctgggcggccgcctgcagcccagccccctcttccacagccacctggagaccctgcagctgctgaggacagcccagctgcctgagcaggtgaccctgtcctatggagtgtttgagggcaagctgaatgtcatcaagctgcagggccccttcagccctgaggaggaccccagccgcttccgcagcctgcactgcctgctgtacccagacaccccctggtgcccccagctgggcgccaggtag

SEQ ID NO: 159619 - DNA, 357 bp, synthetic construct
  misc_feature 1..357: note = Description of Artificial Sequence: Synthetic coding sequence
  source 1..357: mol_type = other DNA
atgcagtgccgcctgccccggggcctggccggggccctgctgaccctgctgtgcatgggcctgctgtgcctgcgctaccacctgaacctgagcccccagagggtgcagggcaccccagagctgagccagcccaaccctggcccccccaagctgcagctgcatgatgtgttcatcgctgtgaagaccacccgggccttccaccggctgcggctggagctgctgctggacacctgggtgtccaggacccgggagcagacctttgtgttcacagacagcccagacaagggcctgcaggagcggctgggcagcccagacagcagcagcctgctgcagggccccaccctgtggagcccctag

SEQ ID NO: 159620 - DNA, 399 bp, synthetic construct
  misc_feature 1..399: note = Description of Artificial Sequence: Synthetic coding sequence
  source 1..399: mol_type = other DNA
atggctgctgagtttgacaccttcctggccagcggcctgcgctggttctgccacgtggatgatgacaactacgtgaacccccgggccctgctgcagctgctgcgggccttccccctggccagagatgtgtatgtgggccggcccagcctgaaccggcccatccacgccagcgagccccagccccacaacagaacccggctggtgcagttctggtttgccaccggcggggccggcttctgcatcaacaggaagctggccctgaagatggccccctgggccagcggcagccgcttcatggacaccagcgccctgatccggctgcctgatgactgcaccatgggctacatcatcgagtgcaagctgggcggccgcctgcagcccagccccctcttccactag

SEQ ID NO: 159621 - DNA, 132 bp, synthetic construct
  misc_feature 1..132: note = Description of Artificial Sequence: Synthetic coding sequence
  source 1..132: mol_type = other DNA
atggctgctgagtttgacaccttcctggccagcggcctgcgctggttctgccacgtggatgatgacaactacgtgaacccccgggccctgctgcagctgctgcgggccttccccctggccagagatgtgtag

SEQ ID NO: 159622 - DNA, 264 bp, synthetic construct
  misc_feature 1..264: note = Description of Artificial Sequence: Synthetic coding sequence
  source 1..264: mol_type = other DNA
tgaagccacctggagaccctgcagctgctgaggacagcccagctgcctgagcagatcagcctgccccccctgagcgccctgagccgctacaccctggtgtccccagctggctgccccatgaaccctgagctgctgggcaagggctgggccgagaccagcggctgtgccctggcccccaaggtggccctgtgggtgcctgggaagtgcctggtgattggcagcccctggcagggcctgcgggtggtgggcaagccccgcatctag

SEQ ID NO: 159623 - DNA, 999 bp, synthetic construct
  misc_feature 1..999: note = Description of Artificial Sequence: Synthetic coding sequence
  source 1..999: mol_type = other DNA
atgggcctgggccctgtgttcctgctgctggccggcatcttcccctttgcccctcctggagctgctgctgagccccacagcctgcgctacaacctgactgtgctgtcctgggatggctctgtgcagagcggcttcctggccgaggtgcacctggatggccagcccttcctgcgctatgaccggcagaagtgccgggccaagccccagggccagtgggccgaggatgtgctgggcaacaagacctgggaccgggagacccgggacctgactggaaatggcaaggacctgaggatgaccctggcccacatcaaggaccagaaggagggcctgcacagcctgcaggagatccgggtgtgtgagatccacgaggacaacagcaccaggagcagccagcacttctactatgatggagagctgttcctgagccagaacctggagacagaggagtggacagtgccccagagcagccgggcccagaccctggccatgaatgtgaggaacttcctgaaggaggatgccatgaagaccaagacccactaccacgccatgcatgctgactgcctgcaggagctgcggcgctacctggagagcggcgtggtgctgcggaggacagtgccccccatggtgaatgtgaccaggtctgaggccagcgagggcaacatcaccgtgacctgccgggccagcagcttctaccccaggaacatcatcctgacctggaggcaggatggagtgtccctgagccatgacacccagcagtggggagatgtgctgcctgatggaaatggcacctaccagacctgggtggccacccgcatctgccgcggggaggagcagcgcttcacctgctacatggagcacagcggcaaccacagcacccaccctgtgcccagcggcaaggtgctggtgctgcagagccactggcagaccttccacgtgtctgctgtggccgccggctgctgctacttctgctactactacttcctgtgccccctgctgtag

SEQ ID NO: 159624 - DNA, 585 bp, synthetic construct
  misc_feature 1..585: note = Description of Artificial Sequence: Synthetic coding sequence
  source 1..585: mol_type = other DNA
atgggccagagggaccagggcctggaccgggagaggaagggcccccaggatgatcctggcagctaccagggccctgagaggaggaacttcctgaaggaggatgccatgaagaccaagacccactaccacgccatgcatgctgactgcctgcaggagctgcggcgctacctggagagcggcgtggtgctgcggaggacagtgccccccatggtgaatgtgaccaggtctgaggccagcgagggcaacatcaccgtgacctgccgggccagcagcttctaccccaggaacatcatcctgacctggaggcaggatggagtgtccctgagccatgacacccagcagtggggagatgtgctgcctgatggaaatggcacctaccagacctgggtggccacccgcatctgccgcggggaggagcagcgcttcacctgctacatggagcacagcggcaaccacagcacccaccctgtgcccagcggcaaggtgctggtgctgcagagccactggcagaccttccacgtgtctgctgtggccgccggctgctgctacttctgctactactacttcctgtgccccctgctgtag

SEQ ID NO: 159625 - DNA, 870 bp, synthetic construct
  misc_feature 1..870: note = Description of Artificial Sequence: Synthetic coding sequence
  source 1..870: mol_type = other DNA
atgggcctgggccctgtgttcctgctgctggccggcatcttcccctttgcccctcctggagctgctgctgagccccacagcctgcgctacaacctgactgtgctgtcctgggatggctctgtgcagagcggcttcctggccgaggtgcacctggatggccagcccttcctgcgctatgaccggcagaagtgccgggccaagccccagggccagtgggccgaggatgtgctgggcaacaagacctgggaccgggagacccgggacctgactggaaatggcaaggacctgaggatgaccctggcccacatcaaggaccagaaggaggtgccccagagcagccgggcccagaccctggccatgaatgtgaggaacttcctgaaggaggatgccatgaagaccaagacccactaccacgccatgcacgccgactgcctgcaggagctgcggcgctacctggagagcggcgtggtgctgcggaggacagtgccccccatggtgaatgtgaccaggtctgaggccagcgagggcaacatcaccgtgacctgccgggccagcagcttctaccccaggaacatcatcctgacctggaggcaggatggagtgtccctgagccatgacacccagcagtggggagatgtgctgcctgatggaaatggcacctaccagacctgggtggccacccgcatctgccgcggggaggagcagcgcttcacctgctacatggagcacagcggcaaccacagcacccaccctgtgcccagcggcaaggtgctggtgctgcagagccactggcagaccttccacgtgtctgctgtggccgccggctgctgctacttctgctactactacttcctgtgccccctgctgtag

SEQ ID NO: 159626 - DNA, 738 bp, synthetic construct
  misc_feature 1..738: note = Description of Artificial Sequence: Synthetic coding sequence
  source 1..738: mol_type = other DNA
atgggccagagggaccagaggctggaccgggagaggaagggcccccaggatgatcctggcagctaccagggccctgagaggaggaacttcctgaaggaggatgccatgaagaccaagacccactaccacgccatgcatgctgactgcctgcaggagctgcggcgctacctgaagtctggagtggtgctgcggaggacagtgccccccatggtgaatgtgaccaggtctgaggccagcgagggcaacatcaccgtgacctgccgggccagcggcttctacccctggaacatcaccctgtcctggaggcaggatggagtgtccctgagccatgacacccagcagtggggagatgtgctgcctgatggaaatggcacctaccagacctgggtggccacccgcatctgccagggcgaggagcagcgcttcacctgctacatggagcacagcggcaaccacagcacccaccctgtgcccagcggcaaggtgctggtgctgcagagccactggcagaccttccacgtgtctgctgtggccgccgccgccatctttgtgatcatcatcttctacgtgcgctgctgcaagaagaagaccagcgctgctgagggccctgagctggtgtccctgcaggtgctggaccagcaccctgtgggcaccagtgaccacagagatgccacccagctgggcttccagcccctgatgtctgacctgggcagcacaggcagcacagagggcgcctag

SEQ ID NO: 159627 - DNA, 1152 bp, synthetic construct
  misc_feature 1..1152: note = Description of Artificial Sequence: Synthetic coding sequence
  source 1..1152: mol_type = other DNA
atgggcctgggccctgtgttcctgctgctggccggcatcttcccctttgcccctcctggagctgctgctgagccccacagcctgcgctacaacctgactgtgctgtcctgggatggctctgtgcagagcggcttcctgacagaggtgcacctggatggccagcccttcctgcgctgtgaccggcagaagtgccgggccaagccccagggccagtgggccgaggatgtgctgggcaacaagacctgggaccgggagacccgggacctgactggaaatggcaaggacctgaggatgaccctggcccacatcaaggaccagaaggagggcctgcacagcctgcaggagatccgggtgtgtgagatccacgaggacaacagcaccaggagcagccagcacttctactatgatggagagctgttcctgagccagaacctggagaccaaggagtggaccatgccccagagcagccgggcccagaccctggccatgaatgtgaggaacttcctgaaggaggatgccatgaagaccaagacccactaccacgccatgcatgctgactgcctgcaggagctgcggcgctacctgaagtctggagtggtgctgcggaggacagtgccccccatggtgaatgtgaccaggtctgaggccagcgagggcaacatcaccgtgacctgccgggccagcggcttctacccctggaacatcaccctgtcctggaggcaggatggagtgtccctgagccatgacacccagcagtggggagatgtgctgcctgatggaaatggcacctaccagacctgggtggccacccgcatctgccagggcgaggagcagcgcttcacctgctacatggagcacagcggcaaccacagcacccaccctgtgcccagcggcaaggtgctggtgctgcagagccactggcagaccttccacgtgtctgctgtggccgccgccgccatctttgtgatcatcatcttctacgtgcgctgctgcaagaagaagaccagcgctgctgagggccctgagctggtgtccctgcaggtgctggaccagcaccctgtgggcaccagtgaccacagagatgccacccagctgggcttccagcccctgatgtctgacctgggcagcacaggcagcacagagggcgcctag

SEQ ID NO: 159628 - DNA, 870 bp, synthetic construct; identical to SEQ ID NO: 159625
  misc_feature 1..870: note = Description of Artificial Sequence: Synthetic coding sequence
  source 1..870: mol_type = other DNA

SEQ ID NO: 159629 - DNA, 999 bp, synthetic construct; identical to SEQ ID NO: 159623
  misc_feature 1..999: note = Description of Artificial Sequence: Synthetic coding sequence
  source 1..999: mol_type = other DNA

SEQ ID NO: 159630 - DNA, 585 bp, synthetic construct; identical to SEQ ID NO: 159624
  misc_feature 1..585: note = Description of Artificial Sequence: Synthetic coding sequence
  source 1..585: mol_type = other DNA

SEQ ID NO: 159631 - DNA, 831 bp, synthetic construct
  misc_feature 1..831: note = Description of Artificial Sequence: Synthetic coding sequence
  source 1..831: mol_type = other DNA
ttcccctttgcccctcctggagctgctgctgagccccacagcctgcgctacaacctgactgtgctgtcctgggatggctctgtgcagagcggcttcctggccgaggtgcacctggatggccagcccttcctgcgctatgaccggcagaagtgccgggccaagccccagggccagtgggccgaggatgtgctgggcaacaagacctgggaccgggagacccgggacctgactggaaatggcaaggacctgaggatgaccctggcccacatcaaggaccagaaggaggtgccccccatggtgaatgtgaccaggtctgaggccagcgagggcaacatcaccgtgacctgccgggccagcagcttctaccccaggaacatcaccctgacctggaggcaggatggagtgtccctgagccatgacacccagcagtggggagatgtgctgcctgatggaaatggcacctaccagacctgggtggccacccgcatctgccagggcgaggagcagcgcttcacctgctacatggagcacagcggcaaccacagcacccaccctgtgcccagcggcaaggtgctggtgctgcagagccactggcagaccttccacgtgtctgctgtggccgctgctgctgctgccatcttcgtcatcatcatcttctacgtgcgctgctgcaagaagaagaccagcgctgctgagggccctgagctggtgtccctgcaggtgctggaccagcaccctgtgggcaccagtgaccacagagatgccacccagctgggcttccagcccctgatgtctgccctgggcagcacaggcagcacagaaggagcctag

SEQ ID NO: 159632 - DNA, 1158 bp, synthetic construct
  misc_feature 1..1158: note = Description of Artificial Sequence: Synthetic coding sequence
  source 1..1158: mol_type = other DNA
atgggcctgggccctgtgttcctgctgctggccggcatcttcccctttgcccctcctggagctgctgctgagccccacagcctgcgctacaacctgactgtgctgtcctgggatggctctgtgcagagcggcttcctggccgaggtgcacctggatggccagcccttcctgcgctatgaccggcagaagtgccgggccaagccccagggccagtgggccgaggatgtgctgggcaacaagacctgggaccgggagacccgggacctgactggaaatggcaaggacctgaggatgaccctggcccacatcaaggaccagaaggagggcctgcacagcctgcaggagatccgggtgtgtgagatccacgaggacaacagcaccaggagcagccagcacttctactatgatggagagctgttcctgagccagaatgtggagacagaggagtggacagtgccccagagcagccgggcccagaccctggccatgaatgtgaggaacttcctgaaggaggatgccatgaagaccaagacccactaccacgccatgcatgctgactgcctgcaggagctgcggcgctacctggagagctctgtggtgctgcggaggagagtgccccccatggtgaatgtgaccaggtctgaggccagcgagggcaacatcaccgtgacctgccgggccagcagcttctaccccaggaacatcaccctgacctggaggcaggatggagtgtccctgagccatgacacccagcagtggggagatgtgctgcctgatggaaatggcacctaccagacctgggtggccacccgcatctgccagggcgaggagcagcgcttcacctgctacatggagcacagcggcaaccacagcacccaccctgtgcccagcggcaaggtgctggtgctgcagagccactggcagaccttccacgtgtctgctgtggccgctgctgctgctgccatctttgtgatcatcatcttctacgtgcgctgctgcaagaagaagaccagcgctgctgagggccctgagctggtgtccctgcaggtgctggaccagcaccctgtgggcaccagtgaccacagagatgccacccagctgggcttccagcccctgatgtctgccctgggcagcacaggcagcacagagggcgcctag

SEQ ID NO: 159633 - DNA, 744 bp, synthetic construct
  misc_feature 1..744: note = Description of Artificial Sequence: Synthetic coding sequence
  source 1..744: mol_type = other DNA
atgggccagagggaccagggcctggaccgggagaggaagggcccccaggatgatcctggcagctaccagggccctgagaggaggaacttcctgaaggaggatgccatgaagaccaagacccactaccacgccatgcatgctgactgcctgcaggagctgcggcgctacctggagagctctgtggtgctgcggaggagagtgccccccatggtgaatgtgaccaggtctgaggccagcgagggcaacatcaccgtgacctgccgggccagcagcttctaccccaggaacatcaccctgacctggaggcaggatggagtgtccctgagccatgacacccagcagtggggagatgtgctgcctgatggaaatggcacctaccagacctgggtggccacccgcatctgccagggcgaggagcagcgcttcacctgctacatggagcacagcggcaaccacagcacccaccctgtgcccagcggcaaggtgctggtgctgcagagccactggcagaccttccacgtgtctgctgtggccgctgctgctgctgccatctttgtgatcatcatcttctacgtgcgctgctgcaagaagaagaccagcgctgctgagggccctgagctggtgtccctgcaggtgctggaccagcaccctgtgggcaccagtgaccacagagatgccacccagctgggcttccagcccctgatgtctgccctgggcagcacaggcagcacagagggcgcctag

SEQ ID NO: 159634 - DNA, 672 bp, synthetic construct
  misc_feature 1..672: note = Description of Artificial Sequence: Synthetic coding sequence
  source 1..672: mol_type = other DNA
ttcccctttgcccctcctggagctgctgctgagccccacagcctgcgctacaacctgactgtgctgtcctgggatggctctgtgcagagcggcttcctggccgaggtgcacctggatggccagcccttcctgcgctatgaccggcagaagtgccgggccaagccccagggccagtgggccgaggatgtgctgggcaacaagacctgggaccgggagacccgggacctgactggaaatggcaaggacctgaggatgaccctggcccacatcaaggaccagaaggaggtgccccccatggtgaatgtgaccaggtctgaggccagcgagggcaacatcaccgtgacctgccgggccagcagcttctaccccaggaacatcatcctgacctggaggcaggatggagtgtccctgagccatgacacccagcagtggggagatgtgctgcctgatggaaatggcacctaccagacctgggtggccacccgcatctgccgcggggaggagcagcgcttcacctgctacatggagcacagcggcaaccacagcacccaccctgtgcccagcggcaaggtgctggtgctgcagagccactggcagaccttccacgtgtctgctgtggccgccggctgctgctacttctgctactactacttcctgtgccccctgctgtag

SEQ ID NO: 159635 - DNA, 672 bp, synthetic construct; identical to SEQ ID NO: 159634
  misc_feature 1..672: note = Description of Artificial Sequence: Synthetic coding sequence
  source 1..672: mol_type = other DNA

SEQ ID NO: 159636 - DNA, 672 bp, synthetic construct; identical to SEQ ID NO: 159634
  misc_feature 1..672: note = Description of Artificial Sequence: Synthetic coding sequence
  source 1..672: mol_type = other DNA

SEQ ID NO: 159637 - DNA, 999 bp, synthetic construct; identical to SEQ ID NO: 159623
  misc_feature 1..999: note = Description of Artificial Sequence: Synthetic coding sequence
  source 1..999: mol_type = other DNA

SEQ ID NO: 159638 - DNA, 1029 bp, synthetic construct
  misc_feature 1..1029: note = Description of Artificial Sequence: Synthetic coding sequence
  source 1..1029: mol_type = other DNA
atgggcctgggccctgtgttcctgctgctggccggcatcttcccctttgcccctcctggagctgctgctgagccccacagcctgcgctacaacctgactgtgctgtcctgggatggctctgtgcagagcggcttcctggccgaggtgcacctggatggccagcccttcctgcgctatgaccggcagaagtgccgggccaagccccagggccagtgggccgaggatgtgctgggcaacaagacctgggaccgggagacccgggacctgactggaaatggcaaggacctgaggatgaccctggcccacatcaaggaccagaaggaggtgccccagagcagccgggcccagaccctggccatgaatgtgaggaacttcctgaaggaggatgccatgaagaccaagacccactaccacgccatgcacgccgactgcctgcaggagctgcggcgctacctggagagctctgtggtgctgcggcggcgggtgccccccatggtgaatgtgaccaggtctgaggccagcgagggcaacatcaccgtgacctgccgggccagcagcttctaccccaggaacatcaccctgacctggaggcaggatggagtgtccctgagccatgacacccagcagtggggagatgtgctgcctgatggaaatggcacctaccagacctgggtggccacccgcatctgccagggcgaggagcagcgcttcacctgctacatggagcacagcggcaaccacagcacccaccctgtgcccagcggcaaggtgctggtgctgcagagccactggcagaccttccacgtgtctgctgtggccgctgctgctgctgccatcttcgtcatcatcatcttctacgtgcgctgctgcaagaagaagaccagcgctgctgagggccctgagctggtgtccctgcaggtgctggaccagcaccctgtgggcaccagtgaccacagagatgccacccagctgggcttccagcccctgatgtctgccctgggcagcacaggcagcacagaaggagcctag

SEQ ID NO: 159639 - DNA, 825 bp, synthetic construct
  misc_feature 1..825: note = Description of Artificial Sequence: Synthetic coding sequence
  source 1..825: mol_type = other DNA
ttcccctttgcccctcctggagctgctgctgagccccacagcctgcgctacaacctgactgtgctgtcctgggatggctctgtgcagagcggcttcctgacagaggtgcacctggatggccagcccttcctgcgctgtgaccggcagaagtgccgggccaagccccagggccagtgggccgaggatgtgctgggcaacaagacctgggaccgggagacccgggacctgactggaaatggcaaggacctgaggatgaccctggcccacatcaaggaccagaaggaggtgccccccatggtgaatgtgaccaggtctgaggccagcgagggcaacatcaccgtgacctgccgggccagcggcttctacccctggaacatcaccctgtcctggaggcaggatggagtgtccctgagccatgacacccagcagtggggagatgtgctgcctgatggaaatggcacctaccagacctgggtggccacccgcatctgccagggcgaggagcagcgcttcacctgctacatggagcacagcggcaaccacagcacccaccctgtgcccagcggcaaggtgctggtgctgcagagccactggcagaccttccacgtgtctgctgtggccgctgctgccatcttcgtcatcatcatcttctacgtgcgctgctgcaagaagaagaccagcgctgctgagggccctgagctggtgtccctgcaggtgctggaccagcaccctgtgggcaccagtgaccacagagatgccacccagctgggcttccagcccctgatgtctgacctgggcagcacaggcagcacagaaggagcctag

SEQ ID NO: 159640 - DNA, 585 bp, synthetic construct; identical to SEQ ID NO: 159624
  misc_feature 1..585: note = Description of Artificial Sequence: Synthetic coding sequence
  source 1..585: mol_type = other DNA

SEQ ID NO: 159641 - DNA, 870 bp, synthetic construct; identical to SEQ ID NO: 159625
  misc_feature 1..870: note = Description of Artificial Sequence: Synthetic coding sequence
  source 1..870: mol_type = other DNA

SEQ ID NO: 159642 - DNA, 999 bp, synthetic construct; identical to SEQ ID NO: 159623
  misc_feature 1..999: note = Description of Artificial Sequence: Synthetic coding sequence
  source 1..999: mol_type = other DNA

SEQ ID NO: 159643 - DNA, 999 bp, synthetic construct; identical to SEQ ID NO: 159623
  misc_feature 1..999: note = Description of Artificial Sequence: Synthetic coding sequence
  source 1..999: mol_type = other DNA

SEQ ID NO: 159644 - DNA, 1152 bp, synthetic construct; identical to SEQ ID NO: 159627
  misc_feature 1..1152: note = Description of Artificial Sequence: Synthetic coding sequence
  source 1..1152: mol_type = other DNA

SEQ ID NO: 159645 - DNA, 999 bp, synthetic construct; identical to SEQ ID NO: 159623
  misc_feature 1..999: note = Description of Artificial Sequence: Synthetic coding sequence
  source 1..999: mol_type = other DNA

SEQ ID NO: 159646 - DNA, 999 bp, synthetic construct
  misc_feature 1..999: note = Description of Artificial Sequence: Synthetic coding sequence
  source 1..999: mol_type = other DNA
atgggcctgggccctgtgttcctgctgctggccggcatcttcccctttgcccctcctggagctgctgctgagccccacagcctgcgctacaacctgactgtgctgtcctgggatggctctgtgcagagcggcttcctggccgaggtgcacctggatggccagcccttcctgcgctatgaccggcagaagtgccgggccaagccccagggccagtgggccgaggatgtgctgggcaacaagacctgggaccgggagacccgggacctgactggaaatggcaaggacctgaggatgaccctggcccacatcaaggaccagaaggagggcctgcacagcctgcaggagatccgggtgtgtgagatccacgaggacaacagcaccaggagcagccagcacttctactatgatggagagctgttcctgagccagaatgtggagacagaggagtggacagtgccccagagcagccgggcccagaccctggccatgaatgtgaggaacttcctgaaggaggatgccatgaagaccaagacccactaccacgccatgcatgctgactgcctgcaggagctgcggcgctacctggagagctctgtggtgctgcggaggagagtgccccccatggtgaatgtgaccaggtctgaggccagcgagggcaacatcaccgtgacctgccgggccagcagcttctaccccaggaacatcaccctgacctggaggcaggatggagtgtccctgagccatgacacccagcagtggggagatgtgctgcctgatggaaatggcacctaccagacctgggtggccacccgcatctgccagggcgaggagcagcgcttcacctgctacatggagcacagcggcaaccacagcacccaccctgtgcccagcggcaaggtgctggtgctgcagagccactggcagaccttccacgtgtctgctgtggccgcctgctgctgctacttctgctactactacttcctgtgccccctgctgtag

SEQ ID NO: 159647 - DNA, 1152 bp, synthetic construct
  misc_feature 1..1152: note = Description of Artificial Sequence: Synthetic coding sequence
  source 1..1152: mol_type = other DNA
atgggcctgggccgggtgctgctcttcctggccgtggccttcccctttgcccccccagctgctgctgctgagccccacagcctgcgctacaacctgatggtgctgagccaggacggctctgtgcagagcggcttcctggccgagggccacctggatggccagcccttcctgcgctatgaccggcagaagaggcgggccaagccccagggccagtgggccgagaatgtgctgggcgccaagacctgggacacagaaacagaggacctgacagaaaatggccaggacctgcggaggaccctgacccacatcaaggaccagaagggcggcctgcacagcctgcaggagatccgggtgtgtgagatccacgaggacagcagcacccggggcagccgccacttctactatgatggagagctgttcctgagccagaacctggagacccaggagagcacagtgccccagagcagccgggcccagaccctggccatgaatgtgaccaacttctggaaggaggatgccatgaagaccaagacccactaccgggccatgcaggccgactgcctgcagaagctgcagcgctacctgaagtctggagtggccatccggaggacagtgccccccatggtgaatgtgacctgcagcgaggtgtctgagggcaacatcaccgtgacctgccgggccagcagcttctaccccaggaacatcaccctgacctggaggcaggatggagtgtccctgagccacaacacccagcagtggggagatgtgctgcctgatggaaatggcacctaccagacctgggtggccacccgcatccggcagggcgaggagcagcgcttcacctgctacatggagcacagcggcaaccacggcacccaccctgtgcccagcggcaaggccctggtgctgcagagccagaggacagacttcccctacgtgtctgctgccatgccctgcttcgtcatcatcatcatcctgtgtgtgccctgctgcaagaagaagaccagcgctgctgagggccctgagctggtgtccctgcaggtgctggaccagcaccctgtgggcaccggggaccacagagatgctgcccagctgggcttccagcccctgatgtctgccaccggcagcacaggcagcacagagggcacctag

SEQ ID NO: 159648 - DNA, 1152 bp, synthetic construct
  misc_feature 1..1152: note = Description of Artificial Sequence: Synthetic coding sequence
  source 1..1152: mol_type = other DNA
atgggcctgggccgggtgctgctcttcctggccgtggccttcccctttgcccccccagctgctgctgctgagccccacagcctgcgctacaacctgatggtgctgagccaggacggctctgtgcagagcggcttcctggccgagggccacctggatggccagcccttcctgcgctatgaccggcagaagaggcgggccaagccccagggccagtgggccgaggatgtgctgggcgccaagacctgggacacagaaacagaggacctgacagaaaatggccaggacctgcggaggaccctgacccacatcaaggaccagaagggcggcctgcacagcctgcaggagatccgggtgtgtgagatccacgaggacagcagcacccggggcagccgccacttctactatgatggagagctgttcctgagccagaacctggagacccaggagagcacagtgccccagagcagccgggcccagaccctggccatgaatgtgaccaacttctggaaggaggatgccatgaagaccaagacccactaccgggccatgcaggccgactgcctgcagaagctgcagcgctacctgaagtctggagtggccatccggaggacagtgccccccatggtgaatgtcatctgcagcgaggtgtctgagggcaacatcaccgtgacctgccgggccagcagcttctaccccaggaacatcaccctgacctggaggcaggatggagtgtccctgagccacaacacccagcagtggggagatgtgctgcctgatggaaatggcacctaccagacctgggtggccacccgcatccggcagggcgaggagcagcgcttcacctgctacatggagcacagcggcaaccacggcacccaccctgtgcccagcggcaaggccctggtgctgcagagccagaggacagacttcccctacgtgtctgctgccatgccctgcttcgtcatcatcatcatcctgtgtgtgccctgctgcaagaagaagaccagcgctgctgagggccctgagctggtgtccctgcaggtgctggaccagcaccctgtgggcaccggggaccacagagatgctgcccagctgggcttccagcccctgatgtctgccaccggcagcacaggcagcacagagggcacctag

SEQ ID NO: 159649 - DNA, 1023 bp, synthetic construct
  misc_feature 1..1023: note = Description of Artificial Sequence: Synthetic coding sequence
  source 1..1023: mol_type = other DNA
atgggcctgggccgggtgctgctcttcctggccgtggccttcccctttgcccccccagctgctgctgctgagccccacagcctgcgctacaacctgatggtgctgagccaggacggctctgtgcagagcggcttcctggccgagggccacctggatggccagcccttcctgcgctatgaccggcagaagaggcgggccaagccccagggccagtgggccgagaatgtgctgggcgccaagacctgggacacagaaacagaggacctgacagaaaatggccaggacctgcggaggaccctgacccacatcaaggaccagaagggcgtgccccagagcagccgggcccagaccctggccatgaatgtgaccaacttctggaaggaggatgccatgaagaccaagacccactaccgggccatgcaggccgactgcctgcagaagctgcagcgctacctgaagagcggcgtggccatcagaagaacagtgccccccatggtgaatgtgacctgcagcgaggtgtctgagggcaacatcaccgtgacctgccgggccagcagcttctaccccaggaacatcaccctgacctggaggcaggatggagtgtccctgagccacaacacccagcagtggggagatgtgctgcctgatggaaatggcacctaccagacctgggtggccacccgcatccggcagggcgaggagcagcgcttcacctgctacatggagcacagcggcaaccacggcacccaccctgtgcccagcggcaaggccctggtgctgcagagccagaggacagacttcccctacgtgtctgctgccatgccctgctttgtgatcatcatcatcctgtgtgtgccctgctgcaagaagaagaccagcgctgctgagggccctgagctggtgtccctgcaggtgctggaccagcaccctgtgggcactggagaccacagagatgctgcccagctgggcttccagcccctgatgtctgccaccggcagcacaggcagcacagagggcacctag

SEQ ID NO: 159650 - DNA, 1023 bp, synthetic construct
  misc_feature 1..1023: note = Description of Artificial Sequence: Synthetic coding sequence
  source 1..1023: mol_type = other DNA
atgggcctgggccgggtgctgctcttcctggccgtggccttcccctttgcccccccagctgctgctgctgagccccacagcctgcgctacaacctgatggtgctgagccaggacggctctgtgcagagcggcttcctggccgagggccacctggatggccagcccttcctgcgctatgaccggcagaagaggcgggccaagccccagggccagtgggccgaggatgtgctgggcgccaagacctgggacacagaaacagaggacctgacagaaaatggccaggacctgcggaggaccctgacccacatcaaggaccagaagggcgtgccccagagcagccgggcccagaccctggccatgaatgtgaccaacttctggaaggaggatgccatgaagaccaagacccactaccgggccatgcaggccgactgcctgcagaagctgcagcgctacctgaagagcggcgtggccatcagaagaacagtgccccccatggtgaatgtgacctgcagcgaggtgtctgagggcaacatcaccgtgacctgccgggccagcagcttctaccccaggaacatcaccctgacctggaggcaggatggagtgtccctgagccacaacacccagcagtggggagatgtgctgcctgatggaaatggcacctaccagacctgggtggccacccgcatccggcagggcgaggagcagcgcttcacctgctacatggagcacagcggcaaccacggcacccaccctgtgcccagcggcaaggccctggtgctgcagagccagaggacagacttcccctacgtgtctgctgccatgccctgctttgtgatcatcatcatcctgtgtgtgccctgctgcaagaagaagaccagcgctgctgagggccctgagctggtgtccctgcaggtgctggaccagcaccctgtgggcactggagaccacagagatgctgcccagctgggcttccagcccctgatgtctgccaccggcagcacaggcagcacagaaggagcctag

SEQ ID NO: 159651 - DNA, 126 bp, synthetic construct
  misc_feature 1..126: note = Description of Artificial Sequence: Synthetic coding sequence
  source 1..126: mol_type = other DNA
atgggcctgggccgggtgctgctcttcctggccgtggccttcccctttgcccccccagctgctgctgctgtggagatgggcttccaccgggtgtcccaggacggcctggacctgctgaccagctag

SEQ ID NO: 159652 - DNA, 1083 bp, synthetic construct
  misc_feature 1..1083: note = Description of Artificial Sequence: Synthetic coding sequence
  source 1..1083: mol_type = other DNA
tgaccccacagcctgcgctacaacctgatggtgctgagccaggacggctctgtgcagagcggcttcctggccgagggccacctggatggccagcccttcctgcgctatgaccggcagaagagaagagccaagccccagggccagtgggccgaggatgtgctgggcgccaagacctgggacacagaaacagaggacctgacagaaaatggccaggacctgcggaggaccctgacccacatcaaggaccagaagggcggcctgcacagcctgcaggagatccgggtgtgtgagatccacgaggacagcagcacccggggcagccgccacttctactatgatggagagctgttcctgagccagaacctggagacccaggagagcacagtgccccagagcagccgggcccagaccctggccatgaatgtgaccaacttctggaaggaggatgccatgaagaccaagacccactaccgggccatgcaggccgactgcctgcagaagctgcagcgctacctgaagagcggcgtggccatcagaagaacagtgccccccatggtgaatgtgacctgcagcgaggtgtctgagggcaacatcaccgtgacctgccgggccagcagcttctaccccaggaacatcaccctgacctggaggcaggatggagtgtccctgagccacaacacccagcagtggggagatgtgctgcctgatggaaatggcacctaccagacctgggtggccacccgcatccggcagggcgaggagcagcgcttcacctgctacatggagcacagcggcaaccacggcacccaccctgtgcccagcggcaaggccctggtgctgcagagccagaggacagacttcccctacgtgtctgctgccatgccctgctttgtgatcatcatcatcctgtgtgtgccctgctgcaagaagaagaccagcgctgctgagggccctgagctggtgtccctgcaggtgctggaccagcaccctgtgggcactggagaccacagagatgctgcccagctgggcttccagcccctgatgtctgccaccggcagcacaggcagcacagaaggagcctag

SEQ ID NO: 159653 - DNA, 1152 bp, synthetic construct
  misc_feature 1..1152: note = Description of Artificial Sequence: Synthetic coding sequence
  source 1..1152: mol_type = other DNA
atgggcctgggccgggtgctgctcttcctggccgtggccttcccctttgcccccccagctgctgctgctgagccccacagcctgcgctacaacctgatggtgctgagccaggacggctctgtgcagagcggcttcctggccgagggccacctggatggccagcccttcctgcgctatgaccggcagaagaggcgggccaagccccagggccagtgggccgaggatgtgctgggcgccaagacctgggacacagaaacagaggacctgacagaaaatggccaggacctgcggaggaccctgacccacatcaaggaccagaagggcggcctgcacagcctgcaggagatccgggtgtgtgagatccacgaggacagcagcacccggggcagccgccacttctactatgatggagagctgttcctgagccagaacctggagacccaggagagcacagtgccccagagcagccgggcccagaccctggccatgaatgtgaccaacttctggaaggaggatgccatgaagaccaagacccactaccgggccatgcaggccgactgcctgcagaagctgcagcgctacctgaagtctggagtggccatccggaggacagtgccccccatggtgaatgtgacctgcagcgaggtgtctgagggcaacatcaccgtgacctgccgggccagcagcttctaccccaggaacatcaccctgacctggaggcaggatggagtgtccctgagccacaacacccagcagtggggagatgtgctgcctgatggaaatggcacctaccagacctgggtggccacccgcatccggcagggcgaggagcagcgcttcacctgctacatggagcacagcggcaaccacggcacccaccctgtgcccagcggcaaggccctggtgctgcagagccagaggacagacttcccctacgtgtctgctgccatgccctgcttcgtcatcatcatcatcctgtgtgtgccctgctgcaagaagaagaccagcgctgctgagggccctgagctggtgtccctgcaggtgctggaccagcaccctgtgggcaccggggaccacagagatgctgcccagctgggcttccagcccctgatgtctgccaccggcagcacaggcagcacagagggcgcctag

SEQ ID NO: 159654 - DNA, 1023 bp, synthetic construct
  misc_feature 1..1023: note = Description of Artificial Sequence: Synthetic coding sequence
  source 1..1023: mol_type = other DNA
atgggcctgggccgggtgctgctcttcctggccgtggccttcccctttgcccccccagctgctgctgctgagccccacagcctgcgctacaacctgatggtgctgagccaggacggctctgtgcagagcggcttcctggccgagggccacctggatggccagcccttcctgcgctatgaccggcagaagaggcgggccaagccccagggccagtgggccgaggatgtgctgggcgctgagacctgggacacagaaacagaggacctgacagaaaatggccaggacctgcggaggaccctgacccacatcaaggaccagaagggcgtgccccagagcagccgggcccagaccctggccatgaatgtgaccaacttctggaaggaggatgccatgaagaccaagacccactaccgggccatgcaggccgactgcctgcagaagctgcagcgctacctgaagagcggcgtggccatcagaagaacagtgccccccatggtgaatgtgacctgcagcgaggtgtctgagggcaacatcaccgtgacctgccgggccagcagcttctaccccaggaacatcaccctgacctggaggcaggatggagtgtccctgagccacaacacccagcagtggggagatgtgctgcctgatggaaatggcacctaccagacctgggtggccacccgcatccggcagggcgaggagcagcgcttcacctgctacatggagcacagcggcaaccacggcacccaccctgtgcccagcggcaaggccctggtgctgcagagccagaggacagacttcccctacgtgtctgctgccatgccctgctttgtgatcatcatcatcctgtgtgtgccctgctgcaagaagaagaccagcgctgctgagggccctgagctggtgtccctgcaggtgctggaccagcaccctgtgggcactggagaccacagagatgctgcccagctgggcttccagcccctgatgtctgccaccggcagcacaggcagcacagaaggagcctag

SEQ ID NO: 159655 - DNA, 1152 bp, synthetic construct
  misc_feature 1..1152: note = Description of Artificial Sequence: Synthetic coding sequence
  source 1..1152: mol_type = other DNA
atgggcctgggccgggtgctgctcttcctggccgtggccttcccctttgcccccccagctgctgctgctgagccccacagcctgcgctacaacctgatggtgctgagccaggacggctctgtgcagagcggcttcctggccgagggccacctggatggccagcccttcctgcgctatgaccggcagaagaggcgggccaagccccagggccagtgggccgaggatgtgctgggcgctgagacctgggacacagaaacagaggacctgacagaaaatggccaggacctgcggaggaccctgacccacatcaaggaccagaagggcggcctgcacagcctgcaggagatccgggtgtgtgagatccacgaggacagcagcacccggggcagccgccacttctactacaacggggagctgttcctgagccagaacctggagacccaggagagcacagtgccccagagcagccgggcccagaccctggccatgaatgtgaccaacttctggaaggaggatgccatgaagaccaagacccactaccgggccatgcaggccgactgcctgcagaagctgcagcgctacctgaagtctggagtggccatccggaggacagtgccccccatggtgaatgtgacctgcagcgaggtgtctgagggcaacatcaccgtgacctgccgggccagcagcttctaccccaggaacatcaccctgacctggaggcaggatggagtgtccctgagccacaacacccagcagtggggagatgtgctgcctgatggaaatggcacctaccagacctgggtggccacccgcatccggcagggcgaggagcagcgcttcacctgctacatggagcacagcggcaaccacggcacccaccctgtgcccagcggcaaggccctggtgctgcagagccagaggacagacttcccctacgtgtctgctgccatgccctgcttcgtcatcatcatcatcctgtgtgtgccctgctgcaagaagaagaccagcgctgctgagggccctgagctggtgtccctgcaggtgctggaccagcaccctgtgggcaccggggaccacagagatgctgcccagctgggcttccagcccctgatgtctgccaccggcagcacaggcagcacagagggcgcctag

SEQ ID NO: 159656 - DNA, 1023 bp, synthetic construct
  misc_feature 1..1023: note = Description of Artificial Sequence: Synthetic coding sequence
  source 1..1023: mol_type = other DNA
atgggcctgggccgggtgctgctcttcctggccgtggccttcccctttgcccccccagctgctgctgctgagccccacagcctgcgctacaacctgatggtgctgagccaggacggctctgtgcagagcggcttcctggccgagggccacctggatggccagcccttcctgcgctatgaccggcagaagaggcgggccaagccccagggccagtgggccgaggatgtgctgggcgccaagacctgggacacagaaacagaggacctgacagaaaatggccaggacctgcggaggaccctgacccacatcaaggaccagaagggcgtgccccagagcagccgggcccagaccctggccatgaatgtgaccaacttctggaaggaggatgccatgaagaccaagacccactaccgggccatgcaggccgactgcctgcagaagctgcagcgctacctgaagagcggcgtggccatcagaagaacagtgccccccatggtgaatgtcatctgcagcgaggtgtctgagggcaacatcaccgtgacctgccgggccagcagcttctaccccaggaacatcaccctgacctggaggcaggatggagtgtccctgagccacaacacccagcagtggggagatgtgctgcctgatggaaatggcacctaccagacctgggtggccacccgcatccggcagggcgaggagcagcgcttcacctgctacatggagcacagcggcaaccacggcacccaccctgtgcccagcggcaaggccctggtgctgcagagccagaggacagacttcccctacgtgtctgctgccatgccctgctttgtgatcatcatcatcctgtgtgtgccctgctgcaagaagaagaccagcgctgctgagggccctgagctggtgtccctgcaggtgctggaccagcaccctgtgggcactggagaccacagagatgctgcccagctgggcttccagcccctgatgtctgccaccggcagcacaggcagcacagagggcacctag

SEQ ID NO: 159657 - DNA, 1023 bp, synthetic construct; identical to SEQ ID NO: 159654
  misc_feature 1..1023: note = Description of Artificial Sequence: Synthetic coding sequence
  source 1..1023: mol_type = other DNA

SEQ ID NO: 159658 - DNA, 1023 bp, synthetic construct; identical to SEQ ID NO: 159649
  misc_feature 1..1023: note = Description of Artificial Sequence: Synthetic coding sequence
  source 1..1023: mol_type = other DNA

SEQ ID NO: 159659 - DNA, 1152 bp, synthetic construct; identical to SEQ ID NO: 159653
  misc_feature 1..1152: note = Description of Artificial Sequence: Synthetic coding sequence
  source 1..1152: mol_type = other DNA

SEQ ID NO: 159660 - DNA, 1152 bp, synthetic construct; identical to SEQ ID NO: 159647
  misc_feature 1..1152: note = Description of Artificial Sequence: Synthetic coding sequence
  source 1..1152: mol_type = other DNA

SEQ ID NO: 159661 - DNA, 1023 bp, synthetic construct; identical to SEQ ID NO: 159650
  misc_feature 1..1023: note = Description of Artificial Sequence: Synthetic coding sequence
  source 1..1023: mol_type = other DNA

SEQ ID NO: 159662 - DNA, 954 bp, synthetic construct
  misc_feature 1..954: note = Description of Artificial Sequence: Synthetic coding sequence
  source 1..954: mol_type = other DNA
tgaccccacagcctgcgctacaacctgatggtgctgagccaggacggctctgtgcagagcggcttcctggccgagggccacctggatggccagcccttcctgcgctatgaccggcagaagagaagagccaagccccagggccagtgggccgaggatgtgctgggcgccaagacctgggacacagaaacagaggacctgacagaaaatggccaggacctgcggaggaccctgacccacatcaaggaccagaagggcgtgccccagagcagccgggcccagaccctggccatgaatgtgaccaacttctggaaggaggatgccatgaagaccaagacccactaccgggccatgcaggccgactgcctgcagaagctgcagcgctacctgaagtctggagtggccatccggaggacagtgccccccatggtgaatgtgacctgcagcgaggtgtctgagggcaacatcaccgtgacctgccgggccagcagcttctaccccaggaacatcaccctgacctggaggcaggatggagtgtccctgagccacaacacccagcagtggggagatgtgctgcctgatggaaatggcacctaccagacctgggtggccacccgcatccggcagggcgaggagcagcgcttcacctgctacatggagcacagcggcaaccacggcacccaccctgtgcccagcggcaaggccctggtgctgcagagccagaggacagacttcccctacgtgtctgctgccatgccctgcttcgtcatcatcatcatcctgtgtgtgccctgctgcaagaagaagaccagcgctgctgagggccctgagctggtgtccctgcaggtgctggaccagcaccctgtgggcaccggggaccacagagatgctgcccagctgggcttccagcccctgatgtctgccaccggcagcacaggcagcacagagggcgcctag

SEQ ID NO: 159663 - DNA, 1152 bp, synthetic construct
  misc_feature 1..1152: note = Description of Artificial Sequence: Synthetic coding sequence
  source 1..1152: mol_type = other DNA
atgggcctgggccgggtgctgctcttcctggccgtggccttcccctttgcccccccagctgctgctgctgagccccacagcctgcgctacaacctgatggtgctgagccaggacggctctgtgcagagcggcttcctggccgagggccacctggatggccagcccttcctgcgctatgaccggcagaagaggcgggccaagccccagggccagtgggccgaggatgtgctgggcgctgagacctgggacacagaaacagaggacctgacagaaaatggccaggacctgcggaggaccctgacccacatcaaggaccagaagggcggcctgcacagcctgcaggagatccgggtgtgtgagatgcatgaggacagcagcacccggggcagccgccacttctactacaacggggagctgttcctgagccagaacctggagacccaggagagcacagtgccccagagcagccgggcccagaccctggccatgaatgtgaccaacttctggaaggaggatgccatgaagaccaagacccactaccgggccatgcaggccgactgcctgcagaagctgcagcgctacctgaagtctggagtggccatccggaggacagtgccccccatggtgaatgtgacctgcagcgaggtgtctgagggcaacatcaccgtgacctgccgggccagcagcttctaccccaggaacatcaccctgacctggaggcaggatggagtgtccctgagccacaacacccagcagtggggagatgtgctgcctgatggaaatggcacctaccagacctgggtggccacccgcatccggcagggcgaggagcagcgcttcacctgctacatggagcacagcggcaaccacggcacccaccctgtgcccagcggcaaggccctggtgctgcagagccagaggacagacttcccctacgtgtctgctgccatgccctgcttcgtcatcatcatcatcctgtgtgtgccctgctgcaagaagaagaccagcgctgctgagggccctgagctggtgtccctgcaggtgctggaccagcaccctgtgggcaccggggaccacagagatgctgcccagctgggcttccagcccctgatgtctgccaccggcagcacaggcagcacagagggcgcctag

SEQ ID NO: 159664 - DNA, 1056 bp, synthetic construct
  misc_feature 1..1056: note = Description of Artificial Sequence: Synthetic coding sequence
  source 1..1056: mol_type = other DNA
atggtgctgagccaggacggctctgtgcagagcggcttcctggccgagggccacctggatggccagcccttcctgcgctatgaccggcagaagaggcgggccaagccccagggccagtgggccgagaatgtgctgggcgccaagacctgggacacagaaacagaggacctgacagaaaatggccaggacctgcggaggaccctgacccacatcaaggaccagaagggcggcctgcacagcctgcaggagatccgggtgtgtgagatccacgaggacagcagcacccggggcagccgccacttctactatgatggagagctgttcctgagccagaacctggagacccaggagagcacagtgccccagagcagccgggcccagaccctggccatgaatgtgaccaacttctggaaggaggatgccatgaagaccaagacccactaccgggccatgcaggccgactgcctgcagaagctgcagcgctacctgaagtctggagtggccatccggaggacagtgccccccatggtgaatgtgacctgcagcgaggtgtctgagggcaacatcaccgtgacctgccgggccagcagcttctaccccaggaacatcaccctgacctggaggcaggatggagtgtccctgagccacaacacccagcagtggggagatgtgctgcctgatggaaatggcacctaccagacctgggtggccacccgcatccggcagggcgaggagcagcgcttcacctgctacatggagcacagcggcaaccacggcacccaccctgtgcccagcggcaaggccctggtgctgcagagccagaggacagacttcccctacgtgtctgctgccatgccctgcttcgtcatcatcatcatcctgtgtgtgccctgctgcaagaagaagaccagcgctgctgagggccctgagctggtgtccctgcaggtgctggaccagcaccctgtgggcaccggggaccacagagatgctgcccagctgggcttccagcccctgatgtctgccaccggcagcacaggcagcacagagggcacctag

SEQ ID NO: 159665 - DNA, 126 bp, synthetic construct; identical to SEQ ID NO: 159651
  misc_feature 1..126: note = Description of Artificial Sequence: Synthetic coding sequence
  source 1..126: mol_type = other DNA

SEQ ID NO: 159666 - DNA, 126 bp, synthetic construct; identical to SEQ ID NO: 159651
  misc_feature 1..126: note = Description of Artificial Sequence: Synthetic coding sequence
  source 1..126: mol_type = other DNA

SEQ ID NO: 159667 - DNA, 1056 bp, synthetic construct
  misc_feature 1..1056: note = Description of Artificial Sequence: Synthetic coding sequence
  source 1..1056: mol_type = other DNA
atggtgctgagccaggacggctctgtgcagagcggcttcctggccgagggccacctggatggccagcccttcctgcgctatgaccggcagaagaggcgggccaagccccagggccagtgggccgaggatgtgctgggcgctgagacctgggacacagaaacagaggacctgacagaaaatggccaggacctgcggaggaccctgacccacatcaaggaccagaagggcggcctgcacagcctgcaggagatccgggtgtgtgagatgcatgaggacagcagcacccggggcagccgccacttctactacaacggggagctgttcctgagccagaacctggagacccaggagagcacagtgccccagagcagccgggcccagaccctggccatgaatgtgaccaacttctggaaggaggatgccatgaagaccaagacccactaccgggccatgcaggccgactgcctgcagaagctgcagcgctacctgaagtctggagtggccatccggaggacagtgccccccatggtgaatgtgacctgcagcgaggtgtctgagggcaacatcaccgtgacctgccgggccagcagcttctaccccaggaacatcaccctgacctggaggcaggatggagtgtccctgagccacaacacccagcagtggggagatgtgctgcctgatggaaatggcacctaccagacctgggtggccacccgcatccggcagggcgaggagcagcgcttcacctgctacatggagcacagcggcaaccacggcacccaccctgtgcccagcggcaaggccctggtgctgcagagccagaggacagacttcccctacgtgtctgctgccatgccctgcttcgtcatcatcatcatcctgtgtgtgccctgctgcaagaagaagaccagcgctgctgagggccctgagctggtgtccctgcaggtgctggaccagcaccctgtgggcaccggggaccacagagatgctgcccagctgggcttccagcccctgatgtctgccaccggcagcacaggcagcacagagggcgcctag

SEQ ID NO: 159668 - DNA, 1056 bp, synthetic construct
  misc_feature 1..1056: note = Description of Artificial Sequence: Synthetic coding sequence
  source 1..1056: mol_type = other DNA
atggtgctgagccaggacggctctgtgcagagcggcttcctggccgagggccacctggatggccagcccttcctgcgctatgaccggcagaagaggcgggccaagccccagggccagtgggccgaggatgtgctgggcgccaagacctgggacacagaaacagaggacctgacagaaaatggccaggacctgcggaggaccctgacccacatcaaggaccagaagggcggcctgcacagcctgcaggagatccgggtgtgtgagatccacgaggacagcagcacccggggcagccgccacttctactatgatggagagctgttcctgagccagaacctggagacccaggagagcacagtgccccagagcagccgggcccagaccctggccatgaatgtgaccaacttctggaaggaggatgccatgaagaccaagacccactaccgggccatgcaggccgactgcctgcagaagctgcagcgctacctgaagtctggagtggccatccggaggacagtgccccccatggtgaatgtcatctgcagcgaggtgtctgagggcaacatcaccgtgacctgccgggccagcagcttctaccccaggaacatcaccctgacctggaggcaggatggagtgtccctgagccacaacacccagcagtggggagatgtgctgcctgatggaaatggcacctaccagacctgggtggccacccgcatccggcagggcgaggagcagcgcttcacctgctacatggagcacagcggcaaccacggcacccaccctgtgcccagcggcaaggccctggtgctgcagagccagaggacagacttcccctacgtgtctgctgccatgccctgcttcgtcatcatcatcatcctgtgtgtgccctgctgcaagaagaagaccagcgctgctgagggccctgagctggtgtccctgcaggtgctggaccagcaccctgtgggcaccggggaccacagagatgctgcccagctgggcttccagcccctgatgtctgccaccggcagcacaggcagcacagagggcacctag

SEQ ID NO: 159669 - DNA, 126 bp, synthetic construct; identical to SEQ ID NO: 159651
  misc_feature 1..126: note = Description of Artificial Sequence: Synthetic coding sequence
  source 1..126: mol_type = other DNA

SEQ ID NO: 159670 - DNA, 126 bp, synthetic construct; identical to SEQ ID NO: 159651
  misc_feature 1..126: note = Description of Artificial Sequence: Synthetic coding sequence
  source 1..126: mol_type = other DNA

SEQ ID NO: 159671 - DNA, 1056 bp, synthetic construct; identical to SEQ ID NO: 159664
  misc_feature 1..1056: note = Description of Artificial Sequence: Synthetic coding sequence
  source 1..1056: mol_type = other DNA

SEQ ID NO: 159672 - DNA, 126 bp, synthetic construct; identical to SEQ ID NO: 159651
  misc_feature 1..126: note = Description of Artificial Sequence: Synthetic coding sequence
  source 1..126: mol_type = other DNA

SEQ ID NO: 159673 - DNA, 126 bp, synthetic construct; identical to SEQ ID NO: 159651
  misc_feature 1..126: note = Description of Artificial Sequence: Synthetic coding sequence
  source 1..126: mol_type = other DNA

SEQ ID NO: 159674 - DNA, 1056 bp, synthetic construct
  misc_feature 1..1056: note = Description of Artificial Sequence: Synthetic coding sequence
  source 1..1056: mol_type = other DNA
atggtgctgagccaggacggctctgtgcagagcggcttcctggccgagggccacctggatggccagcccttcctgcgctatgaccggcagaagaggcgggccaagccccagggccagtgggccgaggatgtgctgggcgctgagacctgggacacagaaacagaggacctgacagaaaatggccaggacctgcggaggaccctgacccacatcaaggaccagaagggcggcctgcacagcctgcaggagatccgggtgtgtgagatccacgaggacagcagcacccggggcagccgccacttctactacaacggggagctgttcctgagccagaacctggagacccaggagagcacagtgccccagagcagccgggcccagaccctggccatgaatgtgaccaacttctggaaggaggatgccatgaagaccaagacccactaccgggccatgcaggccgactgcctgcagaagctgcagcgctacctgaagtctggagtggccatccggaggacagtgccccccatggtgaatgtgacctgcagcgaggtgtctgagggcaacatcaccgtgacctgccgggccagcagcttctaccccaggaacatcaccctgacctggaggcaggatggagtgtccctgagccacaacacccagcagtggggagatgtgctgcctgatggaaatggcacctaccagacctgggtggccacccgcatccggcagggcgaggagcagcgcttcacctgctacatggagcacagcggcaaccacggcacccaccctgtgcccagcggcaaggccctggtgctgcagagccagaggacagacttcccctacgtgtctgctgccatgccctgcttcgtcatcatcatcatcctgtgtgtgccctgctgcaagaagaagaccagcgctgctgagggccctgagctggtgtccctgcaggtgctggaccagcaccctgtgggcaccggggaccacagagatgctgcccagctgggcttccagcccctgatgtctgccaccggcagcacaggcagcacagagggcgcctag

SEQ ID NO: 159675 - DNA, 2088 bp, synthetic construct
  misc_feature 1..2088: note = Description of Artificial Sequence: Synthetic coding sequence
  source 1..2088: mol_type = other DNA
atgagcccccccaaggaccccagccccagcctgcccctgcccagcagcagcagccacagcagcagcccccccagcagcagcagcacctctgtgtctggaaatgccccagatggcagcagccccccccagatgacagccagcgagcccctgagccaggtgtcccggggccaccccagcccccccacccccaacttcagaagaagagctgtggcccagggcgccccccgggagatccccctgtacctgccccaccaccccaagccagagtgggccgagtactgcctggtgtccccaggagaagatggcctgagtgaccctgctgagatgaccagtgatgagtgccagcctgctgaggcccccctgggggacatcggcagcaaccaccgggacccccaccccatctggggcaaggaccgctcctggacaggccaggagctgagccccctggccggggaggaccgggagaagggcagcactggagccaggaaggaggaggagggcggccctgtgctggtgaaggagaagctgggcctgaagaagctggtgctgacccaggagcagaagaccatgctgctggactggaatgacagcatccctgagagcgtgcacctgaaggccggggagcgcatcagccagaagtctgcagaaaatggccggggcggccgggtgctgaagcctgtgcggcccctgctgctgcccagggctgctggggagcccctgcccacccagagaggagcccaggagaagatgggcaccccagctgagcaggcccagggcgagagaaatgtgcccccacccaagagccccctgcggctgattgccaatgccatccgccgcagcctggagcccctgctgagcaacagcgagggcggcaagaaggcctgggccaagcaggagagcaagaccctgcctgcccaggcctgcaccaggagcttcagcctgaggaagaccaacagcaacaaggatggagaccagcacagccctggcaggaaccagagcagcgccttcagccccccagaccctgccctgcggacccacagcctgcccaaccggcccagcaaggtgtttcctgccctgcggagccccccctgcagcaagattgaagatgtgcccaccctgctggagaaggtgtccctgcaggagaacttcccagatgccagcaagccacccaagaagaggatcagcctcttcagcagcctgcggctgaaggacaagagctttgagagcttcctgcaggagagccggcagaggaaggacatccgggacctgtttggcagccccaagaggaaggtgctgcctgaggacagcgcccaggccctggagaagctgctgcagcccttcaagagcaccagcctgcggcaggccgcccctcctcctcctcctcctcctcctcctcctcctcctccacccacagctgggggcgctgacagcaagaacttccccctgcgggcccaggtgacagaggccagcagcagcgccagcagcaccagcagcagcagcgcagatgaggagtttgacccccagctgagcctgcagctgaaggagaagaagaccctgcggcggaggaagaagctggagaaggccatgaagcagctggtgaagcaggaggagctgaagaggctgtacaaggcccaggccatccagaggcagctggaggaggtggaggagcggcagagggccagcgagatccagggcgtgcggctggagaaggccctgcggggggaggccgacagcggcacccaggatgaggcccagctgctgcaggagtggttcaagctggtgctggagaagaacaagctgatgagatatgaaagtgagctgctgatcatggcccaggagctggagctggaggaccaccagagccggctggagcagaagctgcgggagaagatgctgaaggaggagagccagaaggatgagaaggacctgaatgaggagcaggaggtgttcacagagctgatgcaggtgattgagcagagggacaagctggtggacagcctggaggagcagaggatccgggagaaggccgaggaccagcactttgagagctttgtgttcagccggggctgccagctgagcaggacatag

SEQ ID NO: 159676 - DNA, 90 bp, synthetic construct; identical to SEQ ID NO: 88880
  misc_feature 1..90: note = Description of Artificial Sequence: Synthetic coding sequence
  source 1..90: mol_type = other DNA

SEQ ID NO: 159677 - DNA, 522 bp, synthetic construct
  misc_feature 1..522: note = Description of Artificial Sequence: Synthetic coding sequence
  source 1..522: mol_type = other DNA
atgagcctgctgggccccaaggtgctgctcttcctggccgccttcatcatcaccagtgactggatccccctgggcgtgaacagccagagaggagatgatgtgacccaggccaccccagagaccttcacagaggaccccaacctggtgaatgaccctgccacagatgaaacagtgctggccgtgctggccgacatcgcccccagcacagatgacctggccagcctgtctgagaagaacaccacagctgagtgctgggatgagaagttcacctgcacccggctgtacagcgtgcacaggcctgtgaagcagtgcatccaccagctgtgcttcaccagcctgcggaggatgtacatcgtgaacaaggagatctgcagccggctggtgtgcaaggagcacgaggccatgaaggatgagctgtgccggcagatggccggcctgcccccccggcggctgcggcgcagcaactacttccggctgcccccctgtgaaaatgtggacctgcagaggcccaacggcctgtag

SEQ ID NO: 159678 - DNA, 492 bp, synthetic construct
  misc_feature 1..492: note = Description of Artificial Sequence: Synthetic coding sequence
  source 1..492: mol_type = other DNA
atgagcctgctgggccccaaggtgctgctcttcctggccgccttcatcatcaccagtgactggatccccctgggcgtgaacagccagagaggagatgatgtgacccaggccaccccagagaccttcacagaggaccccaacctggtgaatgaccctgccacagatgaaacagtgctggccgtgctggccgacatcgcccccagcacagatgacctggagtgctgggatgagaagttcacctgcacccggctgtacagcgtgcacaggcctgtgaagcagtgcatccaccagctgtgcttcaccagcctgcggaggatgtacatcgtgaacaaggagatctgcagccggctggtgtgcaaggagcacgaggccatgaaggatgagctgtgccggcagatggccggcctgcccccccggcggctgcggcgcagcaactacttccggctgcccccctgtgaaaatgtggacctgcagaggcccaacggcctgtag

SEQ ID NO: 159679 - DNA, 447 bp, synthetic construct
  misc_feature 1..447: note = Description of Artificial Sequence: Synthetic coding sequence
  source 1..447: mol_type = other DNA
atgagcctgctgggccccaaggtgctgctcttcctggccgccttcatcatcaccagtgactggatccccctgggcgtgaacagccagagaggagatgatgtgacccaggccaccccagagaccttcacagaggaccccaacctggtgaatgaccctgccacagatgaaacagagtgctgggatgagaagttcacctgcacccggctgtacagcgtgcacaggcctgtgaagcagtgcatccaccagctgtgcttcaccagcctgcggaggatgtacatcgtgaacaaggagatctgcagccggctggtgtgcaaggagcacgaggccatgaaggatgagctgtgccggcagatggccggcctgcccccccggcggctgcggcgcagcaactacttccggctgcccccctgtgaaaatgtggacctgcagaggcccaacggcctgtag

SEQ ID NO: 159680 - DNA, 492 bp, synthetic construct; identical to SEQ ID NO: 159678
  misc_feature 1..492: note = Description of Artificial Sequence: Synthetic coding sequence
  source 1..492: mol_type = other DNA

SEQ ID NO: 159681 - DNA, 276 bp, synthetic construct
  misc_feature 1..276: note = Description of Artificial Sequence: Synthetic coding sequence
  source 1..276: mol_type = other DNA
atgagcctgctgggccccaaggtgctgctcttcctggccgccttcatcatcaccagtgactggatccccctgggcgtgaacagccagagaggagatgatgtgacccaggccaccccagagaccttcacagaggaccccaacctggtgaatgaccctgccacagatgaaacagtgctggccgtgctggccgacatcgcccccagcacagatgacctggccagcctgtctgagaagaacaccacagctgagtgctgggatgagaagttcacctgctag

SEQ ID NO: 159682 - DNA, 1320 bp, synthetic construct
  misc_feature 1..1320: note = Description of Artificial Sequence: Synthetic coding sequence
  source 1..1320: mol_type = other DNA
atgtctgtgcccagcgccctgatgaagcagccccccatccagagcacagctggagctgtgcctgtgagaaatgagaagggggagatctccatggagaaggtgaaggtgaagagatatgtgtctgggaagaggccagactatgcccccatggagagcagtgatgaggaggatgaggagttccagttcatcaagaaggccaaggagcaggaggccgagcctgaggagcaggaggaggacagcagcagtgacccccggctgcggcggctgcagaaccgcatcagtgaagatgtggaggagcggctggcccggcacaggaagatcgtggagcctgaggtggtgggggagagtgacagcgaggtggagggagatgcctggaggatggagcgggaggacagcagcgaggaggaggaggaggagattgatgatgaggagattgaaagaagaagaggcatgatgaggcagagggcccaggagaggaagaatgaggagatggaggtgatggaggtggaggatgagggccgctctggagaggagagcgagagcgagagtgaatatgaggagtacacagattctgaagatgagatggagccccggctgaagcctgtgttcatcaggaagaaggacagagtgacagtgcaggagcgggaggccgaggccctgaagcagaaggagctggagcaggaggccaagaggatggccgaggagaggaggaagtacaccctgaagatcgtggaggaggagaccaagaaggagctggaggagaacaagaggagcctggccgccctggatgccctgaacacagatgatgaaaatgatgaggaggagtatgaggcctggaaggtgcgggagctgaagaggatcaagagggaccgggaggaccgggaggccctggagaaggagaaggccgagattgaaagaatgaggaacctgacagaggaggagaggagagctgagctgcgggccaacgggaaggtgatcaccaacaaggctgtgaagggcaagtacaagttcctgcagaagtactaccacagaggagccttcttcatggatgaagatgaggaggtgtacaagagggacttcagcgcccccaccctggaggaccacttcaacaagaccatcctgcccaaggtgatgcaggtgaagaactttggccgcagcggccgcaccaagtacacccacctggtggaccaggacaccaccagctttgacagcgcctggggccaggagagcgcccagaacaccaagttcttcaagcagaaggccgccggcgtgagagatgtgtttgagcggcccagcgccaagaagaggaagaccacctag

SEQ ID NO: 159683 - DNA, 549 bp, synthetic construct
  misc_feature 1..549: note = Description of Artificial Sequence: Synthetic coding sequence
  source 1..549: mol_type = other DNA
atgagagctgcctacctgttcctgctcttcctgcccggcctgctggcccagggccagtatgacctggaccccctgccccccttcccagaccacgtgcagtacacccactacagcgaccagattgacaacccagactactatgactaccaggaggtgaccccccggcccagcgaggagcagttccagttccagagccagcagcaggtgcagcaggaggtgatcccagcccccaccccagagcctggaaatgctgagctggagcccacagagcccggccccctggactgccgggaggagcagtacccctgcacccggctgtacagcatccaccggccctgcaagcagtgcctgaatgaggtgtgcttctacagcctgcggcgggtgtatgtgatcaacaaggagatctgtgtgaggacagtgtgtgcccacgaggagctgctgcgggctgacctgtgccgggacaagttcagcaaatgtggggtgatggccagcagcggcctgtgccagagcgtggccgccagctgtgcccggagctgtggcagctgctag

SEQ ID NO: 159684 - DNA, 552 bp, synthetic construct
  misc_feature 1..552: note = Description of Artificial Sequence: Synthetic coding sequence
  source 1..552: mol_type = other DNA
atgagagctgcctacctgttcctgctcttcctgcctgctggcctgctggcccagggccagtatgacctggaccccctgccccccttcccagaccacgtgcagtacacccactacagcgaccagattgacaacccagactactatgactaccaggaggtgaccccccggcccagcgaggagcagttccagttccagagccagcagcaggtgcagcaggaggtgatcccagcccccaccccagagcctggaaatgctgagctggagcccacagagcccggccccctggactgccgggaggagcagtacccctgcacccggctgtacagcatccaccggccctgcaagcagtgcctgaatgaggtgtgcttctacagcctgcggcgggtgtatgtgatcaacaaggagatctgtgtgaggacagtgtgtgcccacgaggagctgctgcgggctgacctgtgccgggacaagttcagcaaatgtggggtgatggccagcagcggcctgtgccagagcgtggccgccagctgtgcccggagctgtggcagctgctag

SEQ ID NO: 159685 - DNA, 549 bp, synthetic construct; identical to SEQ ID NO: 159683
  misc_feature 1..549: note = Description of Artificial Sequence: Synthetic coding sequence
  source 1..549: mol_type = other DNA

SEQ ID NO: 159686 - DNA, 1089 bp, synthetic construct
  misc_feature 1..1089: note = Description of Artificial Sequence: Synthetic coding sequence
  source 1..1089: mol_type = other DNA
atgaagctgcactgctgcctcttcaccctggtggccagcatcatcgtgcctgctgcctttgtgctggaggatgtggactttgaccagatggtgtccctggaggccaacagaagcagctacaatgccagcttccccagcagctttgagctgagcgccagcagccacagtgatgatgatgtgatcatcgccaaggagggcacctctgtgtccattgagtgcctgctgacagccagccactatgaagatgtgcactggcacaacagcaagggccagcagctggatggccgcagcagaggaggcaagtggctggtgtctgacaacttcctgaacatcaccaacgtggcctttgatgaccggggcctgtacacctgctttgtgaccagccccatccgggccagctacagcgtgaccctgcgggtcatcttcaccagcggggacatgtctgtgtactacatgattgtgtgcctgattgccttcaccatcaccctcatcctgaatgtgacccggctgtgcatgatgagcagccacctgaggaagacagagaaggccatcaatgagttcttcagaacagagggcgctgagaagctgcagaaggcctttgagatcgccaagaggatccccatcatcaccagcgccaagaccctggagctggccaaggtgacccagttcaagaccatggagtttgcccgctacatcgaggagctggcccggtctgtgcccctgcccccactcatcctgaactgccgggcctttgtggaggagatgtttgaggccgtgcgggtggatgatcctgatgacctgggggagcgcatcaaggagaggcctgccctgaatgcccagggcggcatctacgtgatcaaccctgagatgggccgcagcaacagccctggaggagacagtgatgatggcagcctgaatgagcagggccaggagattgctgtgcaggtgtctgtgcacctgcagagcgagaccaagagcattgacacagagagccagggcagcagccacttcagccccccagatgacatcggcagcgctgagagcaactgcaactacaaggatggagcctatgagaactgccagctgtag

SEQ ID NO: 159687 - DNA, 1089 bp, synthetic construct; identical to SEQ ID NO: 159686
  misc_feature 1..1089: note = Description of Artificial Sequence: Synthetic coding sequence
  source 1..1089: mol_type = other DNA

SEQ ID NO: 159688 - DNA, 651 bp, synthetic construct
  misc_feature 1..651: note = Description of Artificial Sequence: Synthetic coding sequence
  source 1..651: mol_type = other DNA
atgtctgtgtactacatgattgtgtgcctgattgccttcaccatcaccctcatcctgaatgtgacccggctgtgcatgatgagcagccacctgaggaagacagagaaggccatcaatgagttcttcagaacagagggcgctgagaagctgcagaaggcctttgagatcgccaagaggatccccatcatcaccagcgccaagaccctggagctggccaaggtgacccagttcaagaccatggagtttgcccgctacatcgaggagctggcccggtctgtgcccctgcccccactcatcctgaactgccgggcctttgtggaggagatgtttgaggccgtgcgggtggatgatcctgatgacctgggggagcgcatcaaggagaggcctgccctgaatgcccagggcggcatctacgtgatcaaccctgagatgggccgcagcaacagccctggaggagacagtgatgatggcagcctgaatgagcagggccaggagattgctgtgcaggtgtctgtgcacctgcagagcgagaccaagagcattgacacagagagccagggcagcagccacttcagccccccagatgacatcggcagcgctgagagcaactgcaactacaaggatggagcctatgagaactgccagctgtag

SEQ ID NO: 159689 - DNA, 54 bp, synthetic construct
  misc_feature 1..54: note = Description of Artificial Sequence: Synthetic coding sequence
  source 1..54: mol_type = other DNA
atgaagctgcactgctgcctcttcaccctggtggccagcatcatcgtgccctag

SEQ ID NO: 159690 - DNA, 330 bp, synthetic construct
  misc_feature 1..330: note = Description of Artificial Sequence: Synthetic coding sequence
  source 1..330: mol_type = other DNA
atgaagctgcactgctgcctcttcaccctggtggccagcatcatcgtgcctgctgcctttgtgctggaggatgtggactttgaccagatggtgtccctggaggccaacagaagcagctacaatgccagcttccccagcagctttgagctgagcgccagcagccacagtgatgatgatgtgatcatcgccaaggagggcacctctgtgtccattgagtgcctgctgacagccagccactatgaagatgtgcactggcacaacagcaagggccagcagctggatggccgcagcagaggaggcaagtggctggtgtctgacaacttcctgtag

SEQ ID NO: 159691 - DNA, 372 bp, synthetic construct
  misc_feature 1..372: note = Description of Artificial Sequence: Synthetic coding sequence
  source 1..372: mol_type = other DNA
atgaagctgcactgctgcctcttcaccctggtggccagcatcatcgtgcctgctgcctttgtgctggaggatgtggactttgaccagatggtgtccctggaggccaacagaagcagctacaatgccagcttccccagcagctttgagctgagcgccagcagccacagtgatgatgatgtgatcatcgccaaggagggcacctctgtgtccattgagtgcctgctgacagccagccactatgaagatgtgcactggcacaacagcaagggccagcagctggatggccgcagcagaggaggcaagtggctggtgtctgacaacttcctgaacatcaccaacgtggcctttgatgaccggggcctgtacacctag

SEQ ID NO: 159692 - DNA, 768 bp, synthetic construct
  misc_feature 1..768: note = Description of Artificial Sequence: Synthetic coding sequence
  source 1..768: mol_type = other DNA
atgaaggccctgctggccctgcccctgctgctgctgctgagcaccccaccctgtgccccccaggtgtctggcatcagaggagatgccctggagcgcttctgcctgcagcagcccctggactgtgatgacatctatgcccagggctaccagagtgatggagtgtacctgatctaccccagcggccccagcgtgcctgtgcctgtgttctgtgacatgaccacagagggcggcaagtggacagtgttccagaagcgcttcaatggatctgtgtccttcttccggggctggaatgactacaagctgggcttcggccgggcagatggagagtactggctgggcctgcagaacatgcacctgctgaccctgaagcagaagtatgagctgcgggtggacctggaggactttgagaacaacacagcctatgccaagtatgctgacttcagcatcagccccaatgctgtgtctgctgaggaggatggctacaccctgtttgtggccggctttgaagatggaggagctggggacagcctgagctaccacagcggccagaagttcagcacctttgaccgggaccaggacctgtttgtgcagaactgtgccgccctgagcagcggggccttctggttccgcagctgccactttgccaacctgaatggcttctacctgggcggcagccacctgtcctatgccaacggcatcaactgggcccagtggaagggcttctactacagcctgaagaggacagagatgaagatcagaagagcctag

SEQ ID NO: 159693 - DNA, 840 bp, synthetic construct
  misc_feature 1..840: note = Description of Artificial Sequence: Synthetic coding sequence
  source 1..840: mol_type = other DNA
atgggagagctgagccccctgcagaggcccctggccacagagggcaccatgaaggcccagggcgtgctgctgaagctggccctgctggccctgcccctgctgctgctgctgagcaccccaccctgtgccccccaggtgtctggcatcagaggagatgccctggagcgcttctgcctgcagcagcccctggactgtgatgacatctatgcccagggctaccagagtgatggagtgtacctgatctaccccagcggccccagcgtgcctgtgcctgtgttctgtgacatgaccacagagggcggcaagtggacagtgttccagaagcgcttcaatggatctgtgtccttcttccggggctggaatgactacaagctgggcttcggccgggcagatggagagtactggctgggcctgcagaacatgcacctgctgaccctgaagcagaagtatgagctgcgggtggacctggaggactttgagaacaacacagcctatgccaagtatgctgacttcagcatcagccccaatgctgtgtctgctgaggaggatggctacaccctgtttgtggccggctttgaagatggaggagctggggacagcctgagctaccacagcggccagaagttcagcacctttgaccgggaccaggacctgtttgtgcagaactgtgccgccctgagcagcggggccttctggttccgcagctgccactttgccaacctgaatggcttctacctgggcggcagccacctgtcctatgccaacggcatcaactgggcccagtggaagggcttctactacagcctgaagaggacagagatgaagatcagaagagcctag

SEQ ID NO: 159694 - DNA, 468 bp, synthetic construct
  misc_feature 1..468: note = Description of Artificial Sequence: Synthetic coding sequence
  source 1..468: mol_type = other DNA
atggtggacctgacccaggtgatggatgatgaggtgttcatggcctttgccagctatgccaccatcatcctgagcaagatgatgctgatgagcacagccacagccttctaccgcctgaccaggaaggtgtttgccaaccctgaggactgtgtggcctttggaaaaggagaaaatgccaagaagtacctgaggacagatgacagagtggagcgggtgagaagagcccacctgaatgacctggagaacatcatccccttcctgggcatcggcctgctgtacagcctgagcggccctgaccccagcacagccatcctgcacttccggctgtttgtgggcgcccgcatctaccacaccatcgcctacctgacccccctgccccagcccaacagagccctgtccttctttgtgggctacggcgtgaccctgtccatggcctaccgcctgctgaagagcaagctgtacctgtag

SEQ ID NO: 159695 - DNA, 468 bp, synthetic construct; identical to SEQ ID NO: 159694
  misc_feature 1..468: note = Description of Artificial Sequence: Synthetic coding sequence
  source 1..468: mol_type = other DNA

SEQ ID NO: 159696 - DNA, 468 bp, synthetic construct; identical to SEQ ID NO: 159694
  misc_feature 1..468: note = Description of Artificial Sequence: Synthetic coding sequence
  source 1..468: mol_type = other DNA

SEQ ID NO: 159697 - DNA, 468 bp, synthetic construct; identical to SEQ ID NO: 159694
  misc_feature 1..468: note = Description of Artificial Sequence: Synthetic coding sequence
  source 1..468: mol_type = other DNA

SEQ ID NO: 159698 - DNA, 234 bp, synthetic construct
  misc_feature 1..234: note = Description of Artificial Sequence: Synthetic coding sequence
  source 1..234: mol_type = other DNA
atggtggacctgacccaggtgatggatgatgaggtgttcatggcctttgccagctatgccaccatcatcctgagcaagatgatgctgatgagcacagccacagccttctaccgcctgaccaggaaggtgtttgccaaccctgaggactgtgtggcctttggaaaaggagaaaatgccaagaagtacctgaggacagatgacagagtggagcgggtgagaagagcccacctgtag

SEQ ID NO: 159699 - DNA, 129 bp, synthetic construct
  misc_feature 1..129: note = Description of Artificial Sequence: Synthetic coding sequence
  source 1..129: mol_type = other DNA
atggtggacctgacccaggtgatggatgatgaggtgttcatggcctttgccagctatgccaccatcatcctgagcaagatgatgctgatgagcacagccacagccttctaccgcctgaccaggaagtag

SEQ ID NO: 159700 - DNA, 243 bp, synthetic construct
  misc_feature 1..243: note = Description of Artificial Sequence: Synthetic coding sequence
  source 1..243: mol_type = other DNA
atggtggacctgacccaggtgatggatgatgaggtgttcatggcctttgccagctatgccaccatcatcctgagcaagatgatgctgatgagcacagccacagccttctaccgcctgaccaggaaggtgtttgccaaccctgaggactgtgtggcctttggaaaaggagaaaatgccaagaagtacctgaggacagatgacagagtggagcgggtgagaagagcccacctgaatgacctgtag

SEQ ID NO: 159701 - DNA, 264 bp, synthetic construct
  misc_feature 1..264: note = Description of Artificial Sequence: Synthetic coding sequence
  source 1..264: mol_type = other DNA
atggtggacctgacccaggtgatggatgatgaggtgttcatggcctttgccagctatgccaccatcatcctgagcaagatgatgctgatgagcacagccacagccttctaccgcctgaccaggaaggtgtttgccaaccctgaggactgtgtggcctttggaaaaggagaaaatgccaagaagtacctgaggacagatgacagagtggagcgggtgcggcgcatcaagcagaccctgagcatctacctggccagcagcatctag

SEQ ID NO: 159702 - DNA, 444 bp, synthetic construct
  misc_feature 1..444: note = Description of Artificial Sequence: Synthetic coding sequence
  source 1..444: mol_type = other DNA
atggccggcaacagcatcctgctggccgctgtgtccatcctgagcgcctgccagcagagctactttgccctgcaggtgggcaaggcccggctgaagtacaaggtgaccccacctgctgtgacaggcagccctgagtttgagagggtcttccgggcccagcagaactgtgtggagttctaccccatcttcatcatcaccctgtggatggccggctggtacttcaaccaggtgtttgccacctgcctgggcctggtgtacatctacggccgccacctgtacttctggggctacagcgaggccgccaagaagaggatcaccggcttccggctgagcctgggcatcctggccctgctgaccctgctgggcgccctgggcatcgccaacagcttcctggatgagtacctggacctgaacatcgccaagaagctgcggcggcagttctag

SEQ ID NO: 159703 - DNA, 444 bp, synthetic construct; identical to SEQ ID NO: 159702
  misc_feature 1..444: note = Description of Artificial Sequence: Synthetic coding sequence
  source 1..444: mol_type = other DNA

SEQ ID NO: 159704 - DNA, 234 bp, synthetic construct
  misc_feature 1..234: note = Description of Artificial Sequence: Synthetic coding sequence
  source 1..234: mol_type = other DNA
atggccggcaacagcatcctgctggccgctgtgtccatcctgagcgcctgccagcagagctactttgccctgcaggtgggcaaggcccggctgaagtacaaggtgaccccacctgctgtgacaggcagccctgagtttgagagggtcttccgggcccacttctgctacctgagcggcagcggcgtgcacatctggcccagccccatcctgctgggcatcttccgcagctgctag

SEQ ID NO: 159705 - DNA, 501 bp, synthetic construct
  misc_feature 1..501: note = Description of Artificial Sequence: Synthetic coding sequence
  source 1..501: mol_type = other DNA
atgccctggaggggccgccgcttccggctgtgcaggaggaagatggctgtgctgagcaaggagtatggctttgtgctgctgaccggggccgccagcttcatcatggtggcccacctggccatcaacgtgtccaaggccaggaagaagtacaaggtggagtaccccatcatgtacagcacagatcctgaaaatggccacatcttcaactgcatccagagggcccaccagaacaccctggaggtgtacccacccttcctgttcttcctggccgtgggcggcgtgtaccaccccagaattgccagcggcctgggcctggcctggatcgtgggccgggtgctgtatgcctacggctactacaccggggagcccagcaagaggagcagaggagccctgggcagcatcgccctgctgggcctggtgggcaccaccgtgtgcagcgccttccagcacctgggctgggtgaagagcggcctgggcagcggccccaagtgctgccactag

SEQ ID NO: 159706 - DNA, 459 bp, synthetic construct
  misc_feature 1..459: note = Description of Artificial Sequence: Synthetic coding sequence
  source 1..459: mol_type = other DNA
atggctgtgctgagcaaggagtatggctttgtgctgctgaccggggccgccagcttcatcatggtggcccacctggccatcaacgtgtccaaggccaggaagaagtacaaggtggagtaccccatcatgtacagcacagatcctgaaaatggccacatcttcaactgcatccagagggcccaccagaacaccctggaggtgtacccacccttcctgttcttcctggccgtgggcggcgtgtaccaccccagaattgccagcggcctgggcctggcctggatcgtgggccgggtgctgtatgcctacggctactacaccggggagcccagcaagaggagcagaggagccctgggcagcatcgccctgctgggcctggtgggcaccaccgtgtgcagcgccttccagcacctgggctgggtgaagagcggcctgggcagcggccccaagtgctgccactag

SEQ ID NO: 159707 - DNA, 501 bp, synthetic construct; identical to SEQ ID NO: 159705
  misc_feature 1..501: note = Description of Artificial Sequence: Synthetic coding sequence
  source 1..501: mol_type = other DNA

SEQ ID NO: 159708 - DNA, 501 bp, synthetic construct; identical to SEQ ID NO: 159705
  misc_feature 1..501: note = Description of Artificial Sequence: Synthetic coding sequence
  source 1..501: mol_type = other DNA

SEQ ID NO: 159709 - DNA, 459 bp, synthetic construct; identical to SEQ ID NO: 159706
  misc_feature 1..459: note = Description of Artificial Sequence: Synthetic coding sequence
  source 1..459: mol_type = other DNA

SEQ ID NO: 159710 - DNA, 501 bp, synthetic construct; identical to SEQ ID NO: 159705
  misc_feature 1..501: note = Description of Artificial Sequence: Synthetic coding sequence
  source 1..501: mol_type = other DNA

SEQ ID NO: 159711 - DNA, 972 bp, synthetic construct
  misc_feature 1..972: note = Description of Artificial Sequence: Synthetic coding sequence
  source 1..972: mol_type = other DNA
atgccccggctgacctttgcccccaagggctggccccacccccccaccagcctgcactggtggctgttccaggagctgcccacccccagtgaaaattccatgcctcctggcctgagcacccccacagccagccaggagggcgccggccctgtgcctgaccccagccagcccacccggcggcagatccggctgagcagccctgagcggcagaggctgagcagcctgaacctgaccccagaccctgagatggagcccccacccaagcccccaagaagctgcagcgccctggcccggcatgccctggagagcagctttgtgggctggggcctgcctgtgcagagcccccaggccctggtggccatggagaaggaggagaaggagagccccttcagcagcgaggaggaggaggaggatgtgcccctggacagtgatgtggagcaggccctgcagacctttgccaagaccagcggcaccatgaacaactaccccacctggaggaggaccctgctgcggcgggccaaggaggaggagatgaagcgcttctgcaaggcccagaccatccagaggcggctgaatgaaattgaggccgccctgcgggagctggaggccgagggcgtgaagctggagctggccctgcggcggcagagcagcagccctgagcagcagaagaagctgtgggtgggccagctgctgcagctggtggacaagaagaacagcctggtggccgaggaggccgagctgatgatcaccgtgcaggagctgaacctggaggagaagcagtggcagctggaccaggagctgcggggctacatgaaccgggaggagaacctgaagacagctgctgaccggcaggccgaggaccaggtgctgaggaagctggtggacctggtgaaccagagagatgccctgatccgcttccaggaggagcggcggctgtctgagctggccctgggcactggagcccagggctag

SEQ ID NO: 159712 - DNA, 2946 bp, synthetic construct
  misc_feature 1..2946: note = Description of Artificial Sequence: Synthetic coding sequence
  source 1..2946: mol_type = other DNA
atggccagccccaccagcaccaacccagcccacgcccactttgagagcttcctgcaggcccagctgtgccaggatgtgctgagcagcttccaggagctgtgtggggccctgggcctggagcccggcggcggcctgccccagtaccacaagatcaaggaccagctgaactactggagcgccaagagcctgtggaccaagctggacaagagagctggccagcctgtgtaccagcagggccgggcctgcaccagcaccaagtgcctggtggtgggcgccggcccctgtggcctgcgggtggccgtggagctggccctgctgggcgcccgggtggtgctggtggagaagaggaccaagttcagccgccacaacgtgctgcacctgtggcccttcaccatccatgacctgcgggccctgggcgccaagaagttctacggccgcttctgcaccggcaccctggaccacatcagcatccggcagctgcagctgctgctgctgaaggtggccctgctgctgggcgtggagatccactggggcgtgaccttcaccggcctgcagcccccacccaggaagggcagcggctggagggcccagctgcagcccaaccccccagcccagctggccaactatgaatttgatgtgctgatctctgctgctgggggcaagtttgtgcctgagggcttcaaggtgcgggagatgaggggcaagctggccatcggcatcacagccaactttgtgaatggccgcacagtggaggagacccaggtgcctgagatctctggagtggcccgcatctacaaccagagcttcttccagagcctgctgaaggccactggaattgacctggagaacatcgtgtactacaaggatgacacccactactttgtgatgacagccaagaagcagtgcctgctgcggctgggcgtgctgcggcagcccttctggcccctgggcaccggggtggcccggggcttcctggccgcctttgatgctgcctggatggtgaagcgctgggccgagggcgctgagagcctggaggtgctggccgagcgggagagcctgtaccagctgctgagccagaccagccctgagaacatgcacagaaatgtggcccagtatggcctggaccctgccacccgctaccccaacctgaacctgcgggctgtgacccccaaccaggtgcgggacctgtatgatgtgctggccaaggagcctgtgcagagaaataatgacaagacagacaccggcatgcctgccactggatctgctggcacccaggaggagctgctgcgctggtgccaggagcagacagctggctacccaggagtgcacgtgtctgacctgagcagctcctgggcagatggcctggccctgtgtgccctggtgtaccgcctgcagcccggcctgctggagcccagcgagctgcagggcctgggcgccctggaggccacagcctgggccctgaaggtggctgaaaatgagctgggcatcacccctgtggtgtctgcccaggccgtggtggccggcagtgaccccctgggcctgattgcctacctgagccacttccacagcgccttcaagtccatggcccacagccctggccctgtgtcccaggccagccctggcaccagcagcgctgtgctcttcctgagcaagctgcagaggaccctgcagaggagccgggccaaggaaaatgcagaagatgctgggggcaagaagctgcggctggagatggaggccgagacccccagcacagaggtgcccccagaccctgagcccggggtgcccctgaccccacccagccagcaccaggaggccggggccggggacctgtgtgccctgtgtggggagcacctgtatgtgctggagcggctgtgtgtgaatggccacttcttccacaggagctgcttccgctgccacacctgtgaggccaccctgtggccaggcggctatgagcagcaccctggagatggccacttctactgcctgcagcacctgccccagacagaccacaaggccgagggcagtgaccggggccctgagagccctgagctgcccacccccagtgaaaattccatgcctcctggcctgagcacccccacagccagccaggagggcgccggccctgtgcctgaccccagccagcccacccggcggcagatccggctgagcagccctgagcggcagaggctgagcagcctgaacctgaccccagaccctgagatggagcccccacccaagcccccaagaagctgcagcgccctggcccggcatgccctggagagcagctttgtgggctggggcctgcctgtgcagagcccccaggccctggtggccatggagaaggaggagaaggagagccccttcagcagcgaggaggaggaggaggatgtgcccctggacagtgatgtggagcaggccctgcagacctttgccaagaccagcggcaccatgaacaactaccccacctggaggaggaccctgctgcggcgggccaaggaggaggagatgaagcgcttctgcaaggcccagaccatccagaggcggctgaatgaaattgaggccgccctgcgggagctggaggccgagggcgtgaagctggagctggccctgcggcggcagagcagcagccctgagcagcagaagaagctgtgggtgggccagctgctgcagctggtggacaagaagaacagcctggtggccgaggaggccgagctgatgatcaccgtgcaggagctgaacctggaggagaagcagtggcagctggaccaggagctgcggggctacatgaaccgggaggagaacctgaagacagctgctgaccggcaggccgaggaccaggtgctgaggaagctggtggacctggtgaaccagagagatgccctgatccgcttccaggaggagcggcggctgtctgagctggccctgggcactggagcccagggctag

SEQ ID NO: 159713 - DNA, 3204 bp, synthetic construct
  misc_feature 1..3204: note = Description of Artificial Sequence: Synthetic coding sequence
  source 1..3204: mol_type = other DNA
atggccagccccaccagcaccaacccagcccacgcccactttgagagcttcctgcaggcccagctgtgccaggatgtgctgagcagcttccaggagctgtgtggggccctgggcctggagcccggcggcggcctgccccagtaccacaagatcaaggaccagctgaactactggagcgccaagagcctgtggaccaagctggacaagagagctggccagcctgtgtaccagcagggccgggcctgcaccagcaccaagtgcctggtggtgggcgccggcccctgtggcctgcgggtggccgtggagctggccctgctgggcgcccgggtggtgctggtggagaagaggaccaagttcagccgccacaacgtgctgcacctgtggcccttcaccatccatgacctgcgggccctgggcgccaagaagttctacggccgcttctgcaccggcaccctggaccacatcagcatccggcagctgcagctgctgctgctgaaggtggccctgctgctgggcgtggagatccactggggcgtgaccttcaccggcctgcagcccccacccaggaagggcagcggctggagggcccagctgcagcccaaccccccagcccagctggccaactatgaatttgatgtgctgatctctgctgctgggggcaagtttgtgcctgagggcttcaaggtgcgggagatgaggggcaagctggccatcggcatcacagccaactttgtgaatggccgcacagtggaggagacccaggtgcctgagatctctggagtggcccgcatctacaaccagagcttcttccagagcctgctgaaggccactggaattgacctggagaacatcgtgtactacaaggatgacacccactactttgtgatgacagccaagaagcagtgcctgctgcggctgggcgtgctgcggcaggactggccagacaccaaccggctgctgggcagcgccaacgtggtgcctgaggccctgcagcgcttcaccagggctgctgctgactttgccacccacggcaagctgggcaagctggagtttgcccaggatgcccacggccagccagatgtgtctgcctttgacttcacctccatgatgagagctgagagcagcgcccgggtgcaggagaagcacggggcccggctgctgctgggcctggtgggggactgcctggtggagcccttctggcccctgggcaccggggtggcccggggcttcctggccgcctttgatgctgcctggatggtgaagcgctgggccgagggcgctgagagcctggaggtgctggccgagcgggagagcctgtaccagctgctgagccagaccagccctgagaacatgcacagaaatgtggcccagtatggcctggaccctgccacccgctaccccaacctgaacctgcgggctgtgacccccaaccaggtgcgggacctgtatgatgtgctggccaaggagcctgtgcagagaaataatgacaagacagacaccggcatgcctgccactggatctgctggcacccaggaggagctgctgcgctggtgccaggagcagacagctggctacccaggagtgcacgtgtctgacctgagcagctcctgggcagatggcctggccctgtgtgccctggtgtaccgcctgcagcccggcctgctggagcccagcgagctgcagggcctgggcgccctggaggccacagcctgggccctgaaggtggctgaaaatgagctgggcatcacccctgtggtgtctgcccaggccgtggtggccggcagtgaccccctgggcctgattgcctacctgagccacttccacagcgccttcaagtccatggcccacagccctggccctgtgtcccaggccagccctggcaccagcagcgctgtgctcttcctgagcaagctgcagaggaccctgcagaggagccgggccaaggaaaatgcagaagatgctgggggcaagaagctgcggctggagatggaggccgagacccccagcacagaggtgcccccagaccctgagcccggggtgcccctgaccccacccagccagcaccaggaggccggggccggggacctgtgtgccctgtgtggggagcacctgtatgtgctggagcggctgtgtgtgaatggccacttcttccacaggagctgcttccgctgccacacctgtgaggccaccctgtggccaggcggctatgagcagcaccctggagatggccacttctactgcctgcagcacctgccccagacagaccacaaggccgagggcagtgaccggggccctgagagccctgagctgcccacccccagtgaaaattccatgcctcctggcctgagcacccccacagccagccaggagggcgccggccctgtgcctgaccccagccagcccacccggcggcagatccggctgagcagccctgagcggcagaggctgagcagcctgaacctgaccccagaccctgagatggagcccccacccaagcccccaagaagctgcagcgccctggcccggcatgccctggagagcagctttgtgggctggggcctgcctgtgcagagcccccaggccctggtggccatggagaaggaggagaaggagagccccttcagcagcgaggaggaggaggaggatgtgcccctggacagtgatgtggagcaggccctgcagacctttgccaagaccagcggcaccatgaacaactaccccacctggaggaggaccctgctgcggcgggccaaggaggaggagatgaagcgcttctgcaaggcccagaccatccagaggcggctgaatgaaattgaggccgccctgcgggagctggaggccgagggcgtgaagctggagctggccctgcggcggcagagcagcagccctgagcagcagaagaagctgtgggtgggccagctgctgcagctggtggacaagaagaacagcctggtggccgaggaggccgagctgatgatcaccgtgcaggagctgaacctggaggagaagcagtggcagctggaccaggagctgcggggctacatgaaccgggaggagaacctgaagacagctgctgaccggcaggccgaggaccaggtgctgaggaagctggtggacctggtgaaccagagagatgccctgatccgcttccaggaggagcggcggctgtctgagctggccctgggcactggagcccagggctag

SEQ ID NO: 159714 - DNA, 3261 bp, synthetic construct
  misc_feature 1..3261: note = Description of Artificial Sequence: Synthetic coding sequence
  source 1..3261: mol_type = other DNA
atgagctgcctgagccacagcagcctgcccagctgctgccccccccaggaggcctccatggccagccccaccagcaccaacccagcccacgcccactttgagagcttcctgcaggcccagctgtgccaggatgtgctgagcagcttccaggagctgtgtggggccctgggcctggagcccggcggcggcctgccccagtaccacaagatcaaggaccagctgaactactggagcgccaagagcctgtggaccaagctggacaagagagctggccagcctgtgtaccagcagggccgggcctgcaccagcaccaagtgcctggtggtgggcgccggcccctgtggcctgcgggtggccgtggagctggccctgctgggcgcccgggtggtgctggtggagaagaggaccaagttcagccgccacaacgtgctgcacctgtggcccttcaccatccatgacctgcgggccctgggcgccaagaagttctacggccgcttctgcaccggcaccctggaccacatcagcatccggcagctgcagctgctgctgctgaaggtggccctgctgctgggcgtggagatccactggggcgtgaccttcaccggcctgcagcccccacccaggaaaggaagtggctggagggcccagctgcagcccaaccccccagcccagctggccaactatgaatttgatgtgctgatctctgctgctgggggcaagtttgtgcctgagggcttcaaggtgcgggagatgaggggcaagctggccatcggcatcacagccaactttgtgaatggaagaacagtggaggagacccaggtgcctgagatcagcggcgtggcccgcatctacaaccagagcttcttccagagcctgctgaaggccaccggcatcgacctggagaacatcgtgtactacaaggatgacacccactactttgtgatgacagccaagaagcagtgcctgctgcggctgggcgtgctgcggcaggactggccagacaccaaccggctgctgggcagcgccaacgtggtgcctgaggccctgcagcgcttcaccagggctgctgctgactttgccacccacggcaagctgggcaagctggagtttgcccaggatgcccacggccagccagatgtgtctgcctttgacttcacctccatgatgagagctgagagcagcgcccgggtgcaggagaagcatggagcccggctgctgctgggcctggtgggggactgcctggtggagcccttctggcccctgggcactggagtggcccggggcttcctggccgcctttgatgctgcctggatggtgaagcgctgggccgagggcgctgagagcctggaggtgctggccgagcgggagagcctgtaccagctgctgagccagaccagccctgagaacatgcacagaaatgtggcccagtatggcctggaccctgccacccgctaccccaacctgaacctgcgggctgtgacccccaaccaggtgcgggacctgtatgatgtgctggccaaggagcctgtgcagaggaacaatgacaagacagacaccggcatgcctgccaccggcagcgctggcacccaggaggagctgctgcgctggtgccaggagcagacagctggctacccaggagtgcacgtgtctgacctgagcagctcctgggcagatggcctggccctgtgtgccctggtgtaccgcctgcagcccggcctgctggagcccagcgagctgcagggcctgggcgccctggaggccacagcctgggccctgaaggtggccgagaatgagctgggcatcacccctgtggtgtctgcccaggccgtggtggccggcagtgaccccctgggcctcatcgcctacctgagccacttccacagcgccttcaagtccatggcccacagccctggccctgtgtcccaggccagccctggcaccagcagcgctgtgctcttcctgagcaagctgcagaggaccctgcagaggagccgggccaaggaaaatgcagaagatgctgggggcaagaagctgcggctggagatggaggccgagacccccagcacagaggtgcccccagaccctgagcccggggtgcccctgaccccacccagccagcaccaggaggccggggccggggacctgtgtgccctgtgtggggagcacctgtatgtgctggagcggctgtgtgtgaatggccacttcttccacaggagctgcttccgctgccacacctgtgaggccaccctgtggccaggcggctatgagcagcaccctggagatggccacttctactgcctgcagcacctgccccagacagaccacaaggccgagggcagtgaccggggccctgagagccctgagctgcccaccccatctgagaacagcatgcctcctggcctgagcacccccacagccagccaggagggcgccggccctgtgcctgaccccagccagcccacccggcggcagatccggctgagcagccctgagcggcagaggctgagcagcctgaacctgaccccagaccctgagatggagcccccacccaagccacccaggagctgcagcgccctggcccggcatgccctggagagcagctttgtgggctggggcctgcctgtgcagagcccccaggccctggtggccatggagaaggaggagaaggagagccccttcagcagcgaggaggaggaggaggatgtgcccctggacagtgatgtggagcaggccctgcagacctttgccaagaccagcggcaccatgaacaactaccccacctggaggaggaccctgctgcggcgggccaaggaggaggagatgaagcgcttctgcaaggcccagaccatccagaggcggctgaatgaaattgaagctgccctgcgggagctggaggccgagggcgtgaagctggagctggccctgcggcggcagagcagcagccctgagcagcagaagaagctgtgggtgggccagctgctgcagctggtggacaagaagaacagcctggtggccgaggaggccgagctgatgatcaccgtgcaggagctgaacctggaggagaagcagtggcagctggaccaggagctgcggggctacatgaaccgggaggagaacctgaagacagctgctgaccggcaggccgaggaccaggtgctgaggaagctggtggacctggtgaaccagagagatgccctgatccgcttccaggaggagcggcggctgtctgagctggccctgggcaccggggcccagggctag

SEQ ID NO: 159715 - DNA, 1776 bp, synthetic construct
  misc_feature 1..1776: note = Description of Artificial Sequence: Synthetic coding sequence
  source 1..1776: mol_type = other DNA
cccaagtatgtgctgcccagcgaggcccaggtggtgcctgccaagcagctgcagccccaggacaggagctctgtgcctgagcacagcctgctggccggcacccaggaggagctgctgcgctggtgccaggagcagacagctggctacccaggagtgcacgtgtctgacctgagcagctcctgggcagatggcctggccctgtgtgccctggtgtaccgcctgcagcccggcctgctggagcccagcgagctgcagggcctgggcgccctggaggccacagcctgggccctgaaggtggctgaaaatgagctgggcatcacccctgtggtgtctgcccaggccgtggtggccggcagtgaccccctgggcctgattgcctacctgagccacttccacagcgccttcaagtccatggcccacagccctggccctgtgtcccaggccagccctggcaccagcagcgctgtgctcttcctgagcaagctgcagaggaccctgcagaggagccgggccaaggaaaatgcagaagatgctgggggcaagaagctgcggctggagatggaggccgagacccccagcacagaggtgcccccagaccctgagcccggggtgcccctgaccccacccagccagcaccaggaggccggggccggggacctgtgtgccctgtgtggggagcacctgtatgtgctggagcggctgtgtgtgaatggccacttcttccacaggagctgcttccgctgccacacctgtgaggccaccctgtggccaggcggctatgagcagcaccctggagatggccacttctactgcctgcagcacctgccccagacagaccacaaggccgagggcagtgaccggggccctgagagccctgagctgcccacccccagtgaaaattccatgcctcctggcctgagcacccccacagccagccaggagggcgccggccctgtgcctgaccccagccagcccacccggcggcagatccggctgagcagccctgagcggcagaggctgagcagcctgaacctgaccccagaccctgagatggagcccccacccaagcccccaagaagctgcagcgccctggcccggcatgccctggagagcagctttgtgggctggggcctgcctgtgcagagcccccaggccctggtggccatggagaaggaggagaaggagagccccttcagcagcgaggaggaggaggaggatgtgcccctggacagtgatgtggagcaggccctgcagacctttgccaagaccagcggcaccatgaacaactaccccacctggaggaggaccctgctgcggcgggccaaggaggaggagatgaagcgcttctgcaaggcccagaccatccagaggcggctgaatgaaattgaggccgccctgcgggagctggaggccgagggcgtgaagctggagctggccctgcggcggcagagcagcagccctgagcagcagaagaagctgtgggtgggccagctgctgcagctggtggacaagaagaacagcctggtggccgaggaggccgagctgatgatcaccgtgcaggagctgaacctggaggagaagcagtggcagctggaccaggagctgcggggctacatgaaccgggaggagaacctgaagacagctgctgaccggcaggccgaggaccaggtgctgaggaagctggtggacctggtgaaccagagagatgccctgatccgcttccaggaggagcggcggctgtctgagctggccctgggcactggagcccagggctag

SEQ ID NO: 159716 - DNA, 735 bp, synthetic construct
  misc_feature 1..735: note = Description of Artificial Sequence: Synthetic coding sequence
  source 1..735: mol_type = other DNA
atggccagccccaccagcaccaacccagcccacgcccactttgagagcttcctgcaggcccagctgtgccaggatgtgctgagcagcttccaggagctgtgtggggccctgggcctggagcccggcggcggcctgccccagtaccacaagatcaaggaccagctgaactactggagcgccaagagcctgtggaccaagctggacaagagagctggccagcctgtgtaccagcagggccgggcctgcaccagcaccaagtgcctggtggtgggcgccggcccctgtggcctgcgggtggccgtggagctggccctgctgggcgcccgggtggtgctggtggagaagaggaccaagttcagccgccacaacgtgctgcacctgtggcccttcaccatccatgacctgcgggccctgggcgccaagaagttctacggccgcttctgcaccggcaccctggaccacatcagcatccggcagctgcagctgctgctgctgaaggtggccctgctgctgggcgtggagatccactggggcgtgaccttcaccggcctgcagcccccacccaggaagggcagcggctggagggcccagctgcagcccaaccccccagcccagctggccaactatgaatttgatgtgctgatctctgctgctgggggcaagtttgtgcctgagggcttcaaggtgcgggagatgaggggcaagctggccatcggcatcacagccaacttctag

SEQ ID NO: 159717 - DNA, 3375 bp, synthetic construct
  misc_feature 1..3375: note = Description of Artificial Sequence: Synthetic coding sequence
  source 1..3375: mol_type = other DNA
atgggagaaaatgaagatgagaagcaggcccaggccggccaggtgtttgaaaattttgtgcaggccagcacctgcaagggcaccctgcaggccttcaacatcctgaccaggcacctggacctggaccccctggaccacaggaacttctacagcaagctgaagagcaaggtgaccacctggaaggccaaggccctgtggtacaagctggacaagaggggcagccacaaggagtacaagaggggcaagagctgcaccaacaccaagtgcctgattgtgggcggcggcccctgtggcctgaggacagccatcgagctggcctacctgggcgccaaggtggtggtggtggagaagagggacagcttcagcagaaataatgtgctgcacctgtggcccttcaccatccatgacctgcggggcctgggcgccaagaagttctacggcaagttctgtgccggcagcattgaccacatcagcatccggcagctgcagctgatcctcttcaaggtggccctgatgctgggcgtggagatccacgtgaatgtggagtttgtgaaggtgctggagcccccagaggaccaggagaaccagaagattggctggagggctgagttcctgcccacagaccacagcctgtctgaatttgaatttgatgtgatcatcggggctgatggaagaagaaacaccctggagggcttccggaggaaggagttccggggcaagctggccatcgccatcacagccaacttcatcaacagaaacagcacagctgaggccaaggtggaggagatcagcggcgtggccttcatcttcaaccagaagttcttccaggacctgaaggaggagaccggcatcgacctggagaacatcgtgtactacaaggactgcacccactactttgtgatgacagccaagaagcagagcctgctggacaagggcgtcatcatcaatgactacatcgacacagagatgctgctgtgtgccgagaatgtgaaccaggacaacctgctgtcctatgcccgggaggccgctgactttgccaccaactaccagctgcccagcctggactttgccatgaaccactacggccagccagatgtggccatgtttgacttcacctgcatgtatgcctctgaaaatgctgccctggtgcgggagcggcaggcccaccagctgctggtggccctggtgggggacagcctgctggagcccttctggcccatgggcaccggctgtgcccggggcttcctggccgcctttgacacagcctggatggtgaagtcctggaaccagggcaccccacccctggagctgctggccgagcgggagagcctgtaccgcctgctgccccagaccaccccagagaacatcaacaagaactttgagcagtacaccctggaccccggcacccgctaccccaacctgaacagccactgtgtgcggccccaccaggtgaagcacctgtacatcaccaaggagctggagcactaccccctggagcggctgggctctgtgagaagatctgtgaacctgagcaggaaggagagtgacatccggcccagcaagctgctgacctggtgccagcagcagacagagggctaccagcacgtgaatgtgacagacctgaccacctcctggaggagcggcctggccctgtgtgccatcatccaccgcttccggcctgagctgatcaactttgacagcctgaatgaagatgatgctgtggagaacaaccagctggcctttgatgtggccgagcgggagtttggcatcccccctgtgaccaccgggaaggagatggccagcgcccaggagccagacaagctgtccatggtgatgtacctgagcaagttctatgagctgttccggggcacccccctgcggcctgtggacagctggaggaagaactacggggagaatgctgacctgagcctggccaagagcagcatcagcaacaactacctgaacctgaccttccccaggaagaggaccccccgggtggatggccagacaggagaaaatgacatgaacaagagaagaaggaagggcttcaccaacctggatgagcccagcaacttcagcagccgcagcctgggcagcaaccaggagtgtggcagcagcaaggagggcggcaaccagaacaaggtgaagtccatggccaaccagctgctggccaagtttgaggagagcaccaggaaccccagcctgatgaagcaggagcggcgggtgtctggaattggcaagcctgtgctgtgcagcagcagcggcccccctgtgcacagctgctgccccaagccagaggaggccacccccagccccagcccccccctgaagaggcagttccccagcgtggtggtgacaggccacgtgctgcgggagctgaagcaggtgtctgctggctctgaatgtctgagccggccctggagggcccgggccaagagtgacctgcagctgggcggcacagaaaattttgccaccctgcccagcacccggccccgggcccaggccctgtctggagtgctgtggaggctgcagcaggtggaggagaagatcctgcagaagagggcccagaacctggccaaccgggagttccacaccaagaacatcaaggagaaggccgcccacctggcctccatgtttggacatggagacttcccccagaacaagctgctgagcaagggcctgagccacacccacccccccagcccccccagccggctgcccagcccagaccctgctgccagcagcagccccagcacagtggacagcgccagccctgccaggaaggagaagaagagccccagcggcttccacttccaccccagccacctgaggacagtgcacccccagctgactgtgggcaaggtgtcctctggaattggagctgctgctgaggtgctggtgaacctgtacatgaatgaccaccggcccaaggcccaggccaccagcccagacctggagagcatgaggaagagcttccccctgaacctgggcggcagtgacacctgctacttctgcaagaagagggtgtatgtgatggagcggctgtctgctgagggccacttcttccaccgggagtgcttccgctgcagcatctgtgccaccaccctgcggctggccgcctacacctttgactgtgatgagggcaagttctactgcaagccccacttcatccactgcaagaccaacagcaagcagaggaagagaagagctgagctgaagcagcagcgggaggaggaggccacctggcaggagcaggaggccccccggcgggacacccccacagagagcagctgtgctgtggccgccatcggcaccctggagggcagcccccctgtgcacttcagcctgcctgtgctgcaccccctgctgggctag

SEQ ID NO: 159718 - DNA, 3312 bp, synthetic construct
  misc_feature 1..3312: note = Description of Artificial Sequence: Synthetic coding sequence
  source 1..3312: mol_type = other DNA
atgggagaaaatgaagatgagaagcaggcccaggccggccaggtgtttgaaaattttgtgcaggccagcacctgcaagggcaccctgcaggccttcaacatcctgaccaggcacctggacctggaccccctggaccacaggaacttctacagcaagctgaagagcaaggtgaccacctggaaggccaaggccctgtggtacaagctggacaagaggggcagccacaaggagtacaagaggggcaagagctgcaccaacaccaagtgcctgattgtgggcggcggcccctgtggcctgaggacagccatcgagctggcctacctgggcgccaaggtggtggtggtggagaagagggacagcttcagcagaaataatgtgctgcacctgtggcccttcaccatccatgacctgcggggcctgggcgccaagaagttctacggcaagttctgtgccggcagcattgaccacatcagcatccggcagctgcagctgatcctcttcaaggtggccctgatgctgggcgtggagatccacgtgaatgtggagtttgtgaaggtgctggagcccccagaggaccaggagaaccagaagattggctggagggctgagttcctgcccacagaccacagcctgtctgaatttgaatttgatgtgatcatcggggctgatggaagaagaaacaccctggagggcttccggaggaaggagttccggggcaagctggccatcgccatcacagccaacttcatcaacagaaacagcacagctgaggccaaggtggaggagatcagcggcgtggccttcatcttcaaccagaagttcttccaggacctgaaggaggagaccggcatcgacctggagaacatcgtgtactacaaggactgcacccactactttgtgatgacagccaagaagcagagcctgctggacaagggcgtcatcatcaatgactacatcgacacagagatgctgctgtgtgccgagaatgtgaaccaggacaacctgctgtcctatgcccgggaggccgctgactttgccaccaactaccagctgcccagcctggactttgccatgaaccactacggccagccagatgtggccatgtttgacttcacctgcatgtatgcctctgaaaatgctgccctggtgcgggagcggcaggcccaccagctgctggtggccctggtgggggacagcctgctggagcccttctggcccatgggcaccggctgtgcccggggcttcctggccgcctttgacacagcctggatggtgaagtcctggaaccagggcaccccacccctggagctgctggccgagcgggagagcctgtaccgcctgctgccccagaccaccccagagaacatcaacaagaactttgagcagtacaccctggaccccggcacccgctaccccaacctgaacagccactgtgtgcggccccaccaggtgaagcacctgtacatcaccaaggagctggagcactaccccctggagcggctgggctctgtgagaagatctgtgaacctgagcaggaaggagagtgacatccggcccagcaagctgctgacctggtgccagcagcagacagagggctaccagcacgtgaatgtgacagacctgaccacctcctggaggagcggcctggccctgtgtgccatcatccaccgcttccggcctgagctgatcaactttgacagcctgaatgaagatgatgctgtggagaacaaccagctggcctttgatgtggccgagcgggagtttggcatcccccctgtgaccaccgggaaggagatggccagcgcccaggagccagacaagctgtccatggtgatgtacctgagcaagttctatgagctgttccggggcacccccctgcggcctgtggacagctggaggaagaactacggggagaatgctgacctgagcctggccaagagcagcatcagcaacaactacctgaacctgaccttccccaggaagaggaccccccgggtggatggccagacaggagaaaatgacatgaacaagagaagaaggaagggcttcaccaacctggatgagcccagcaacttcagcagccgcagcctgggcagcaaccaggagtgtggcagcagcaaggagggcggcaaccagaacaaggtgaagtccatggccaaccagctgctggccaagtttgaggagagcaccaggaaccccagcctgatgaagcaggagcggcgggtgtctggaattggcaagcctgtgctgtgcagcagcagcggcccccctgtgcacagctgctgccccaagccagaggaggccacccccagccccagcccccccctgaagaggcagttccccagcgtggtggtgacaggccacgtgctgcgggagctgaagcaggtgtctgctggctctgaatgtctgagccggccctggagggcccgggccaagagtgacctgcagctgggcggcacagaaaattttgccaccctgcccagcacccggccccgggcccaggccctgtctggagtgctgtggaggctgcagcaggtggaggagaagatcctgcagaagagggcccagaacctggccaaccgggagttccacaccaagaacatcaaggagaaggccgcccacctggcctccatgtttggacatggagacttcccccagaacaagctgctgagcaagggcctgagccacacccacccccccagcccccccagccggctgcccagcccagaccctgctgccagcagcagccccagcacagtggacagcgccagccctgccaggaagctgactgtgggcaaggtgagcagcggcatcggggctgctgctgaggtgctggtgaacctgtacatgaatgaccaccggcccaaggcccaggccaccagcccagacctggagagcatgaggaagagcttccccctgaacctgggcggcagtgacacctgctacttctgcaagaagagggtgtatgtgatggagcggctgtctgctgagggccacttcttccaccgggagtgcttccgctgcagcatctgtgccaccaccctgcggctggccgcctacacctttgactgtgatgagggcaagttctactgcaagccccacttcatccactgcaagaccaacagcaagcagaggaagagaagagctgagctgaagcagcagcgggaggaggaggccacctggcaggagcaggaggccccccggcgggacacccccacagagagcagctgtgctgtggccgccatcggcaccctggagggcagcccccctgtgcacttcagcctgcctgtgctgcaccccctgctgggctag

SEQ ID NO: 159719 - DNA, 2931 bp, synthetic construct
  misc_feature 1..2931: note = Description of Artificial Sequence: Synthetic coding sequence
  source 1..2931: mol_type = other DNA
atgggagaaaatgaagatgagaagcaggcccaggccggccaggtgtttgaaaattttgtgcaggccagcacctgcaagggcaccctgcaggccttcaacatcctgaccaggcacctggacctggaccccctggaccacaggaacttctacagcaagctgaagagcaaggtgaccacctggaaggccaaggccctgtggtacaagctggacaagaggggcagccacaaggagtacaagaggggcaagagctgcaccaacaccaagtgcctgattgtgggcggcggcccctgtggcctgaggacagccatcgagctggcctacctgggcgccaaggtggtggtggtggagaagagggacagcttcagcagaaataatgtgctgcacctgtggcccttcaccatccatgacctgcggggcctgggcgccaagaagttctacggcaagttctgtgccggcagcattgaccacatcagcatccggcagctgcagctgatcctcttcaaggtggccctgatgctgggcgtggagatccacgtgaatgtggagtttgtgaaggtgctggagcccccagaggaccaggagaaccagaagattggctggagggctgagttcctgcccacagaccacagcctgtctgaatttgaatttgatgtgatcatcggggctgatggaagaagaaacaccctggagggcttccggaggaaggagttccggggcaagctggccatcgccatcacagccaacttcatcaacagaaacagcacagctgaggccaaggtggaggagatcagcggcgtggccttcatcttcaaccagaagttcttccaggacctgaaggaggagaccggcatcgacctggagaacatcgtgtactacaaggactgcacccactactttgtgatgacagccaagaagcagagcctgctggacaagggcgtcatcatcaatgactacatcgacacagagatgctgctgtgtgccgagaatgtgaaccaggacaacctgctgtcctatgcccgggaggccgctgactttgccaccaactaccagctgcccagcctggactttgccatgaaccactacggccagccagatgtggccatgtttgacttcacctgcatgtatgcctctgaaaatgctgccctggtgcgggagcggcaggcccaccagctgctggtggccctggtgggggacagcctgctggagcccttctggcccatgggcaccggctgtgcccggggcttcctggccgcctttgacacagcctggatggtgaagtcctggaaccagggcaccccacccctggagctgctggccgagcgggagagcctgtaccgcctgctgccccagaccaccccagagaacatcaacaagaactttgagcagtacaccctggaccccggcacccgctaccccaacctgaacagccactgtgtgcggccccaccaggtgaagcacctgtacatcaccaaggagctggagcactaccccctggagcggctgggctctgtgagaagatctgtgaacctgagcaggaaggagagtgacatccggcccagcaagctgctgacctggtgccagcagcagacagagggctaccagcacgtgaatgtgacagacctgaccacctcctggaggagcggcctggccctgtgtgccatcatccaccgcttccggcctgagctgatcaactttgacagcctgaatgaagatgatgctgtggagaacaaccagctggcctttgatgtggccgagcgggagtttggcatcccccctgtgaccaccgggaaggagatggccagcgcccaggagccagacaagctgtccatggtgatgtacctgagcaagttctatgagctgttccggggcacccccctgcggcctgtggacagctggaggaagaactacggggagaatgctgacctgagcctggccaagagcagcatcagcaacaactacctgaacctgaccttccccaggaagaggaccccccgggtggatggccagacaggagaaaatgacatgaacaagagaagaaggaagggcttcaccaacctggatgagcccagcaacttcagcagccgcagcctgggcagcaaccaggagtgtggcagcagcaaggagggcggcaaccagaacaaggtgaagtccatggccaaccagctgctggccaagtttgaggagagcaccaggaaccccagcctgatgaagcaggagaagaagagccccagcggcttccacttccaccccagccacctgaggacagtgcacccccaggagagcatgaggaagagcttccccctgaacctgggcggcagtgacacctgctacttctgcaagaagagggtgtatgtgatggagcggctgtctgctgagggccacttcttccaccgggagtgcttccgctgcagcatctgtgccaccaccctgcggctggccgcctacacctttgactgtgatgagggcaagttctactgcaagccccacttcatccactgcaagaccaacagcaagcagaggaagagaagagctgagctgaagcagcagcgggaggaggaggccacctggcaggagcaggaggccccccggcgggacacccccacagagagcagctgtgctgtggccgccatcggcaccctggagggcagccccccaggcatcagcaccagcttcttcaggaaggtgctgggctggcccctgcggctgccccgggacctgtgcaactggatgcagggcctgctgcaggccgccggcctgcacatccgggacaatgcctacaactactgctacatgtatgagctgctgagcctgggcctgcccctgctgtgggccttcagcgaggtgctggccgccatgtaccgggagagcgagggcagcctggagagcatctgcaactgggtgctgcgctgcttccctgtgaagctgaggtag

SEQ ID NO: 159720 - DNA, 363 bp, synthetic construct
  misc_feature 1..363: note = Description of Artificial Sequence: Synthetic coding sequence
  source 1..363: mol_type = other DNA
atgggagaaaatgaagatgagaagcaggcccaggccggccaggtgtttgaaaattttgtgcaggccagcacctgcaagggcaccctgcaggccttcaacatcctgaccaggcacctggacctggaccccctggaccacaggaacttctacagcaagctgaagagcaaggtgaccacctggaaggccaaggccctgtggtacaagctggacaagaggggcagccacaaggagtacaagaggggcaagagctgcaccaacaccaagtgcctgattgtgggcggcggcccctgtggcctgaggacagccatcgagctggcctacctgggcgccaaggtggtggtggtggagaagagggacagctag

SEQ ID NO: 159721 - DNA, 405 bp, synthetic construct
  misc_feature 1..405: note = Description of Artificial Sequence: Synthetic coding sequence
  source 1..405: mol_type = other DNA
atgggagaaaatgaagatgagaagcaggcccaggccggccaggtgtttgaaaattttgtgcaggccagcacctgcaagggcaccctgcaggccttcaacatcctgaccaggcacctggacctggaccccctggaccacaggaacttctacagcaagctgaagagcaaggtgaccacctggaaggccaaggccctgtggtacaagctggacaagaggggcagccacaaggagtacaagaggggcaagagctgcaccaacaccaagtgcctgattgtgggcggcggcccctgtggcctgaggacagccatcgagctggcctacctgggcgccaaggtggtggtggtggagaagagggacagcttcagcagaaataatgtgctgcacctgtggcccttcaccatctag

SEQ ID NO: 159722 - DNA, 267 bp, synthetic construct
  misc_feature 1..267: note = Description of Artificial Sequence: Synthetic coding sequence
  source 1..267: mol_type = other DNA
atgggagaaaatgaagatgagaagcaggcccaggccggccaggtgtttgaaaattttgtgcaggccagcacctgcaagggcaccctgcaggccttcaacatcctgaccaggcacctggacctggaccccctggaccacaggaacttctacagcaagctgaagagcaaggtgaccacctggaaggccaaggccctgtggtacaagctggacaagaggggcagccacaaggagtacaagaggggcaagagctgcaccaacaccaagtag

SEQ ID NO: 159723 - DNA, 12 bp, synthetic construct
  misc_feature 1..12: note = Description of Artificial Sequence: Synthetic coding sequence
  source 1..12: mol_type = other DNA
atgggagagtag

SEQ ID NO: 159724 - DNA, 297 bp, synthetic construct
  misc_feature 1..297: note = Description of Artificial Sequence: Synthetic coding sequence
  source 1..297: mol_type = other DNA
atgggagaaaatgaagatgagaagcaggcccaggccggccaggtgtttgaaaattttgtgcaggccagcacctgcaagggcaccctgcaggccttcaacatcctgaccaggcacctggacctggaccccctggaccacaggaacttctacagcaagctgaagagcaaggtgaccacctggaaggccaaggccctgtggtacaagctggacaagaggggcagccacaaggagtacaagaggggcaagagctgcaccaacaccaagtgcctgattgtgggcggcggcccctgtggctag

SEQ ID NO: 159725 - DNA, 267 bp, synthetic construct; identical to SEQ ID NO: 159722
  misc_feature 1..267: note = Description of Artificial Sequence: Synthetic coding sequence
  source 1..267: mol_type = other DNA

SEQ ID NO: 159726 - DNA, 309 bp, synthetic construct
  misc_feature 1..309: note = Description of Artificial Sequence: Synthetic coding sequence
  source 1..309: mol_type = other DNA
atgggagaaaatgaagatgagaagcaggcccaggccggccaggtgtttgaaaattttgtgcaggccagcacctgcaagggcaccctgcaggccttcaacatcctgaccaggcacctggacctggaccccctggaccacaggaacttctacagcaagctgaagagcaaggtgaccacctggaaggccaaggccctgtggtacaagctggacaagaggggcagccacaaggagtacaagaggggcaagagctgcaccaacaccaagtgcctgattgtgggcggcggcccctgtggcctgaggacagcctag

SEQ ID NO: 159727 - DNA, 2805 bp, synthetic construct
  misc_feature 1..2805: note = Description of Artificial Sequence: Synthetic coding sequence
  source 1..2805: mol_type = other DNA
atgggagaaaatgaagatgagaagcaggcccaggccggccaggtgtttgaaaattttgtgcaggccagcacctgcaagggcaccctgcaggccttcaacatcctgaccaggcacctggacctggaccccctggaccacaggaacttctacagcaagctgaagagcaaggtgaccacctggaaggccaaggccctgtggtacaagctggacaagaggggcagccacaaggagtacaagaggggcaagagctgcaccaacaccaagtgcctgattgtgggcggcggcccctgtggcctgaggacagccatcgagctggcctacctgggcgccaaggtggtggtggtggagaagagggacagcttcagcagaaataatgtgctgcacctgtggcccttcaccatccatgacctgcggggcctgggcgccaagaagttctacggcaagttctgtgccggcagcattgaccacatcagcatccggcagctgcagctgatcctcttcaaggtggccctgatgctgggcgtggagatccacgtgaatgtggagtttgtgaaggtgctggagcccccagaggaccaggagaaccagaagattggctggagggctgagttcctgcccacagaccacagcctgtctgaatttgaatttgatgtgatcatcggggctgatggaagaagaaacaccctggagggcttccggaggaaggagttccggggcaagctggccatcgccatcacagccaacttcatcaacagaaacagcacagctgaggccaaggtggaggagatcagcggcgtggccttcatcttcaaccagaagttcttccaggacctgaaggaggagaccggcatcgacctggagaacatcgtgtactacaaggactgcacccactactttgtgatgacagccaagaagcagagcctgctggacaagggcgtcatcatcaatgactacatcgacacagagatgctgctgtgtgccgagaatgtgaaccaggacaacctgctgtcctatgcccgggaggccgctgactttgccaccaactaccagctgcccagcctggactttgccatgaaccactacggccagccagatgtggccatgtttgacttcacctgcatgtatgcctctgaaaatgctgccctggtgcgggagcggcaggcccaccagctgctggtggccctggtgggggacagcctgctggagcccttctggcccatgggcaccggctgtgcccggggcttcctggccgcctttgacacagcctggatggtgaagtcctggaaccagggcaccccacccctggagctgctggccgagcgggagagcctgtaccgcctgctgccccagaccaccccagagaacatcaacaagaactttgagcagtacaccctggaccccggcacccgctaccccaacctgaacagccactgtgtgcggccccaccaggtgaagcacctgtacatcaccaaggagctggagcactaccccctggagcggctgggctctgtgagaagatctgtgaacctgagcaggaaggagagtgacatccggcccagcaagctgctgacctggtgccagcagcagacagagggctaccagcacgtgaatgtgacagacctgaccacctcctggaggagcggcctggccctgtgtgccatcatccaccgcttccggcctgagctgatcaactttgacagcctgaatgaagatgatgctgtggagaacaaccagctggcctttgatgtggccgagcgggagtttggcatcccccctgtgaccaccgggaaggagatggccagcgcccaggagccagacaagctgtccatggtgatgtacctgagcaagttctatgagctgttccggggcacccccctgcggcctgtggacagctggaggaagaactacggggagaatgctgacctgagcctggccaagagcagcatcagcaacaactacctgaacctgaccttccccaggaagaggaccccccgggtggatggccagacaggagaaaatgacatgaacaagagaagaaggaagggcttcaccaacctggatgagcccagcaacttcagcagccgcagcctgggcagcaaccaggagtgtggcagcagcaaggagggcggcaaccagaacaaggtgaagtccatggccaaccagctgctggccaagtttgaggagagcaccaggaaccccagcctgatgaagcaggagaagaagagccccagcggcttccacttccaccccagccacctgaggacagtgcacccccagctgactgtgggcaaggtgtcctctggaattggagctgctgctgaggtgctggtgaacctgtacatgaatgaccaccggcccaaggcccaggccaccagcccagacctggagagcatgaggaagagcttccccctgaacctgggcggcagtgacacctgctacttctgcaagaagagggtgtatgtgatggagcggctgtctgctgagggccacttcttccaccgggagtgcttccgctgcagcatctgtgccaccaccctgcggctggccgcctacacctttgactgtgatgagggcaagttctactgcaagccccacttcatccactgcaagaccaacagcaagcagaggaagagaagagctgagctgaagcagcagcgggaggaggaggccacctggcaggagcaggaggccccccggcgggacacccccacagagagcagctgtgctgtggccgccatcggcaccctggagggcagcccccctgtgcacttcagcctgcctgtgctgcaccccctgctgggctag

SEQ ID NO: 159728 - DNA, 1638 bp, synthetic construct
  misc_feature 1..1638: note = Description of Artificial Sequence: Synthetic coding sequence
  source 1..1638: mol_type = other DNA
atgaggagcagcccagacctgaacagccactgtgtgcggccccaccaggtgaagcacctgtacatcaccaaggagctggagcactaccccctggagcggctgggctctgtgcggcgctctgtgaacctgagcaggaaggagagtgacatccggcccagcaagctgctgacctggtgccagcagcagacagagggctaccagcacgtgaatgtgacagacctgaccacctcctggaggagcggcctggccctgtgtgccatcatccaccgcttccggcctgagctgatcaactttgacagcctgaatgaagatgatgctgtggagaacaaccagctggcctttgatgtggccgagcgggagtttggcatcccccctgtgaccaccgggaaggagatggccagcgcccaggagccagacaagctgtccatggtgatgtacctgagcaagttctatgagctgttccggggcacccccctgcggcctgtggacagctggaggaagaactatggagaaaatgctgacctgagcctggccaagagcagcatcagcaacaactacctgaacctgaccttccccaggaagaggaccccccgggtggatggccagacaggagaaaatgacatgaacaagagaagaaggaagggcttcaccaacctggatgagcccagcaacttcagcagccgcagcctgggcagcaaccaggagtgtggcagcagcaaggagggcggcaaccagaacaaggtgaagtccatggccaaccagctgctggccaagtttgaggagagcaccaggaaccccagcctgatgaagcaggagaagaagagccccagcggcttccacttccaccccagccacctgaggacagtgcacccccagctgactgtgggcaaggtgagcagcggcatcggggctgctgctgaggtgctggtgaacctgtacatgaatgaccaccggcccaaggcccaggccaccagcccagacctggagagcatgaggaagagcttccccctgaacctgggcggcagtgacacctgctacttctgcaagaagagggtgtatgtgatggagcggctgtctgctgagggccacttcttccaccgggagtgcttccgctgcagcatctgtgccaccaccctgcggctggccgcctacacctttgactgtgatgagggcaagttctactgcaagccccacttcatccactgcaagaccaacagcaagcagaggaagagaagagctgagctgaagcagcagcgggaggaggaggccacctggcaggagcaggaggccccccggcgggacacccccacagagagcagctgtgctgtggccgccatcggcaccctggagggcagccccccaggcatcagcaccagcttcttcaggaaggtgctgggctggcccctgcggctgccccgggacctgtgcaactggatgcagggcctgctgcaggccgccggcctgcacatccgggacaatgcctacaactactgctacatgtatgagctgctgagcctgggcctgcccctgctgtgggccttcagcgaggtgctggccgccatgtaccgggagagcgagggcagcctggagagcatctgcaactgggtgctgcgctgcttccctgtgaagctgaggtag

SEQ ID NO: 159729 - DNA, 3273 bp, synthetic construct
  misc_feature 1..3273: note = Description of Artificial Sequence: Synthetic coding sequence
  source 1..3273: mol_type = other DNA
atggccaccctgctgagccacccccagcagaggcctcccttcctgcggcaggccatcaagatcagaagaagaagagtgcgggacctgcaggaccccccaccccagatggcccctgagatccagccccccagccaccacttcagccctgagcagagggccctgctgtatgaagatgccctgtacacagtgctgcaccggctgggccaccctgagcccaaccacgtgacagaggccagcgagctgctgcgctacctgcaggaggccttccacgtggagcctgaggagcaccagcagaccctgcagagggtgcgggagctggagaagcccatcttctgcctgaaggccaccgtgaagcaggccaagggcatcctgggcaaggatgtgtctggcttcagtgacccctactgcctgctgggcatcgagcagggcgtgggcgtgcctgggggcagccctggcagccgccaccggcagaaggctgtggtgcgccacaccatccctgaggaggagacccacaggacccaggtgatcacccagaccctgaaccctgtgtgggatgagaccttcatcctggagtttgaggacatcaccaatgccagcttccacctggacatgtgggacctggacacagtggagagcgtgcggcagaagctgggggagctgacagacctgcacggcctgcggcgcatcttcaaggaggccaggaaggacaagggccaggatgacttcctgggcaatgtggtgctgcggctgcaggacctgcgctgccgggaggaccagtggtaccccctggagcccaggacagagacctacccagaccggggccagtgccacctgcagttccagctgatccacaagaggcgggccaccagcgccagccgcagccagcccagctacacagtgcacctgcacctgctgcagcagctggtgtcccatgaggtgacccagcacgaggccggcagcacctcctgggatggcagcctgagcccccaggccgccaccgtgctcttcctgcacgccacccagaaggacctgagtgacttccaccagagcatggcccagtggctggcctacagccggctgtaccagagcctggagttccccagcagctgcctgctgcaccccatcaccagcattgagtaccagtggatccagggccgcctgaaggccgagcagcaggaggagctggccgccagcttcagcagcctgctgacctacggcctgagcctcatccgccgcttccgctctgtgttccccctgtctgtgtctgacagccctgcccggctgcagagcctgctgcgggtgctggtgcagatgtgcaagatgaaggccttcggggagctgtgccccaacacagcccccctgccccagctggtgacagaggccctgcagacaggcaccacagagtggttccacctgaagcagcagcaccaccagcccatggtgcagggcatccctgaggccggcaaggccctgctgggcctggtgcaggatgtgattggagacctgcaccagtgccagaggacctgggacaagatcttccacaacaccctgaagatccacctgttctccatggccttccgggagctgcagtggctggtggccaagagggtgcaggaccacaccaccgtggtgggagatgtggtgtccccagagatgggagagagcctcttccagctgtacatcagcctgaaggagctgtgccagctgaggatgagcagcagcgagagagatggagtgctggccctggacaacttccaccgctggttccagcctgccatccccagctggctgcagaagacctacaatgaggccctggcccgggtgcagagagctgtgcagatggatgagctggtgcccctgggggagctgaccaagcacagcaccagcgctgtggacctgagcacctgctttgcccagatcagccacacagcccggcagctggactggccagaccctgaggaggccttcatgatcaccgtgaagtttgtggaggacacctgccgcctggccctggtgtactgcagcctcatcaaggcccgggcccgggagctgagcagcggccagaaggaccagggccaggccgccaacatgctgtgtgtggtggtgaatgacatggagcagctgcggctggtgattggcaagctgcctgcccagctggcctgggaggccctggagcagagggtgggcgctgtgctggagcagggccagctgcagaacaccctgcacgcccagctgcagagcgccctggccggcctgggccacgagatcagaactggagtgaggaccctggccgagcagctggaggtgggcatcgccaagcacatccagaagctggtgggcgtgcgggagagcgtgctgcctgaagatgccatcctgcccctgatgaagttcctggaggtggagctgtgctacatgaacaccaacctggtgcaggagaacttcagcagcctgctgaccctgctgtggacccacaccctgactgtgctggtggaggccgccgccagccagaggagcagcagcctggccagcaaccggctgaagatcgccctgcagaacctggagatctgcttccacgccgagggctgcggcctgccccccaaggccctgcacacagccaccttccaggccctgcagagggacctggagctgcaggccgccagcagccgggagctgatcaggaagtacttctgcagccgcatccagcagcaggccgagaccaccagcgaggagctgggcgctgtgacagtgaaggccagctaccgggccagcgagcagaagctgcgggtggagctgctgagcgccagcagcctgctgcccctggacagcaatggcagcagtgacccctttgtgcagctgaccctggagcccaggcatgagttccctgagctggccgcccgggagacccagaagcacaagaaggacctgcaccccctgtttgatgagacctttgagttcctggtgcctgctgagccctgcaggaaggccggggcctgcctgctgctgactgtgctggactatgacaccctgggcgcagatgacctggagggggaggccttcctgcccctgcgggaggtgcccggcctgagcggcagcgaggagcccggggaggtgccccagacccggctgcccctgacctacccagcccccaacggggaccccatcctgcagctgctggagggcaggaagggggaccgggaggcccaggtgtttgtgcggctgcggcggcaccgggccaagcaggccagccagcacgccctgcggcctgccccctag

SEQ ID NO: 159730 - DNA, 2847 bp, synthetic construct
  misc_feature 1..2847: note = Description of Artificial Sequence: Synthetic coding sequence
  source 1..2847: mol_type = other DNA
atggaggagaggaagcatgagaccatgaacccagcccacgtgctgtttgacagatttgtgcaggccaccacctgcaagggcaccctgaaggccttccaggagctgtgtgaccacctggagctgaagcccaaggactaccgctccttctaccacaagctgaagagcaagctgaactactggaaggccaaggccctgtgggccaagctggacaagaggggcagccacaaggactacaagaagggcaaggcctgcaccaacaccaagtgcctgatcatcggggccggcccctgtggcctgaggacagccatcgacctgagcctgctgggcgccaaggtggtggtgattgagaagagagatgccttcagcagaaataatgtgctgcacctgtggcccttcaccatccatgacctgcggggcctgggcgccaagaagttctacggcaagttctgtgccggggccatcgaccacatcagcatccggcagctgcagctgatcctgctgaaggtggccctgatcctgggcatcgagatccacgtgaatgtggagttccagggcctcatccagcccccagaggaccaggagaatgaaagaattggctggagggccctggtgcaccccaagacccaccctgtgtctgaatatgaatttgaggtgatcattggaggagatggaagaagaaacaccctggagggcttccggaggaaggagttccggggcaagctggccatcgccatcacagccaacttcatcaacagaaacaccacagctgaggccaaggtggaggagatcagcggcgtggccttcatcttcaaccagaagttcttccaggagctgcgggaggccaccggcatcgacctggagaacatcgtgtactacaaggatgacacccactactttgtgatgacagccaagaagcagagcctgctggacaagggcgtcatcctgcatgactatgctgacacagagctgctgctgagccgggagaatgtggaccaggaggccctgctgtcctatgcccgggaggccgctgacttcagcacccagcagcagctgcccagcctggactttgccatcaaccactacggccagccagatgtggccatgtttgacttcacctgcatgtatgcctctgaaaatgctgccctggtgcgggagcagaatggccaccagctgctggtggccctggtgggggacagcctgctggagcccttctggcccatgggcactggaattgcccggggcttcctggccgccatggattctgcctggatggtgcgctcctggagcctgggcaccagccccctggaggtgctggccgagcgggagagcatctaccgcctgctgccccagaccaccccagaaaatgtgtccaagaacttcagccagtacagcattgatcctgtgacccgctaccccaacatcaacgtgaacttcctgcggcccagccaggtgcgccacctgtatgacaccggggagaccaaggacatccacctggagatggagagcctggtgaacagcaggaccacccccaagctgaccagaaatgaatctgtggcccggagcagcaagctgctgggctggtgccagaggcagacagatggctacgccggcgtgaatgtgacagacctgaccatgtcctggaagagcggcctggccctgtgtgccatcatccaccgctacagaccagacctgattgactttgacagcctggatgagcagaatgtggagaagaacaaccagctggcctttgatattgctgagaaggagctgggcatcagccccatcatgaccgggaaggagatggcctctgtgggggagccagacaagctgtccatggtgatgtacctgacccagttctatgagatgttcaaggacagcctgcccagcagtgacaccctggacctgaatgctgaggagaaggctgtgctgattgccagcaccaggagccccatctccttcctgagcaagctgggccagaccatcagcaggaagaggagccccaaggacaagaaggagaaggacctggatggagctgggaagaggaggaagaccagccagagcgaggaggaggaggccccccggggccacagaggagagcggcccaccctggtgtccaccctgacagacaggaggatggatgtggccgtgggcaaccagaacaaggtgaagtacatggccacccagctgctggccaagtttgaagaaaatgccccagcccagagcatcggcatccggcggcagggctccatgaagaaggagttcccccagaacctgggcggcagtgacacctgctacttctgccagaagagggtgtatgtgatggagcggctgtctgctgagggcaagttcttccacaggagctgcttcaagtgtgagtactgtgccaccaccctgcggctgagcgcctatgcctatgacattgaagatggcaagttctactgcaagccccactactgctaccgcctgagcggctacgcccagaggaagaggcctgctgtggcccccctgagcggcaaggaggccaagggccccctgcaggatggagccaccacagatgccaacggccgggccaatgctgtggccagcagcacagagaggaccccaggcagcggcgtgaatggcctggaggagcccagcatcgccaagaggctgcggggcaccccagagagaattgagctggagaactaccgcctgagcctgcggcaggccgaggccctgcaggaggtgcctgaggagacccaggccgagcacaacctgagctctgtgctggacacaggagcagaagaagatgtggccagccgcagcgccaggagagctgctggccggcccccagccacccggccctag

SEQ ID NO: 159731 - DNA, 2901 bp, synthetic construct
  misc_feature 1..2901: note = Description of Artificial Sequence: Synthetic coding sequence
  source 1..2901: mol_type = other DNA
atggaggagaggaagcatgagaccatgaacccagcccacgtgctgtttgacagatttgtgcaggccaccacctgcaagggcaccctgaaggccttccaggagctgtgtgaccacctggagctgaagcccaaggactaccgctccttctaccacaagctgaagagcaagctgaactactggaaggccaaggccctgtgggccaagctggacaagaggggcagccacaaggactacaagaagggcaaggcctgcaccaacaccaagtgcctgatcatcggggccggcccctgtggcctgaggacagccatcgacctgagcctgctgggcgccaaggtggtggtgattgagaagagagatgccttcagcagaaataatgtgctgcacctgtggcccttcaccatccatgacctgcggggcctgggcgccaagaagttctacggcaagttctgtgccggggccatcgaccacatcagcatccggcagctgcagctgatcctgctgaaggtggccctgatcctgggcatcgagatccacgtgaatgtggagttccagggcctcatccagcccccagaggaccaggagaatgaaagaattggctggagggccctggtgcaccccaagacccaccctgtgtctgaatatgaatttgaggtgatcattggaggagatggaagaagaaacaccctggagggcttccggaggaaggagttccggggcaagctggccatcgccatcacagccaacttcatcaacagaaacaccacagctgaggccaaggtggaggagatcagcggcgtggccttcatcttcaaccagaagttcttccaggagctgcgggaggccaccggcatcgacctggagaacatcgtgtactacaaggatgacacccactactttgtgatgacagccaagaagcagagcctgctggacaagggcgtcatcctgcatgactatgctgacacagagctgctgctgagccgggagaatgtggaccaggaggccctgctgtcctatgcccgggaggccgctgacttcagcacccagcagcagctgcccagcctggactttgccatcaaccactacggccagccagatgtggccatgtttgacttcacctgcatgtatgcctctgaaaatgctgccctggtgcgggagcagaatggccaccagctgctggtggccctggtgggggacagcctgctggagcccttctggcccatgggcactggaattgcccggggcttcctggccgccatggattctgcctggatggtgcgctcctggagcctgggcaccagccccctggaggtgctggccgagcgggagagcatctaccgcctgctgccccagaccaccccagaaaatgtgtccaagaacttcagccagtacagcattgatcctgtgacccgctaccccaacatcaacgtgaacttcctgcggcccagccaggtgcgccacctgtatgacaccggggagaccaaggacatccacctggagatggagagcctggtgaacagcaggaccacccccaagctgaccagaaatgaatctgtggcccggagcagcaagctgctgggctggtgccagaggcagacagatggctacgccggcgtgaatgtgacagacctgaccatgtcctggaagagcggcctggccctgtgtgccatcatccaccgctacagaccagacctgattgactttgacagcctggatgagcagaatgtggagaagaacaaccagctggcctttgatattgctgagaaggagctgggcatcagccccatcatgaccgggaaggagatggcctctgtgggggagccagacaagctgtccatggtgatgtacctgacccagttctatgagatgttcaaggacagcctgcccagcagtgacaccctggacctgaatgctgaggagaaggctgtgctgattgccagcaccaggagccccatctccttcctgagcaagctgggccagaccatcagcaggaagaggagccccaaggacaagaaggagaaggacctggatggagctgggaagaggaggaagaccagccagagcgaggaggaggaggccccccggggccacagaggagagcggcccaccctggtgtccaccctgacagacaggaggatggatgtggccgtgggcaaccagaacaaggtgaagtacatggccacccagctgctggccaagtttgaagaaaatgccccagcccagagcatcggcatccggcggcagggctccatgaagaaggagttcccccagaacctgggcggcagtgacacctgctacttctgccagaagagggtgtatgtgatggagcggctgtctgctgagggcaagttcttccacaggagctgcttcaagtgtgagtactgtgccaccaccctgcggctgagcgcctatgcctatgacattgaagatggcaagttctactgcaagccccactactgctaccgcctgagcggctacgcccagaggaagaggcctgctgtggcccccctgagcggcaaggaggccaagggccccctgcaggatggagccaccacagatgccaacggccgggccaatgctgtggccagcagcacagagaggaccccaggcagcggcgtgaatggcctggaggagcccagcatcgccaagaggctgcggggcaccccagagagaattgagctggagaactaccgcctgagcctgcggcaggccgaggccctgcaggaggtgcctgaggagacccaggccgagcacaacctgagctctgtgctggacacaggagcagaagaagatgtggccagccgggactgggtgagcccctggctgcccaggatggtgagcaacagctgggcccagatgatccaccccccccagccccccaccgtgctgggcagccagatgtag

SEQ ID NO: 159732 - DNA, 4713 bp, synthetic construct
  misc_feature 1..4713: note = Description of Artificial Sequence: Synthetic coding sequence
  source 1..4713: mol_type = other DNA
atgtctgacagcctgtggacagccctgagcaacttctccatgcccagcttccctgggggctccatgttccggaggaccaagagctgcaggaccagcaacaggaagagcctcatcctgaccagcaccagccccaccctgccccggccccacagccccctgcccggccacctgggcagcagccccctggacagccccaggaacttcagccccaacaccccagcccacttctcctttgccagcagccggcgggcagatggaagacgctggagcctggccagcctgcccagcagcggctacggcaccaacacccccagcagcacagtgagcagcagctgcagcagccaggagcggctgcaccagctgccctaccagcccaccgtggatgagctgcacttcctgagcaagcacttcggcagcacagagagcatcacagatgaagatggcggccgccgcagccctgctgtgcggcccaggagccgcagcctgagccctggccgcagccccagcagctatgacaatgaaattgtgatgatgaaccacgtgtacaaggagcgcttccccaaggccacagcccagatggaggagaagctgcgggacttcacccgggcctatgagccagacagcgtgctgcccctggctgatggagtgctgtccttcatccaccaccagatcatcgagctggcccgggactgcctgaccaagagcagagatggcctcatcaccaccgtgtacttctatgagctgcaggagaacctggagaagctgctgcaggatgcctatgaaagaagtgagagcctggaggtggcctttgtgacccagctggtgaagaagctgctgatcatcatcagcaggcctgcccggctgctggagtgcctggagttcaaccctgaggagttctaccacctgctggaggccgctgagggccacgccaaggagggccacctggtgaagacagacatcccccgctacatcatccggcagctgggcctgacccgggaccccttcccagatgtggtgcacctggaggagcaggacagcggcggcagcaacaccccagagcaggatgacctgtctgagggccgcagcagcaaggccaagaagcccccaggagaaaatgactttgacaccatcaagctgatcagcaatggagcctatggagctgtgtacctggtgcgccaccgggacacccggcagagatttgccatgaagaagatcaacaagcagaacctgatcctgaggaaccagatccagcaggcctttgtggagcgggacatcctgacctttgctgagaacccctttgtggtgggcatgttctgcagctttgagacccggcggcacctgtgcatggtgatggagtatgtggagggcggggactgtgccaccctgctgaagaacatcggggccctgcctgtggagatggccaggatgtactttgctgagaccgtgctggccctggagtacctgcacaactatggaattgtgcaccgggacctgaagccagacaacctgctgatcacctccatgggccacatcaagctgacagactttggcctgagcaagatgggcctgatgagcctgaccaccaacctgtatgagggccacatcgagaaggatgcccgggagttcctggacaagcaggtgtgtggcaccccagagtacatcgcccctgaggtgatcctgcggcagggctacggcaagcctgtggactggtgggccatgggcatcatcctgtatgagttcctggtgggctgtgtgcccttcttcggggacaccccagaggagctgtttggccaggtgatcagtgatgacatcctgtggccagaaggagatgaggccctgcccacagaggcccagctgctgatcagcagcctgctgcagaccaaccccctggtgcggctgggcgccggcggggcctttgaggtgaagcagcacagcttcttccgggacctggactggacaggcctgctgcggcagaaggccgagttcatcccccacctggagagtgaagatgacaccagctactttgacaccaggagtgaccgctaccaccacgtgaacagctatgatgaagatgacaccacagaggaggagcctgtggagatccggcagttcagcagctgcagcccccgcttcagcaaggtgtacagctccatggagcagctgagccagcacgagcccaagacccctgtggccgctgctggcagcagcaagcgggagcccagcaccaagggccctgaggagaaggtggccggcaagcgggagggcctgggcggcctgaccctgcgggagaagacctggaggggcggcagccctgagatcaagcgcttcagcgccagcgaggccagcttcctggagggggaggccagcccccccctgggcgcccggcggcgcttcagcgccctgctggagcccagccgcttcagcgccccccaggaggatgaagatgaggcccggctgcggcggcccccccggcccagcagtgaccctgctggcagcctggatgcccgggcccccaaggaggagacccagggcgagggcaccagcagcgctggggacagcgaggccacagaccggcccaggcctggggacctgtgcccccccagcaaggatggagatgccagcggcccccgggccaccaatgacctggtgctgcggcgggcccggcaccagcagatgtctggagatgtggccgtggagaagaggcccagcaggactggaggcaaggtgatcaagagcgccagcgccacagccctgtctgtgatgatcccagctgtggacccccacggcagcagccccctggccagccccatgagccccaggagcctgagcagcaaccccagcagccgggacagcagccccagccgggactacagccctgctgtgtctggcctgcggagccccatcaccatccagaggtctgggaagaagtatggcttcaccctgcgggccatccgggtgtacatgggagacacagatgtgtacagcgtgcaccacatcgtgtggcacgtggaggagggcggccctgcccaggaggccggcctgtgtgccggggacctgatcacccacgtgaatggagagcctgtgcacggcatggtgcaccctgaggtggtggagctgatcctgaagagcggcaacaaggtggccgtgaccaccaccccatttgagaacaccagcatcagaattggccctgcccggcgcagcagctacaaggccaagatggcccggaggaacaagaggccttctgccaaggagggccaggagagcaagaagaggagcagcctcttcaggaagatcaccaagcagagcaacctgctgcacaccagccgcagcctgagcagcctgaacagaagcctgagcagcagtgacagcctgcccggcagccccacccacggcctgcctgcccggagccccacccacagctaccgcagcaccccagattctgcctacctgggcgccagcagccagagcagcagccctgccagcagcacccccaacagccctgccagcagcgccagccaccacatccggcccagcaccctgcacggcctgagccccaagctgcaccggcagtacagaagtgcccgctgcaagtctgctggcaacatccccctgagccccctggcccacacccccagccccacccaggccagccccccacccctgcccggccacacagtgggcagcagccacaccacccagagcttccctgccaagctgcacagcagcccccctgtggtgcggccccggcccaagtctgctgagcccccaagaagccccctgctgaagagggtgcagagcgctgagaagctgggcgccagcctgtctgctgacaagaagggggccctgaggaagcacagcctggaggtgggccacccagacttcaggaaggacttccatggagagctggccctgcacagcctggccgagagtgatggagagaccccacctgtggagggcctgggcgccccccggcaggtggccgtgcggcggctgggccggcaggagagccccctgagcctgggcgctgaccccctgctgcctgagggcgccagcaggcctcctgtgagcagcaaggagaaggagagccctggaggagctgaggcctgcaccccaccccgggccaccaccccaggcggccgcaccctggagagagatgtgggctgcaccaggcaccagagcgtgcagacagaagatggcaccggcggcatggcccgggctgtggccaaggccgccctgagccctgtgcaggagcacgagaccggccgccgcagcagcagcggggaggccggcacccccctggtgcccatcgtggtggagcccgcccggcctggggccaaggctgtggtgccccagcccctgggcgctgacagcaagggcctgcaggagcccgcccccctggcccccagcgtgcctgaggccccccggggccgggagcgctgggtgctggaggtggtggaggagaggaccaccctgagcggccccaggagcaagccagccagccccaagctgagccctgagccccagacccccagcctggccccagccaagtgcagcgcccccagcagcgctgtgacccctgtgcccccagccagcctgctgggcagcggcaccaagccccaggtgggcctgaccagccgctgcccagctgaggccgtgcccccagctggcctgaccaagaagggcgtgagcagccctgcccctcctggcccctag

SEQ ID NO: 159733 - DNA, 2178 bp, synthetic construct
  misc_feature 1..2178: note = Description of Artificial Sequence: Synthetic coding sequence
  source 1..2178: mol_type = other DNA
atgtctgacagcctgtggacagccctgagcaacttctccatgcccagcttccctgggggctccatgttccggaggaccaagagctgcaggaccagcaacaggaagagcctcatcctgaccagcaccagccccaccctgccccggccccacagccccctgcccggccacctgggcagcagccccctggacagccccaggaacttcagccccaacaccccagcccacttctcctttgccagcagccggcgggcagatggaagacgctggagcctggccagcctgcccagcagcggctacggcaccaacacccccagcagcacagtgagcagcagctgcagcagccaggagcggctgcaccagctgccctaccagcccaccgtggatgagctgcacttcctgagcaagcacttcggcagcacagagagcatcacagatgaagatggcggccgccgcagccctgctgtgcggcccaggagccgcagcctgagccctggccgcagccccagcagctatgacaatgaaattgtgatgatgaaccacgtgtacaaggagcgcttccccaaggccacagcccagatggaggagaagctgcgggacttcacccgggcctatgagccagacagcgtgctgcccctggctgatggagtgctgtccttcatccaccaccagatcatcgagctggcccgggactgcctgaccaagagcagagatggcctcatcaccaccgtgtacttctatgagctgcaggagaacctggagaagctgctgcaggatgcctatgaaagaagtgagagcctggaggtggcctttgtgacccagctggtgaagaagctgctgatcatcatcagcaggcctgcccggctgctggagtgcctggagttcaaccctgaggagttctaccacctgctggaggccgctgagggccacgccaaggagggccacctggtgaagacagacatcccccgctacatcatccggcagctgggcctgacccgggaccccttcccagatgtggtgcacctggaggagcaggacagcggcggcagcaacaccccagagcaggatgacctgtctgagggccgcagcagcaaggccaagaagcccccaggagaaaatgactttgacaccatcaagctgatcagcaatggagcctatggagctgtgtacctggtgcgccaccgggacacccggcagagatttgccatgaagaagatcaacaagcagaacctgatcctgaggaaccagatccagcaggcctttgtggagcgggacatcctgacctttgctgagaacccctttgtggtgggcatgttctgcagctttgagacccggcggcacctgtgcatggtgatggagtatgtggagggcggggactgtgccaccctgctgaagaacatcggggccctgcctgtggagatggccaggatgtactttgctgagaccgtgctggccctggagtacctgcacaactatggaattgtgcaccgggacctgaagccagacaacctgctgatcacctccatgggccacatcaagctgacagactttggcctgagcaagatgggcctgatgagcctgaccaccaacctgtatgagggccacatcgagaaggatgcccgggagttcctggacaagcaggtgtgtggcaccccagagtacatcgcccctgaggtgatcctgcggcagggctacggcaagcctgtggactggtgggccatgggcatcatcctgtatgagttcctggtgggctgtgtgcccttcttcggggacaccccagaggagctgtttggccaggtgatcagtgatgacatcctgtggccagaaggagatgaggccctgcccacagaggcccagctgctgatcagcagcctgctgcagaccaaccccctggtgcggctgggcgccggcggggcctttgaggtgaagcagcacagcttcttccgggacctggactggacaggcctgctgcggcagaaggccgagttcatcccccacctggagagtgaagatgacaccagctactttgacaccaggagtgaccgctaccaccacgtgaacagctatgatgaagatgacaccacagaggaggagcctgtggagatccggcagttcagcagctgcagcccccgcttcagcaaggtgtacagcctgcgcatccacatgtacacctacaagtag

SEQ ID NO: 159734 - DNA, 5397 bp, synthetic construct
  misc_feature 1..5397: note = Description of Artificial Sequence: Synthetic coding sequence
  source 1..5397: mol_type = other DNA
atgaagaggagccgctgccgggaccggccccagcccccacctccagacagaagagaagatggagtgcagagagctgctgagctgagccagagcctgcccccaagaagaagagcccctcctggccggcagaggctggaggagaggactggacctgctggccctgagggcaaggagcaggatgtggtgactggagtgagccccctgctcttcaggaagctgagcaacccagacatcttcagcagcacaggcaaggtgaagctgcagaggcagctgagccaggatgactgcaagctgtggaggggcaacctggccagcagcctgagcggcaagcagctgctgcccctgagcagctctgtgcacagctctgtgggccaggtgacctggcagagcagtggagaggccagcaacctggtgaggatgaggaaccagagcctgggccagagcgcccccagcctgacagctggcctgaaggagctgagcctgccccggcggggcagcttctgcaggaccagcaacaggaagagcctgattgtgaccagcagcaccagccccaccctgccccggccccacagccccctgcacggccacactggaaacagccccctggacagccccaggaacttcagccccaatgccccagcccacttctcctttgtgcctgcccggaggacagatggaagacgctggagcctggccagcctgcccagcagcggctacggcaccaacacccccagcagcacagtgagcagcagctgcagcagccaggagaagctgcaccagctgcccttccagcccacagcagatgagctgcacttcctgaccaagcacttcagcacagaatctgtgcctgatgaggagggccggcagagccctgccatgaggcccaggagccgcagcctgagccctggccgcagccctgtgtcctttgattctgagatcatcatgatgaaccacgtgtacaaggagcgcttccccaaggccacagcccagatggaggagcggctggccgagttcatcagcagcaacaccccagacagcgtgctgcccctggctgatggagccctgtccttcatccaccaccaggtgattgagatggcccgggactgcctggacaagagccgcagcggcctcatcaccagccagtacttctatgagctgcaggacaacctggagaagctgctgcaggatgcccacgagaggtctgagagcagcgaggtggcctttgtgatgcagctggtgaagaagctgatgatcatcatcgcccggcctgcccggctgctggagtgcctggagtttgatcctgaggagttctaccacctgctggaggccgctgagggccacgccaaggagggccagggcatcaagtgtgacatcccccgctacatcgtgtcccagctgggcctgacccgggaccccctggaggagatggcccagctgagcagctgtgacagcccagacaccccagagacagatgacagcattgagggccatggagccagcctgcccagcaagaagacccccagcgaggaggactttgagaccatcaagctgatcagcaatggagcctatggagctgtgttcctggtgcgccacaagagcacccggcagagatttgccatgaagaagatcaacaagcagaacctgatcctgaggaaccagatccagcaggcctttgtggagcgggacatcctgacctttgctgagaacccctttgtggtgtccatgttctgcagctttgacaccaagaggcacctgtgcatggtgatggagtatgtggagggcggggactgtgccaccctgctgaagaacatcggggccctgcctgtggacatggtgcggctgtactttgctgagaccgtgctggccctggagtacctgcacaactatggaattgtgcaccgggacctgaagccagacaacctgctgatcacctccatgggccacatcaagctgacagactttggcctgagcaagattggcctgatgagcctgaccaccaacctgtatgagggccacatcgagaaggatgcccgggagttcctggacaagcaggtgtgtggcaccccagagtacatcgcccctgaggtgatcctgcggcagggctacggcaagcctgtggactggtgggccatgggcatcatcctgtatgagttcctggtgggctgtgtgcccttcttcggggacaccccagaggagctgtttggccaggtgatcagtgatgagatcgtgtggccagaaggagatgaggccctgcccccagatgcccaggacctgaccagcaagctgctgcaccagaaccccctggagcggctgggcactggaagtgcctatgaggtgaagcagcaccccttcttcaccggcctggactggacaggcctgctgcggcagaaggccgagttcatcccccagctggagagtgaagatgacaccagctactttgacaccaggtctgagcgctaccaccacatggattctgaagatgaggaggaggtgtctgaagatggctgcctggagatccggcagttcagcagctgcagcccccgcttcaacaaggtgtacagctccatggagcggctgagcctgctggaggagaggaggaccccaccacccaccaagaggagcctgtctgaggagaaggaggaccacagtgatggcctggccggcctgaagggccgggaccgctcctgggtgattggcagccctgagatcctgaggaagaggctgtctgtgtctgagagcagccacacagaaagtgacagcagcccccccatgacagtgagaagacgctgcagcggcctgctggatgccccccgcttccctgagggccctgaggaggccagcagcaccctgcggcggcagccccaggagggcatctgggtgctgaccccaccttctggagagggcgtgtctggccctgtgacagagcacagcggggagcagaggcccaagctggatgaggaggccgtgggccgcagcagcggcagcagccctgccatggagacccggggccggggcaccagccagctggccgagggcgccacagccaaggccatcagtgacctggccgtgcggcgggcccggcaccggctgctgagcggggacagcacagagaagaggacagcccggcctgtgaacaaggtgatcaagagcgccagcgccacagccctgagcctgctgatccccagcgagcaccacacctgcagccccctggccagccccatgagcccccacagccagagcagcaaccccagcagccgggacagcagccccagccgggacttcctgcctgccctgggctccatgaggcctcccatcatcatccaccgggccggcaagaagtatggcttcaccctgcgggccatccgggtgtacatgggagacagtgatgtgtacacagtgcaccacatggtgtggcacgtggaggatggcggccctgccagcgaggccggcctgcggcagggcgacctgatcacccacgtgaatggagagcctgtgcacggcctggtgcacacagaggtggtggagctgatcctgaagagcggcaacaaggtggccatcagcaccacccccctggagaacaccagcatcaaggtgggccctgccaggaagggcagctacaaggccaagatggcccggcgcagcaagaggagccggggcaaggatggccaggagagcaggaagaggagcagcctcttcaggaagatcaccaagcaggccagcctgctgcacaccagccgcagcctgagcagcctgaacagaagcctgagcagtggagagagcggccctggcagccccacccacagccacagcctgagccccaggagccccacccagggctacagagtgaccccagatgctgtgcacagcgtgggcggcaacagcagccagagcagcagccccagcagctctgtgcccagcagccctgctggcagcggccacacccggcccagcagcctgcacggcctggcccccaagctgcagaggcagtaccgcagccccaggaggaagtctgctggcagcatccccctgagccccctggcccacacccccagccccccaccacccacagccagcccccagaggagccccagccccctgagcggccacgtggcccaggccttccccaccaagctgcacctgagcccccccctgggccggcagctgagccggcccaagtctgctgagccccccaggagccccctgctgaagagggtgcagagcgctgagaagctggccgccgccctggccgccagcgagaagaagctggccaccagcaggaagcacagcctggacctgccccacagcgagctgaagaaggagctgcccccccgggaggtgagccccctggaggtggtgggcgcccggtctgtgctgtctggaaaaggagccctgcctggaaaaggagtgctgcagcctgcccccagccgggccctgggcaccctgcggcaggacagagctgagcggcgggagagcctgcagaagcaggaggccatccgggaggtggacagcagtgaagatgacacagaggagggccctgagaacagccagggcgcccaggagctgagcctggccccccaccctgaggtgtcccagagcgtggcccccaagggggccggggagagcggggaggaggaccccttccccagccgggaccccaggagcctgggccccatggtgcccagcctgctgaccggcatcaccctgggcccccccaggatggagagccccagcggcccccaccggcggctgggcagcccccaggccatcgaggaggccgccagcagcagcagcgctggccccaacctgggccagagcggggccacagaccccatccccccagagggctgctggaaggcccagcacctgcacacccaggccctgacagccctgagccccagcaccagcggcctgacccccaccagcagctgcagcccccccagcagcaccagcggcaagctgtccatgtggagctggaagagcctcatcgagggccctgaccgggccagccccagcaggaaggccaccatggccggcggcctggccaacctgcaggacctggagaacaccaccccagcccagcccaagaacctgagcccccgggagcagggcaagacccagcccccatctgccccccggctggcccaccccagctatgaggaccccagccagggctggctgtgggagagtgaatgtgcccaggccgtgaaggaggaccctgccctgagcatcacccaggtgcctgatgccagcggggaccggcggcaggatgtgccctgccggggctgccccctgacccagaagtctgagcccagcctgcggcggggccaggagcccggcggccaccagaagcaccgggacctggccctggtgcctgatgagctgctgaagcagacctag

SEQ ID NO: 159735 - DNA, 2379 bp, synthetic construct
  misc_feature 1..2379: note = Description of Artificial Sequence: Synthetic coding sequence
  source 1..2379: mol_type = other DNA
atgttcagccccaccagcgccccagccctcttcctgaccaaggtgcccttctctgctgactgtgccctggccaccagccccctggccatcttcctgaacccccgggcccacagcagccctggcaccccctgcagcagccggcccctgccctggagctgcaggaccagcaacaggaagagcctcatcgtgaccagcagcaccagccccaccctgccccggccccacagccccctgcacggccacacaggcaacagccccctggacagccccaggaacttcagccccaatgccccagcccacttctcctttgtgcctgccaggagaacagatggccgccgctggagcctggccagcctgcccagcagcggctacggcaccaacacccccagcagcacagtgagcagcagctgcagcagccaggagaagctgcaccagctgcccttccagcccacagcagatgagctgcacttcctgaccaagcacttcagcacagagagcgtgcctgatgaggagggccggcagagccctgccatgaggcccaggagccgcagcctgagccctggccgcagccctgtgtcctttgacagcgagatcatcatgatgaaccacgtgtacaaggagcgcttccccaaggccacagcccagatggaggagcggctggccgagttcatcagcagcaacaccccagattctgtgctgcccctggctgatggagccctgtccttcatccaccaccaggtgattgagatggcccgggactgcctggacaagagccgcagcggcctcatcaccagccagtacttctatgagctgcaggacaacctggagaagctgctgcaggatgcccacgagaggtctgagagcagcgaggtggcctttgtgatgcagctggtgaagaagctgatgatcatcatcgcccggcctgcccggctgctggagtgcctggagtttgatcctgaggagttctaccacctgctggaggccgctgagggccacgccaaggagggccagggcatcaagtgtgacatcccccgctacatcgtgtcccagctgggcctgacccgggaccccctggaggagatggcccagctgagcagctgtgacagcccagacaccccagagacagatgacagcattgagggccacggggccagcctgcccagcaagaagaccccatctgaagaagattttgagaccatcaagctgatcagcaatggagcctacggggctgtgttcctggtgcgccacaagagcacccggcagagatttgccatgaagaagatcaacaagcagaacctgatcctgaggaaccagatccagcaggcctttgtggagcgggacatcctgacctttgctgagaacccctttgtggtgtccatgttctgcagctttgacaccaagaggcacctgtgcatggtgatggagtatgtggagggcggggactgtgccaccctgctgaagaacattggagccctgcctgtggacatggtgcggctgtactttgctgagaccgtgctggccctggagtacctgcacaactacggcatcgtgcaccgggacctgaagccagacaacctgctgatcacctccatgggccacatcaagctgacagactttggcctgagcaagattggcctgatgagcctgaccaccaacctgtatgagggccacatcgagaaggatgcccgggagttcctggacaagcaggtgtgtggcaccccagagtacatcgcccctgaggtgatcctgcggcagggctacggcaagcctgtggactggtgggccatgggcatcatcctgtatgagttcctggtgggctgtgtgcccttctttggagacaccccagaggagctgtttggccaggtgatcagtgatgaaattgtgtggccagaaggagatgaggccctgcccccagatgcccaggacctgaccagcaagctgctgcaccagaaccccctggagcggctgggcaccggcagcgcctatgaggtgaagcagcaccccttcttcaccggcctggactggacaggcctgctgcggcagaaggccgagttcatcccccagctggagagtgaagatgacaccagctactttgacaccaggtctgagcgctaccaccacatggacagtgaagatgaggaggaggtgtctgaagatggctgcctggagatccggcagttcagcagctgcagcccccgcttcaacaaggtgtacagctccatggagcggctgagcctgctggaggagaggaggaccccaccacccaccaagaggagcctgtctgaggagaaggaggaccacagtgatggcctggccggcctgaagggccgggaccgctcctgggtgattggcagccctgagcaccaccccagcgcctag

SEQ ID NO: 159736 - DNA, 4827 bp, synthetic construct
  misc_feature 1..4827: note = Description of Artificial Sequence: Synthetic coding sequence
  source 1..4827: mol_type = other DNA
atgaagaggagccgctgccgggaccggccccagcccccacctccagacagaagagaagatggagtgcagagagctgctgagctgagccagagcctgcccccaagaagaagagcccctcctggccggcagaggctggaggagaggactggacctgctggccctgagggcaaggagcaggatgtggtgactggagtgagccccctgctcttcaggaagctgagcaacccagacatcttcagcagcacaggcaaggtgaagctgcagaggcagctgagccaggatgactgcaagctgtggaggggcaacctggccagcagcctgagcggcaagcagctgctgcccctgagcagctctgtgcacagctctgtgggccaggtgacctggcagagcagtggagaggccagcaacctggtgaggatgaggaaccagagcctgggccagagcgcccccagcctgacagctggcctgaaggagctgagcctgccccggcggggcagcttctgcaggaccagcaacaggaagagcctgattgtgaccagcagcaccagccccaccctgccccggccccacagccccctgcacggccacactggaaacagccccctggacagccccaggaacttcagccccaatgccccagcccacttctcctttgtgcctgcccggaggacagatggaagacgctggagcctggccagcctgcccagcagcggctacggcaccaacacccccagcagcacagtgagcagcagctgcagcagccaggagaagctgcaccagctgcccttccagcccacagcagatgagctgcacttcctgaccaagcacttcagcacagaatctgtgcctgatgaggagggccggcagagccctgccatgaggcccaggagccgcagcctgagccctggccgcagccctgtgtcctttgattctgagatcatcatgatgaaccacgtgtacaaggagcgcttccccaaggcccacgagaggtctgagagcagcgaggtggcctttgtgatgcagctggtgaagaagctgatgatcatcatcgcccggcctgcccggctgctggagtgcctggagtttgatcctgaggagttctaccacctgctggaggccgctgagggccacgccaaggagggccagggcatcaagtgtgacatcccccgctacatcgtgtcccagctgggcctgacccgggaccccctggaggagatggcccagctgagcagctgtgacagcccagacaccccagagacagatgacagcattgagggccatggagccagcctgcccagcaagaagacccccagcgaggaggactttgagaccatcaagctgatcagcaatggagcctatggagctgtgttcctggtgcgccacaagagcacccggcagagatttgccatgaagaagatcaacaagcagaacctgatcctgaggaaccagatccagcaggcctttgtggagcgggacatcctgacctttgctgagaacccctttgtggtgtccatgttctgcagctttgacaccaagaggcacctgtgcatggtgatggagtatgtggagggcggggactgtgccaccctgctgaagaacatcggggccctgcctgtggacatggtgcggctgtactttgctgagaccgtgctggccctggagtacctgcacaactatggaattgtgcaccgggacctgaagccagacaacctgctgatcacctccatgggccacatcaagctgacagactttggcctgagcaagattggcctgatgagcctgaccaccaacctgtatgagggccacatcgagaaggatgcccgggagttcctggacaagcaggtgtgtggcaccccagagtacatcgcccctgaggtgatcctgcggcagggctacggcaagcctgtggactggtgggccatgggcatcatcctgtatgagttcctggtgggctgtgtgcccttcttcggggacaccccagaggagctgtttggccaggtgatcagtgatgagatcgtgtggccagaaggagatgaggccctgcccccagatgcccaggacctgaccagcaagctgctgcaccagaaccccctggagcggctgggcactggaagtgcctatgaggtgaagcagcaccccttcttcaccggcctggactggacaggcctgctgcggcagaaggccgagttcatcccccagctggagagtgaagatgacaccagctactttgacaccaggtctgagcgctaccaccacatggattctgaagatgaggaggaggtgtctgaagatggctgcctggagatccggcagttcagcagctgcagcccccgcttcaacaaggtgtacagctccatggagcggctgagcctgctggaggagaggaggaccccaccacccaccaagaggagcctgtctgaggagaaggaggaccacagtgatggcctggccggcctgaagggccgggaccgctcctgggtgattggcagccctgagatcctgaggaagaggctgtctgtgtctgagagcagccacacagaaagtgacagcagcccccccatgacagtgagaagacgctgcagcggcctgctggatgccccccgcttccctgagggccctgaggaggccagcagcaccctgcggcggcagccccaggagggcatctgggtgctgaccccaccttctggagagggcgtgtctggccctgtgacagagcacagcggggagcagaggcccaagctggatgaggaggccgtgggccgcagcagcggcagcagccctgccatggagacccggggccggggcaccagccagctggccgagggcgccacagccaaggccatcagtgacctggccgtgcggcgggcccggcaccggctgctgagcggggacagcacagagaagaggacagcccggcctgtgaacaaggtgatcaagagcgccagcgccacagccctgagcctgctgatccccagcgagcaccacacctgcagccccctggccagccccatgagcccccacagccagagcagcaaccccagcagccgggacagcagcccctacggcttcaccctgcgggccatccgggtgtacatgggagacagtgatgtgtacacagtgcaccacatggtgtggcacgtggaggatggcggccctgccagcgaggccggcctgcggcagggcgacctgatcacccacgtgaatggagagcctgtgcacggcctggtgcacacagaggtggtggagctgatcctgaagagcggcaacaaggtggccatcagcaccacccccctggagaacaccagcatcaaggtgggccctgccaggaagggcagctacaaggccaagatggcccggcgcagcaagaggagccggggcaaggatggccaggagagcaggaagaggagcagcctcttcaggaagatcaccaagcaggccagcctgctgcacaccagccgcagcctgagcagcctgaacagaagcctgagcagcggggagagcggccctggcagccccacccacagccacagcctgagccccaggagccccacccagggctacagagtgaccccagatgctgtgcacagcgagctgagccggcccaagtctgctgagccccccaggagccccctgctgaagagggtgcagagcgctgagaagctggccgccgccctggccgccagcgagaagaagctggccaccagcaggaagcacagcctggacctgccccacagcgagctgaagaaggagctgcccccccgggaggtgagccccctggaggtggtgggcgcccggtctgtgctgtctggaaaaggagccctgcctggaaaaggagtgctgcagcctgcccccagccgggccctgggcaccctgcggcaggacagagctgagcggcgggagagcctgcagaagcaggaggccatccgggaggtggacagcagtgaagatgacacagaggagggccctgagaacagccagggcgcccaggagctgagcctggccccccaccctgaggtgtcccagagcgtggcccccaagggggccggggagagcggggaggaggaccccttccccagccgggaccccaggagcctgggccccatggtgcccagcctgctgaccggcatcaccctgggcccccccaggatggagagccccagcggcccccaccggcggctgggcagcccccaggccatcgaggaggccgccagcagcagcagcgctggccccaacctgggccagagcggggccacagaccccatccccccagagggctgctggaaggcccagcacctgcacacccaggccctgacagccctgagccccagcaccagcggcctgacccccaccagcagctgcagcccccccagcagcaccagcggcaagctgtccatgtggagctggaagagcctcatcgagggccctgaccgggccagccccagcaggaaggccaccatggccggcggcctggccaacctgcaggacctggagaacaccaccccagcccagcccaagaacctgagcccccgggagcagggcaagacccagcccccatctgccccccggctggcccaccccagctatgaggaccccagccagggctggctgtgggagagtgaatgtgcccaggccgtgaaggaggaccctgccctgagcatcacccaggtgcctgatgccagcggggaccggcggcaggatgtgccctgccggggctgccccctgacccagaagtctgagcccagcctgcggcggggccaggagcccggcggccaccagaagcaccgggacctggccctggtgcctgatgagctgctgaagcagacctag

SEQ ID NO: 159737 - DNA, 1893 bp, synthetic construct
  misc_feature 1..1893: note = Description of Artificial Sequence: Synthetic coding sequence
  source 1..1893: mol_type = other DNA
atgaggcccaggagccgcagcctgagccctggccgcagccctgtgtcctttgattctgagatcatcatgatgaaccacgtgtacaaggagcgcttccccaaggccacagcccagatggaggagcggctggccgagttcatcagcagcaacaccccagacagcgtgctgcccctggctgatggagccctgtccttcatccaccaccaggtgattgagatggcccgggactgcctggacaagagccgcagcggcctcatcaccagccagtacttctatgagctgcaggacaacctggagaagctgctgcaggatgaatttgatcctgaggagttctaccacctgctggaggccgctgagggccacgccaaggagggccagggcatcaagtgtgacatcccccgctacatcgtgtcccagctgggcctgacccgggaccccctggaggagatggcccagctgagcagctgtgacagcccagacaccccagagacagatgacagcattgagggccatggagccagcctgcccagcaagaagacccccagcgaggaggactttgagaccatcaagctgatcagcaatggagcctatggagctgtgttcctggtgcgccacaagagcacccggcagagatttgccatgaagaagatcaacaagcagaacctgatcctgaggaaccagatccagcaggcctttgtggagcgggacatcctgacctttgctgagaacccctttgtggtgtccatgttctgcagctttgacaccaagaggcacctgtgcatggtgatggagtatgtggagggcggggactgtgccaccctgctgaagaacatcggggccctgcctgtggacatggtgcggctgtactttgctgagaccgtgctggccctggagtacctgcacaactatggaattgtgcaccgggacctgaagccagacaacctgctgatcacctccatgggccacatcaagctgacagactttggcctgagcaagattggcctgatgagcctgaccaccaacctgtatgagggccacatcgagaaggatgcccgggagttcctggacaagcaggtgtgtggcaccccagagtacatcgcccctgaggtgatcctgcggcagggctacggcaagcctgtggactggtgggccatgggcatcatcctgtatgagttcctggtgggctgtgtgcccttcttcggggacaccccagaggagctgtttggccaggtgatcagtgatgagatcgtgtggccagaaggagatgaggccctgcccccagatgcccaggacctgaccagcaagctgctgcaccagaaccccctggagcggctgggcactggaagtgcctatgaggtgaagcagcaccccttcttcaccggcctggactggacaggcctgctgcggcagaaggccgagttcatcccccagctggagagtgaagatgacaccagctactttgacaccaggtctgagcgctaccaccacatggattctgaagatgaggaggaggtgtctgaagatggctgcctggagatccggcagttcagcagctgcagcccccgcttcaacaaggtgtacagctccatggagcggctgagcctgctggaggagaggaggaccccaccacccaccaagaggagcctgtctgaggagaaggaggaccacagtgatggcctggccggcctgaagggccgggaccgctcctgggtgattggcagccctgagatcctgaggaagaggctgtctgtgtctgagagcagcctgctgaaggtggccggccggcccagcaccttcagccagcacttcggcacccacccccaccagcagctgctgagcagccagctgcacctgtgggaggccgagcacgtggtgctggagatcccctactag

SEQ ID NO: 159738 - DNA, 1035 bp, synthetic construct
  misc_feature 1..1035: note = Description of Artificial Sequence: Synthetic coding sequence
  source 1..1035: mol_type = other DNA
atggatgacagcagcatcctgcggcggcggggcctgcagaaggagctgagcctgccccggcggggcagcttctgcaggaccagcaacaggaagagcctcatcgtgaccagcagcaccagccccaccctgccccggccccacagccccctgcacggccacacaggcaacagccccctggacagccccaggaacttcagccccaatgccccagcccacttctcctttgtgcctgcccggagccacagccacagagctgacagaacagatggaagacgctggagcctggccagcctgcccagcagcggctacggcaccaacacccccagcagcacagtgagcagcagctgcagcagccaggagaagctgcaccagctgcccttccagcccacagcagatgagctgcacttcctgaccaagcacttcagcacagaatctgtgcctgatgaggagggccggcagagccctgccatgaggcctgcccccagccgggccctgggcaccctgcggcaggacagagctgagcggcgggagagcctgcagaagcaggaggccatccgggaggtggacagcagtgaagatgacacagaggagggccctgagaacagccagggcgcccaggagctgagcctggccccccaccctgaggtgtcccagagcgtggcccccaagggagctggggagagcggggaggaggaccccttccccagccgggaccccaggagcctgggccccatggtgcccagcctgctgaccggcatcaccctgggcccccccaggatggagagccccagcggcccccaccggcggctgggcagcccccaggccatcgaggaggccgccagcagcagcagcgctggccccaacctgggccagagcggggccacagaccccatccccccagagggctgctggaaggcccagcacctgcacacccaggccctgacagccctgagccccagcaccagcggcctggcccacctgatgaggatcccagcccgggccggctacggcagcctgtctgtgcacaagcagtag

SEQ ID NO: 159739 - DNA, 3930 bp, synthetic construct
  misc_feature 1..3930: note = Description of Artificial Sequence: Synthetic coding sequence
  source 1..3930: mol_type = other DNA
atggatgagagcagcctgctgcggcggcggggcctgcagaaggagctgagcctgccccggcggggccggggctgccgcagcggcaacaggaagagcctggtggtgggcacccccagccccaccctgagccggcccctgagccccctgtctgtgcccacagctggcagcagccccctggacagccccaggaacttctctgctgccagcgccctgaacttcccctttgccaggagagcagatggccgccgctggagcctggccagcctgcccagcagcggctacggcaccaacacccccagcagcaccctgagcagcagcagcagcagccgggagcggctgcaccagctgcccttccagcccaccccagatgagctgcacttcctgagcaagcacttccgcagcagtgaaaatgtgctggatgaggagggcggccgcagcccccggctgcggcccaggagccgcagcctgagccctggccgggccaccggcacctttgacaatgaaattgtgatgatgaaccacgtgtaccgggagcgcttccccaaggccacagcccagatggagggccgcctgcaggagttcctgacagcctatgcccctggggcccggctggccctggctgatggagtgctgggcttcatccaccaccagatcgtggagctggcccgggactgcctggccaagtctggagagaacctggtgaccagccgctacttcctggagatgcaggagaagctggagcggctgctgcaggatgcccacgagaggagtgacagcgaggaggtgtccttcatcgtgcagctggtgaggaagctgctgatcatcatcagcaggcctgcccggctgctggagtgcctggagtttgatcctgaggagttctaccacctgctggaggccgctgagggccacgcccgggagggccagggcatcaagacagacctgccccagtacatcatcggccagctgggcctggccaaggaccccctggaggagatggtgcccctgagccacctggaggaggagcagcccccagcccctgagagccctgagagccgggccctggtgggccagagcaggaggaagccctgtgagagtgactttgagaccatcaagctgatcagcaatggagcctacggggctgtgtacctggtgcgccaccgggacacccggcagagatttgccatcaagaagatcaacaagcagaacctgatcctgaggaaccagatccagcaggtgtttgtggagcgggacatcctgacctttgctgagaacccctttgtggtgtccatgttctgcagctttgagaccaggaggcacctgtgcatggtgatggagtatgtggagggcggggactgtgccaccctgctgaagaacatgggccccctgcctgtggacatggcccggctgtactttgctgagaccgtgctggccctggagtacctgcacaactacggcatcgtgcaccgggacctgaagccagacaacctgctgatcaccagcctgggccacatcaagctgacagactttggcctgagcaagattggcctgatgtccatggccaccaacctgtatgagggccacatcgagaaggatgcccgggagttcatcgacaagcaggtgtgtggcaccccagagtacatcgcccctgaggtgatcttccggcagggctacggcaagcctgtggactggtgggccatgggcgtggtgctgtatgagttcctggtgggctgtgtgcccttctttggagacaccccagaggagctgtttggccaggtggtgtctgatgagatcatgtggccagaaggagatgaggccctgcctgcagatgcccaggacctgatcacccggctgctgcggcagagccccctggaccggctgggcaccggcggcacccatgaggtgaagcagcaccccttcttcctggccctggactgggccggcctgctgcggcacaaggccgagtttgtgccccagctggaggccgaggatgacaccagctactttgacaccaggtctgagcgctaccgccacctgggctctgaagatgatgagaccaatgatgaggagagcagcacagagatcccccagttcagcagctgcagccaccgcttcagcaaggtgtacagcagcagcgagttcctggccgtgcagcccacccccacctttgctgagaggagcttctctgaagatcgggaggagggctgggagaggtctgaggtggactatggccggcggctgtctgctgacatccggctgcgctcctggaccagcagcggcagcagctgccagagcagcagcagccagcctgagcggggccccagccccagcctgctgaacaccatcagcctggacaccatgcccaagtttgccttcagcagtgaagatgaaggagtgggccctggccctgctggccccaagaggcctgtgttcatcctgggggagccagaccccccacctgctgccacccctgtgatgcccaagcccagcagcctgtctgctgacacagctgccctgagccacgcccggctgcggagcaacagcatcggggcccggcacagcaccccccggcccctggatgctggccggggccggcggctgggcggcccccgggaccctgcccctgagaagagccgggccagcagcagcggcggcagcggcggcggcagcggcggccgggtgcccaagagcgcctctgtgtctgccctgagcctcatcatcacagcagatgatggcagcggcggccccctgatgagccccctgagccccaggagcctgagcagcaaccccagcagccgggacagcagccccagccgggaccccagccctgtgtgtggcagcctgcggccccccatcgtcatccacagcagcggcaagaagtatggcttcagcctgcgggccatccgggtgtacatgggagacagtgatgtgtacacagtgcaccacgtggtgtggagcgtggaggatggcagccctgcccaggaggccggcctgcgggccggggacctgatcacccacatcaatggagagagcgtgctgggcctggtgcacatggatgtggtggagctgctgctgaagagcggcaacaagatcagcctgcggaccacagccctggagaacaccagcatcaaggtgggccctgccaggaagaatgtggccaagggccgcatggcccggcgcagcaagaggagcagaagaagagagacccaggacaggaggaagagcctcttcaagaagatcagcaagcagacctctgtgctgcacaccagccgctccttcagcagcggcctgcaccacagcctgagcagcagcgagagcctgcccggcagccccacccacagcctgagccccagccccaccaccccctgccgcagccctgccccagatgtgcctgctgacaccacagccagccccccatctgccagccccagcagcagcagccctgccagccctgctgctgctggccacacccggcccagcagcctgcacggcctggccgccaagctgggccccccccggcccaagacaggaagaaggaagagcaccagcagcatcccccccagccccctggcctgcccccccatcagcgcccccccacccaggagccccagccccctgcccggccaccccccagccccagcccggagcccccggctgcggcggggccagagcgctgacaagctgggcactggagagcggctggatggagaggccggccgccgcacccggggccctgaggccgagctggtggtgatgaggcggctgcacctgtctgaaagaagagacagcttcaagaagcaggaggccgtgcaggaggtgtcctttgatgagccccaggaggaggccaccggcctgcccacctctgtgccccagattgctgtggagggggaggaggccgtgcctgtggccctgggccccaccggccgggactag

SEQ ID NO: 159740 - DNA, 2523 bp, synthetic construct
  misc_feature 1..2523: note = Description of Artificial Sequence: Synthetic coding sequence
  source 1..2523: mol_type = other DNA
atggaccccacagctggcagcaagaaggagcccggcggcggggccgccacagaggagggcgtgaacagaattgctgtgcccaagcccccatccattgaggagttcagcatcgtgaagcccatcagcagaggagccttcggcaaggtgtacctgggccagaagggcggcaagctgtatgctgtgaaggtggtgaagaaggctgacatgatcaacaagaacatgacccaccaggtgcaggccgagagagatgccctggccctgagcaagagccccttcatcgtgcacctgtactacagcctgcagagcgccaacaacgtgtacctggtgatggagtacctgattggaggagatgtgaagagcctgctgcacatctacggctactttgatgaggagatggctgtgaagtacatcagcgaggtggccctggccctggactacctgcaccgccacggcatcatccaccgggacctgaagccagacaacatgctgatcagcaatgaaggccacatcaagctgacagactttggcctgagcaaggtgaccctgaacagagacatcaacatgatggacatcctgaccacccccagcatggccaagccccggcaggactacagcaggaccccaggccaggtgctgagcctcatcagcagcctgggcttcaacacccccatcgccgagaagaaccaggaccctgccaacatcctgagcgcctgcctgtctgagaccagccagctgagccagggcctggtgtgccccatgtctgtggaccagaaggacaccaccccctacagcagcaagctgctgaagagctgcctggagaccgtggccagcaaccctggcatgcctgtgaagtgcctgaccagcaacctgctgcagagcaggaagaggctggccaccagcagcgccagcagccagagccacaccttcatcagctctgtggagagcgagtgccacagcagccccaagtgggagaaggactgccaggagagtgatgaggccctgggccccaccatgatgtcctggaatgctgtggagaagctgtgtgccaagagcgccaatgccatcgagaccaagggcttcaacaagaaggacctggagctggccctgagccccatccacaacagcagcgccctgcccaccaccggccgcagctgtgtgaacctggccaagaagtgcttcagcggggaggtgtcctgggaggccgtggagctggatgtgaacaacatcaacatggacacagacaccagccagctgggcttccaccagagcaaccagtgggccgtggacagcggcggcatcagcgaggagcacctgggcaagaggagcctgaagaggaactttgagctggtggacagcagcccctgcaagaagatcatccagaacaagaagacctgtgtggagtacaagcacaatgagatgaccaactgctacaccaaccagaacacaggcctgactgtggaggtgcaggacctgaagctgtctgtgcacaagagccagcagaatgactgtgccaacaaggaaaatattgtgaacagcttcacagacaagcagcagaccccagagaagctgcccatccccatgattgccaagaacctgatgtgtgagctggatgaggactgtgagaagaacagcaagagggactacctgagcagcagcttcctgtgcagtgatgatgaccgggccagcaagaacatctccatgaacagcgacagcagcttccctggcatcagcatcatggagagccccctggagagccagcccctggacagcgacaggagcatcaaggagagcagctttgaggagagcaacatcgaggaccccctgattgtgaccccagactgccaggagaagaccagccccaagggcgtggagaacccagctgtgcaggagagcaaccagaagatgctgggcccccccctggaggtgctgaagaccctggccagcaagagaaatgctgtggccttccgctccttcaacagccacatcaatgccagcaacaacagcgagcccagcaggatgaacatgaccagcctggatgccatggacatcagctgtgcctacagcggcagctaccccatggccatcacccccacccagaagagaagaagctgcatgccccaccagacccccaaccagatcaagagcggcaccccctaccgcacccccaagtctgtgcggcggggcgtggcccctgtggatgatggccgcatcctgggcaccccagactacctggcccctgagctgctgctgggccgggcccatgacatcccctggccagagggggaggagaagctgagtgacaatgcccagagcgctgtggagatcctgctgaccattgatgacaccaagagagctggcatgaaggagctgaagaggcaccccctcttcagtgatgtggactgggagaacctgcagcaccagaccatgcccttcatcccccagccagatgatgaaacagacaccagctactttgaggccaggaacacagcccagcacctgactgtgtctggcttcagcctgtag

SEQ ID NO: 159741 - DNA, 2640 bp, synthetic construct
  misc_feature 1..2640: note = Description of Artificial Sequence: Synthetic coding sequence
  source 1..2640: mol_type = other DNA
atggaccccacagctggcagcaagaaggagcccggcggcggggccgccacagaggagggcgtgaacagaattgctgtgcccaagcccccatccattgaggagttcagcatcgtgaagcccatcagcagaggagccttcggcaaggtgtacctgggccagaagggcggcaagctgtatgctgtgaaggtggtgaagaaggctgacatgatcaacaagaacatgacccaccaggtgcaggccgagagagatgccctggccctgagcaagagccccttcatcgtgcacctgtactacagcctgcagagcgccaacaacgtgtacctggtgatggagtacctgattggaggagatgtgaagagcctgctgcacatctacggctactttgatgaggagatggctgtgaagtacatcagcgaggtggccctggccctggactacctgcaccgccacggcatcatccaccgggacctgaagccagacaacatgctgatcagcaatgaaggccacatcaagctgacagactttggcctgagcaaggtgaccctgaacagagacatcaacatgatggacatcctgaccacccccagcatggccaagccccggcaggactacagcaggaccccaggccaggtgctgagcctcatcagcagcctgggcttcaacacccccatcgccgagaagaaccaggaccctgccaacatcctgagcgcctgcctgtctgagaccagccagctgagccagggcctggtgtgccccatgtctgtggaccagaaggacaccaccccctacagcagcaagctgctgaagagctgcctggagaccgtggccagcaaccctggcatgcctgtgaagtgcctgaccagcaacctgctgcagagcaggaagaggctggccaccagcagcgccagcagccagagccacaccttcatcagctctgtggagagcgagtgccacagcagccccaagtgggagaaggactgccaggagagtgatgaggccctgggccccaccatgatgtcctggaatgctgtggagaagctgtgtgccaagagcgccaatgccatcgagaccaagggcttcaacaagaaggacctggagctggccctgagccccatccacaacagcagcgccctgcccaccaccggccgcagctgtgtgaacctggccaagaagtgcttcagcggggaggtgtcctgggaggccgtggagctggatgtgaacaacatcaacatggacacagacaccagccagctgggcttccaccagagcaaccagtgggccgtggacagcggcggcatcagcgaggagcacctgggcaagaggagcctgaagaggaactttgagctggtggacagcagcccctgcaagaagatcatccagaacaagaagacctgtgtggagtacaagcacaatgagatgaccaactgctacaccaaccagaacacaggcctgactgtggaggtgcaggacctgaagctgtctgtgcacaagagccagcagaatgactgtgccaacaaggaaaatattgtgaacagcttcacagacaagcagcagaccccagagaagctgcccatccccatgattgccaagaacctgatgtgtgagctggatgaggactgtgagaagaacagcaagagggactacctgagcagcagcttcctgtgcagtgatgatgaccgggccagcaagaacatctccatgaacagcgacagcagcttccctggcatcagcatcatggagagccccctggagagccagcccctggacagcgacaggagcatcaaggagagcagctttgaggagagcaacatcgaggaccccctgattgtgaccccagactgccaggagaagaccagccccaagggcgtggagaacccagctgtgcaggagagcaaccagaagatgctgggcccccccctggaggtgctgaagaccctggccagcaagagaaatgctgtggccttccgctccttcaacagccacatcaatgccagcaacaacagcgagcccagcaggatgaacatgaccagcctggatgccatggacatcagctgtgcctacagcggcagctaccccatggccatcacccccacccagaagagaagaagctgcatgccccaccagcagacccccaaccagatcaagagcggcaccccctaccgcacccccaagtctgtgagaagaggagtggcccctgtggatgatggccgcatcctgggcaccccagactacctggcccctgagctgctgctgggccgggcccacggccctgctgtggactggtgggccctgggcgtgtgcctgtttgagttcctgaccggcatcccccccttcaatgatgagaccccccagcaggtgttccagaacatcctgaagagggacatcccctggccagagggggaggagaagctgagtgacaatgcccagagcgctgtggagatcctgctgaccattgatgacaccaagagagctggcatgaaggagctgaagaggcaccccctcttcagtgatgtggactgggagaacctgcagcaccagaccatgcccttcatcccccagccagatgatgaaacagacaccagctactttgaggccaggaacacagcccagcacctgactgtgtctggcttcagcctgtag

SEQ ID NO: 159742 - DNA, 2637 bp, synthetic construct
  misc_feature 1..2637: note = Description of Artificial Sequence: Synthetic coding sequence
  source 1..2637: mol_type = other DNA
atggaccccacagctggcagcaagaaggagcccggcggcggggccgccacagaggagggcgtgaacagaattgctgtgcccaagcccccatccattgaggagttcagcatcgtgaagcccatcagcagaggagccttcggcaaggtgtacctgggccagaagggcggcaagctgtatgctgtgaaggtggtgaagaaggctgacatgatcaacaagaacatgacccaccaggtgcaggccgagagagatgccctggccctgagcaagagccccttcatcgtgcacctgtactacagcctgcagagcgccaacaacgtgtacctggtgatggagtacctgattggaggagatgtgaagagcctgctgcacatctacggctactttgatgaggagatggctgtgaagtacatcagcgaggtggccctggccctggactacctgcaccgccacggcatcatccaccgggacctgaagccagacaacatgctgatcagcaatgaaggccacatcaagctgacagactttggcctgagcaaggtgaccctgaacagagacatcaacatgatggacatcctgaccacccccagcatggccaagccccggcaggactacagcaggaccccaggccaggtgctgagcctcatcagcagcctgggcttcaacacccccatcgccgagaagaaccaggaccctgccaacatcctgagcgcctgcctgtctgagaccagccagctgagccagggcctggtgtgccccatgtctgtggaccagaaggacaccaccccctacagcagcaagctgctgaagagctgcctggagaccgtggccagcaaccctggcatgcctgtgaagtgcctgaccagcaacctgctgcagagcaggaagaggctggccaccagcagcgccagcagccagagccacaccttcatcagctctgtggagagcgagtgccacagcagccccaagtgggagaaggactgccaggagagtgatgaggccctgggccccaccatgatgtcctggaatgctgtggagaagctgtgtgccaagagcgccaatgccatcgagaccaagggcttcaacaagaaggacctggagctggccctgagccccatccacaacagcagcgccctgcccaccaccggccgcagctgtgtgaacctggccaagaagtgcttcagcggggaggtgtcctgggaggccgtggagctggatgtgaacaacatcaacatggacacagacaccagccagctgggcttccaccagagcaaccagtgggccgtggacagcggcggcatcagcgaggagcacctgggcaagaggagcctgaagaggaactttgagctggtggacagcagcccctgcaagaagatcatccagaacaagaagacctgtgtggagtacaagcacaatgagatgaccaactgctacaccaaccagaacacaggcctgactgtggaggtgcaggacctgaagctgtctgtgcacaagagccagcagaatgactgtgccaacaaggaaaatattgtgaacagcttcacagacaagcagcagaccccagagaagctgcccatccccatgattgccaagaacctgatgtgtgagctggatgaggactgtgagaagaacagcaagagggactacctgagcagcagcttcctgtgcagtgatgatgaccgggccagcaagaacatctccatgaacagcgacagcagcttccctggcatcagcatcatggagagccccctggagagccagcccctggacagcgacaggagcatcaaggagagcagctttgaggagagcaacatcgaggaccccctgattgtgaccccagactgccaggagaagaccagccccaagggcgtggagaacccagctgtgcaggagagcaaccagaagatgctgggcccccccctggaggtgctgaagaccctggccagcaagagaaatgctgtggccttccgctccttcaacagccacatcaatgccagcaacaacagcgagcccagcaggatgaacatgaccagcctggatgccatggacatcagctgtgcctacagcggcagctaccccatggccatcacccccacccagaagagaagaagctgcatgccccaccagacccccaaccagatcaagagcggcaccccctaccgcacccccaagtctgtgcggcggggcgtggcccctgtggatgatggccgcatcctgggcaccccagactacctggcccctgagctgctgctgggccgggcccacggccctgctgtggactggtgggccctgggcgtgtgcctgtttgagttcctgaccggcatcccccccttcaatgatgagaccccccagcaggtgttccagaacatcctgaagagggacatcccctggccagagggggaggagaagctgagtgacaatgcccagagcgctgtggagatcctgctgaccattgatgacaccaagagagctggcatgaaggagctgaagaggcaccccctcttcagtgatgtggactgggagaacctgcagcaccagaccatgcccttcatcccccagccagatgatgaaacagacaccagctactttgaggccaggaacacagcccagcacctgactgtgtctggcttcagcctgtag

SEQ ID NO: 159743 - DNA, 17817 bp, synthetic construct
  misc_feature 1..17817: note = Description of Artificial Sequence: Synthetic coding sequence
  source 1..17817: mol_type = other DNA
atgcagaagggcctgctggaccaggacaccggcctggtgctgctggagagccaggtgatcatgagcggcctgattgcccctgagactggagagaacctgagcctggaggagggcatcgccaggaacctgatcaacccccagatgtaccagcagctgcgggagctgcaggatgccctggccctgatcagccggctgacagagagccggggccccctgtctgtggtggaggccatcgagaagaggatcatcagcgagaccgtgggcctgaagatcctggaggcccacctggccaccggcggcttcagcctgagccccagcgagaactgcatcaacctggaggaggccttccaccagggcctcatcagcgcctggctgcacagcgtgctggagagctacctgcggaccagcaagaacctgattgaccccaacacagctgagaagattggcctgctggacctgatgcagcgctgcatcgtgcaccaggagagcggcttcaagctgctgcctgtgaagcagctggccggcggcatggtgtccctgaagagcggcaggaaggtgtccatcttccgggctgtgcaggagggcctgattgaccggcaggtgacagtgcggctgctggaggcccagctgtttgctgggggcatcgtggaccccaggacaggccaccggctgactgtggaggaggccgtgcgccacaacctgattgaccaggacatggcctgtgccatcctgatccggcagctgcagacaggaggcatcatcgacacagtgacaggccagaggctgaccattgatgaagctgtgtccaatgacctggtggccgccaagatcgccctggtgatcctggagagcctgtggagcttcatgggcctgctgtggccagagagcggggagatcctgcccatcacagatgccctggagcagggcatcgtgtccacagagctggcccacaagatcctgagcaaccggcagcacatcaaggccctcttcctgcctgccaccacagagatcctgtcctggaagaaggccatcgagagcggcatcctggaccgggacctggccaacaacctgaagagcatctgcatcccagatgtgatgccccacatgcagctggccgacagcgctgagcagaacatcaaccctggagctgctgtgctgccctgcagcaagagccaccccaaggccacagccagccagagcgagaacctgctcttccagctgatgacccacagctacatcaacgtgcagaatggccagaggctgctgctgctggacaaggagctgatggagaccctgaccagcagagatgagtaccagaccagcccccccaaggtggtggagatcggccaccagaggcagaagaccccagagggcctgcaggagagcgccaacgtgaagatcagcggcaccttcagcagcggctggacagtgcggctgcctgagttccagttcagcagccagaacaaggagtacccagaccgggaggactgcaccacagagaagggcaagaagaccaccgtggagacagaggacagctctgtggagaaccctgagcaggacctgtttgtggagcagaaggagaggaaccccaacattgatgccctgaaggtgatcaacaaggtgaagctggaggtgcagaggcagctgattggcacccagcgggaggaccagacagctgtgtctgtgcgggagaatgccagccggggccacctgctgaccatccccccagctgaggccgagggcgtgcccctggtggtggacaaggatgtgttttctgtggagacccccaagaaggagcaccagcccctgaggaacaccagcttcacctgccagaatgagcaggcccacaccctggagacagagtacatccatgatgaaacaggaggcagccacatcaagccccagagcaagaagctgcaggtgcaggtgaagaagaccctgggcatcaagctggagctgaagtcagaaacagatggaaatgtgcaccccctggacaagaaggagatgctgaagaagaccttcctggccaaggatgaccacaaggagagccaggaggcccagaacattgctgggggctccatgatgatgtctgagaagacagatgaagaagattctggccgggagatcttcctgagctgcagccaccccctggagctgctggaggaggccaccctgaatgtgctgagcgcccagctgctggatggcggcatcttccacgagcagacaggccagaagctgctgctgaatgaggccatcagccggggcatcgtgcccagccacacagctgtgaagctgatggagaagctgaacatgttccagggcttctttgacagccagacctgtgagagcctgaccacagaggaggtgatcaatgaaggcctgatggatgagaagctgctgcacaacgtgctgatggctgacaaggccatctctggagtgctggaccccaggacccagaccctgtgcagcgtgaaggatgctgtgacagtgggcctgctggacaaggagacagccacccgcatcctggagcggcaggtggtgactggaggcatcatcgacctgaagaggggcaagaaggtgtctgtgaccctggccagcaccctgggcctggtggatgtggccgaccagcctgagctgatcaacctggagaaggccagcaagggcagagatgctgagaagacagtgcgggagcggctcatcagcctgcagatggagaccaccggcctgattgatcctgacagcaaggcccccctgactgtggtgcagagcattgaccggggcctgctggagcgggaggaggccgtgcggctgctgaccaagcaggtggtggatggcggcatcatccaccacatcagcggcatgaggctgtctgtggacaatgccttccgccacggcctgattggagaggacctggccgagaagctgaagagggtggagaacctgaacatccaccagatcttcaaccctgagaccaaggagaacatcagcctgcccaaggccatcaagctggacctgatcaccagtgacctgaagcgggagatccaggaggtgcaggccttcaccggcaactttgtggacctgatcagcggccagaggctgaccctggccgaggccaagaaggagggcctgctgaccaatgaggccgtgctgagccctggcatgatgcacggcatcgtggaccctgagaactgccgcatcgtgccctacagcgagctggtgaagaagtgcaagattgacatcgagagcggccagcgctacctggaggtgatccccttcagtgacatcaaggatggagtgtctgacaaggtgctgaccctgagccaggccatccagctgggcaaggtggactttgccagcaccctgaaggtgctggaggcccaggccaacacaggaggcatcatcgacacagccaccgggaagaggctgaccctggccagcgccctggaggagaagctggtggatgagaacatggtgcgcatcatcgccagccaccaggtgctgaatggaggcatcgtggacatcttcagtgaccagagggtgaccctggtggaggccatcgagaagaggctcatcagccctgagctggccaacatgatccagattgacagcagcgagttcagtgaccaccgggcccagatcgagaagcaggagggcatcgaggtgtgtgccctgcagaatgagttcctgggcaaggacatgctgattgcctgcaaccagacagctgagatgagctgcaacaaggtggaggagagcgagcggctcttccaggtggagaaccagagcgcccaggagaaggtgaaggtgcgggtgtctgatggagagcaggccaagaagagccgggagatcagcctgaaggagtttggctgcaaggaccagaggaagcccaggatgagcagtgatgccaaggagttcatcagcatcatcaacccccacaacctgaagggcaagagcctgggccaggtgtccctgacccacccctacagtgaatgtgacttcaagctgaaggaggtggccaggaacaacatgggaaatgacaccaatgaggagcaggagaaggctgtgaccaagattgagatcatcagccacatgaagcagagcaccagctgcctggacagcgaggagatccgggagaaccagggcgaggtgatcctggaggtgcaggagacctactgtgagaccagcggcaagctgcccagcgagcaggtgctgcagcagcccatgaatgcccgggtgaagagcaagcgggagaagcgggaggtgattgtggaggagagcatccgcacctgcaagccagccttcctgtctgaggagaagctgtaccaggagacagccatcagagatgaacatgacagccacatcaagagccagccccgggagatgaccagcagcgagaagggcaaggaggccgacacagagatgggcttcagcatcaccttcaagattgaggagagcagcagccaggtggtgccccagggcatctctgtgaagcacctggatgccctgaccctcttcagcagcaagcaggccaatgaaggcaaggtgaacaacctgagcctgtgcctgaccctgaagccagaggagaacctgagccgggagatcgcctgtggggcccagagcgagcccttcccctgcatgacccccaggcctgagggcctgcactaccaggagagtgatggcaaggcccaggtgacaggccccagccagatcagcaagacagacaagagcttccagggcaccacccggcaggagaccaactaccaggacagctgggtgaccagcaagaccaaggagaccaagcaccagatcagcagcagcaatgaatgcaaggagaagagctaccaggaggtgtcctttgatcctgcccggggcctgaagctggaggagatcaccgtgtccaggccagacagcaaggaggtgcgctacctggagttcagtgacaggaaggacctgcaccaccagggcagcaagagtgatgacaagctgtgtggcaccctgaagtcagaaattgccacccaggagctgactggagagaagttcctggagatggccaaccccaacgtggccggcctggaggccggcagcattgaggacatcgtgacccagaggggcagccgggtgctgggcagcttcctgcctgagaagctgttcaagggcgtgtcccagaaggaaaatacaggccagcagaatgccatcatcagccccaccgtgctggagaccagcgaggagaagacagtgtccctgactgtgtgcagcgctgtgaagacagagaagaccccccaggagaagctgcgggagagccctggcagcgagcagacccccttcatgacagcccctgagggcaaaggaaatggaggagtgaaccctgagcccttccgggccacccagaatgtgttcacccggcagctgtgcctggagcatgatgagaagctggtgtcctacctgagcctgctgaggaacatcgagatgaggaccaagcagatccagcccctggagctgaacctggccgagctgcaggacctgctgtgccaggccaaggtgctggagcgggagctgaaggacctgaccaccctggtgtcccaggagctggagtgtgtgaaccagatcatcatcagccagccccaggaggtgcctgcccagctgctgaaggccctggagaaggatgccaagaacctgcagaagagcctgagctctgtgtctgacacctggaacagccggctgctgcacttccagaatgctgtggagattgagaagaccaaggtgctgaaccagcacacccagctggagggccgcctgcaggacctgcgggcctgggtgggcaacaagaacctgatcctgaacagcaagggcagcaacagcgagattgatgtggacagcctgaacctgtgcctgcagcagtatgaggacctgaagcagcccatggccgagaggaaggcccagctggatgccctggcctttgacatccagttcttcatcagcgagcacgcccaggacctgagcccccagcagaaccggcagatgctgcggctgctgaatgagctgcagaggagcttccaggacatcctggagcagacagctgcccaggtggatgccctgcagggccacctgcagcagatggagcaggaggccctggtgaagaccctgcagaagcagcagaacacctgccaccagcagctggaggacctgtgctcctgggtgggccaggccgagcgggccctggccggccaccagggccgcaccacccagcaggacctgagcgccctgcagaagaaccagagcgacctgaaggacctgcaggatgacatccagaacagagccaccagctttgccaccgtggtgaaggacatcgagggcttcatggaggagaaccagaccaagctgagcccccgggagctgacagccctgcgggagaagctgcaccaggccaaggagcagtatgaggccctgcaggaggagaccagggtggcccagaaggagctggaggaggccgtgaccagcgccctgcagcaggagacagagaagagcaaggccgccaaggagctggccgagaacaagaagaagattgatgccctgctggactgggtgacctctgtgggcagcagcggcggccagctgctgaccaacctgcccggcatggagcagctgagcggggccagcctggagaagggggccctggacaccacagatggctacatgggcgtgaaccaggcccctgagaagctggacaagcagtgtgagatgatgaaggcccggcaccaggagctgctgagccagcagcagaacttcatcctggccacccagagcgcccaggccttcctggaccagcacggccacaacctgaccccagaggagcagcagatgctgcagcagaagctgggggagctgaaggagcagtacagcaccagcctggcccagagcgaggccgagctgaagcaggtgcagaccctgcaggatgagctgcagaagttcctgcaggaccacaaggagtttgagagctggctggagaggtctgagaaggagctggagaacatgcacaagggcggcagcagccctgagaccctgcccagcctgctgaagaggcagggcagcttctctgaagatgtgatcagccacaagggggacctgcgctttgtgaccatcagcggccagaaggtgctggacatggagaacagcttcaaggagggcaaggagcccagcgagatcggcaacctggtgaaggacaagctgaaggatgccacagagcgctacacagccctgcacagcaagtgcacccggctgggcagccacctgaacatgctgctgggccagtaccaccagttccagaacagcgctgacagcctgcaggcctggatgcaggcctgtgaggccaacgtggagaagctgctgagtgacacagtggccagtgaccccggggtgctgcaggagcagctggccaccaccaagcagctgcaggaggagctggccgagcaccaggtgcctgtggagaagctgcagaaggtggcccgggacatcatggagattgaaggagagcccgccccagaccaccgccacgtgcaggagaccacagacagcatcctgagccacttccagagcctgagctacagcctggccgagaggagcagcctgctgcagaaggccatcgcccagagccagagcgtgcaggagagcctggagagcctgctgcagagcattggagaggtggagcagaacctggagggcaagcaggtgagcagcctgagcagcggggtcatccaggaggccctggccaccaacatgaagctgaagcaggacatcgcccggcagaagagcagcctggaggccacccgggagatggtgacccgcttcatggagacagctgacagcaccacagctgctgtgctgcagggcaagctggccgaggtgtcccagagatttgagcagctgtgcctgcagcagcaggagaaggagagcagcctgaagaagctgctgccccaggccgagatgtttgagcacctgagcggcaagctgcagcagttcatggagaacaagagcaggatgctggccagcggcaaccagcctgaccaggacatcacccacttcttccagcagatccaggagctgaacctggagatggaggaccagcaggagaacctggacaccctggagcacctggtgacagagctgagcagctgtggctttgccctggacctgtgccagcaccaggacagagtgcagaacctgaggaaggacttcacagagctgcagaagacagtgaaggagcgggagaaggatgccagcagctgccaggagcagctggatgagttcaggaagctggtgaggaccttccagaagtggctgaaggagacagagggcagcatccccccaacagagacctccatgtctgccaaggagctggagaagcagatcgagcacctgaagagcctgctggatgactgggccagcaagggcaccctggtggaggagatcaactgcaagggcaccagcctggagaacctgatcatggagatcacagccccagacagccagggcaagacaggcagcatcctgcccagcgtgggcagctctgtgggctctgtgaatggctaccacacctgcaaggacctgacagagatccagtgtgacatgtctgatgtgaacctgaagtatgagaagctgggcggcgtgctgcacgagcggcaggagagcctgcaggccatcctgaacaggatggaggaggtgcacaaggaggccaacagcgtgctgcagtggctggagagcaaggaggaggtgctgaagtccatggatgccatgagcagccccaccaagacagaaacagtgaaggcccaggccgagagcaacaaggccttcctggccgagctggagcagaacagccccaagatccagaaggtgaaggaggccctggccggcctgctggtgacctaccccaacagccaggaggccgagaactggaagaagatccaggaggagctgaacagccgctgggagcgggccacagaggtgacagtggcccggcagaggcagctggaggagagcgccagccacctggcctgcttccaggccgctgagagccagctgcggccctggctgatggagaaggagctgatgatgggcgtgctgggccccctgagcattgaccccaacatgctgaatgcccagaagcagcaggtgcagttcatgctgaaggagtttgaggcccggcggcagcagcacgagcagctgaatgaagctgcccagggcatcctgactggacctggagatgtgtccctgagcaccagccaggtgcagaaggagctgcagagcatcaaccagaagtgggtggagctgacagacaagctgaacagccgcagcagccagattgaccaggccatcgtgaagagcacccagtaccaggagctgctgcaggacctgtctgagaaggtgcgggctgtgggccagaggctgtctgtgcagagcgccatcagcacccagcctgaggccgtgaagcagcagctggaggagaccagcgagatccgcagtgacctggagcagctggaccacgaggtgaaggaggcccagaccctgtgtgatgagctgtctgtgctgattggagagcagtacctgaaggatgagctgaagaagaggctggagaccgtggccctgcccctgcagggcctggaggacctggccgctgaccgcatcaaccggctgcaggccgccctggccagcacccagcagttccagcagatgtttgatgagctgcggacctggctggatgacaagcagagccagcaggccaagaactgccccatcagcgccaagctggagcggctgcagagccagctgcaggagaatgaggagttccagaagagcctgaaccagcacagcggcagctatgaggtgattgtggccgagggggagagcctgctgctgtctgtgcccccaggagaggagaagaggaccctgcagaaccagctggtggagctgaagaaccactgggaggagctgagcaagaagacagctgaccggcagagccggctgaaggactgcatgcagaaggcccagaagtaccagtggcacgtggaggacctggtgccctggattgaggactgcaaggccaagatgtctgagctgcgggtgaccctggaccctgtgcagctggagagcagcctgctgcggagcaaggccatgctgaatgaggtggagaagagaagaagcctgctggagatcctgaacagcgctgctgacatcctgatcaacagcagcgaggctgatgaagatggcatcagagatgagaaggccggcatcaaccagaacatggatgctgtgacagaggagctgcaggccaagacaggcagcctggaggagatgacccagaggctgcgggagttccaggagagcttcaagaacatcgagaagaaggtggagggcgccaagcaccagctggagatctttgatgccctgggcagccaggcctgcagcaacaagaacctggagaagctgcgggcccagcaggaggtgctgcaggccctggagccccaggtggactacctgaggaacttcacccagggcctggtggaggatgccccagatggcagtgatgccagccagctgctgcaccaggccgaggtggcccagcaggagttcctggaggtgaagcagagggtgaacagcggctgtgtgatgatggagaacaagctggagggcatcggccagttccactgccgggtgcgggagatgttcagccagctggccgacctggatgatgagctggatggcatgggcgccatcggccgggacacagacagcctgcagagccagattgaagatgtgcggctcttcctgaacaagatccacgtgctgaagctggacatcgaggccagcgaggccgagtgccgccacatgctggaggaggagggcaccctggacctgctgggcctgaagcgggagctggaggccctgaacaagcagtgtgggaagctgacagagcggggcaaggcccggcaggagcagctggagctgaccctgggccgggtggaggacttctacaggaagctgaagggcctgaatgatgccaccacagctgctgaggaggccgaggccctgcagtgggtggtgggcacagaggtggagatcatcaaccagcagctggccgacttcaagatgttccagaaggagcaggtggaccccctgcagatgaagctgcagcaggtgaatggcctgggccagggcctcatccagagcgctgggaaggactgtgatgtgcagggcctggagcatgacatggaggagatcaatgcccgctggaacaccctgaacaagaaggtggcccagagaattgcccagctgcaggaggccctgctgcactgcggcaagttccaggatgccctggagcccctgctgtcctggctggccgacacagaggagctgattgccaaccagaagcccccatctgctgagtacaaggtggtgaaggcccagatccaggagcagaagctgctgcagaggctgctggatgacaggaaggccaccgtggacatgctgcaggccgagggcggccgcatcgcccagagcgctgagctggccgaccgggagaagatcaccggccagctggagagcctggagagccgctggacagagctgctgagcaaggctgctgcccggcagaagcagctggaggacatcctggtgctggccaagcagttccacgagacagctgagcccatcagtgacttcctgtctgtgacagagaagaagctggccaacagcgagcctgtgggcacccagacagccaagatccagcagcagatcatccgccacaaggccctggaggaggacattgaaaatcatgccacagatgtgcaccaggccgtgaagattggccagagcctgagcagcctgaccagccctgctgagcagggcgtgctgtctgagaagattgacagcctgcaggcccgctacagcgagatccaggaccgctgctgcaggaaggccgccctgctggaccaggccctgagcaatgcccggctgtttggagaagatgaggtggaggtgctgaactggctggccgaggtggaggacaagctgagctctgtgtttgtgaaggacttcaagcaggatgtgctgcaccggcagcacgccgaccacctggccctgaatgaggagatcgtgaacaggaagaagaatgtggaccaggccatcaagaatggccaggccctgctgaagcagaccactggagaggaggtgctgctgatccaggagaagctggatggcatcaagaccaggtatgctgacatcaccgtgaccagcagcaaggccctgcggaccctggagcaggcccggcagctggccaccaagttccagagcacctatgaggagctgaccggctggctgcgggaggtggaggaggagctggccaccagcggcggccagagccccaccggggagcagatcccccagttccagcagaggcagaaggagctgaagaaggaggtgatggagcaccggctggtgctggacacagtgaatgaggtgtcccgggccctgctggagctggtgccctggagggcccgggagggcctggacaagctggtgtctgatgccaatgagcagtacaagctggtgtctgacaccatcggccagagggtggatgaaattgatgctgccatccagaggagccagcagtatgagcaggccgcagatgctgagctggcctgggtggccgagaccaagaggaagctgatggccctgggccccatccggctggagcaggaccagaccacagcccagctgcaggtgcagaaggccttcagcattgacatcatccgccacaaggacagcatggatgagctgttcagccacaggtctgagatcttcggcacctgtggggaggagcagaagacagtgctgcaggagaagacagagagcctcatccagcagtatgaggccatcagcctgctgaacagcgagagatatgcccggctggagcgggcccaggtgctggtgaaccagttctgggagacctatgaggagctgagcccctggattgaggagacccgggccctgattgcccagctgcccagccctgccatcgaccacgagcagctgcggcagcagcaggaggagatgaggcagctgcgggagagcattgctgagcacaagccccacatcgacaagctgctgaagattggcccccagctgaaggagctgaaccctgaggagggggagatggtggaggagaagtaccagaaggccgagaacatgtatgcccagatcaaggaggaggtgcggcagagggccctggccctggatgaggccgtgtcccagagcacccagatcacagagttccatgacaagattgagcccatgctggagaccctggagaacctgagcagccggctgaggatgcctcctctcatcccagctgaggtggacaagatccgggagtgcatcagtgacaacaagagcgccaccgtggagctggagaagctgcagcccagctttgaggccctgaagagaagaggagaggagctgattggccgcagccagggcgctgacaaggacctggccgccaaggagatccaggacaagctggaccagatggtgttcttctgggaggacatcaaggcccgggcagaggagcgggagatcaagttcctggatgtgctggagctggccgagaagttctggtatgacatggccgccctgctgaccaccatcaaggacacccaggacatcgtgcatgacctggagagccctggcatcgaccccagcatcatcaagcagcaggtggaggccgctgagaccatcaaggaggagacagatggcctgcacgaggagctggagttcatccgcatcctgggcgctgacctgatctttgcctgtggggagacagagaagccagaggtgaggaagagcattgatgagatgaacaatgcctgggagaacctgaacaagacctggaaggagcggctggagaagctggaggatgccatgcaggccgctgtgcagtaccaggacaccctgcaggccatgtttgactggctggacaacacagtcatcaagctgtgcaccatgcctcctgtgggcacagacctgaacacagtgaaggaccagctgaatgagatgaaggagttcaaggtggaggtgtaccagcagcagatcgagatggagaagctgaaccaccagggcgagctgatgctgaagaaggccacagatgaaacagaccgggacatcatccgggagcccctgacagagctgaagcacctgtgggagaacctgggggagaagatcgcccaccggcagcacaagctggagggcgccctgctggccctgggccagttccagcacgccctggaggagctgatgtcctggctgacccacacagaggagctgctggatgcccagaggcccatcagcggggaccccaaggtgattgaggtggagctggccaagcaccacgtgctgaagaatgatgtgctggcccaccaggccaccgtggagaccgtgaacaaggctggaaatgagctgctggagagcagcgctggagatgatgccagcagcctgcggagccggctggaggccatgaaccagtgctgggagagcgtgctgcagaagacagaggagcgggagcagcagctgcagagcaccctgcagcaggcccagggcttccacagcgagattgaggacttcctgctggagctgaccaggatggagagccagctgagcgccagcaagcccactggaggcctgcctgagacagcccgggagcagctggacacccacatggagctgtacagccagctgaaggccaaggaggagacctacaaccagctgctggacaagggccgcctgatgctgctgagcagagatgacagcggcagcggcagcaagacagagcagagcgtggccctgctggagcagaagtggcacgtggtgagcagcaagatggaggagaggaagagcaagctggaggaggccctgaacctggccacagagttccagaacagcctgcaggagttcatcaactggctgaccctggccgagcagagcctgaacatcgccagcccccccagcctcatcctgaacacagtgctgagccagatcgaggagcacaaggtgtttgccaatgaggtgaatgcccaccgggaccagatcatcgagctggaccagacaggcaaccagctgaagttcctgagccagaagcaggatgtggtgctgatcaagaacctgctggtgtctgtgcagagccgctgggagaaggtggtgcagaggagcattgaaagaggccgcagcctggatgatgccaggaagagggccaagcagttccacgaggcctggaagaagctgattgactggctggaggatgctgagagccacctggacagcgagctggagatcagcaatgaccctgacaagatcaagctgcagctgagcaagcacaaggagttccagaagaccctgggcggcaagcagcctgtgtatgacaccaccatcagaacaggccgggccctgaaggagaagaccctgctgcctgaggacagccagaagctggacaacttcctgggggaggtgcgggacaagtgggacacagtgtgtgggaagtctgtggagcggcagcacaagctggaggaggccctgctcttcagcggccagttcatggatgccctgcaggccctggtggactggctgtacaaggtggagccccagctggccgaggaccagcctgtgcatggagacctggacctggtgatgaacctgatggatgcccacaaggtgttccagaaggagctgggcaagaggactggaacagtgcaggtgctgaagaggagcggccgggagctgattgagaacagcagagatgacaccacctgggtgaagggccagctgcaggagctgagcacccgctgggacacagtgtgcaagctgtctgtgtccaagcagagccggctggagcaggccctgaagcaggccgaggtgttccgggacacagtgcacatgctgctggagtggctgtctgaggccgagcagaccctgcgcttccggggggccctgcctgatgacacagaggccctgcagagcctgattgacacccacaaggagttcatgaagaaggtggaggagaagagggtggatgtgaacagcgctgtggccatgggagaggtgatcctggccgtgtgccacccagactgcatcaccaccatcaagcactggatcaccatcatccgggccaggtttgaggaggtgctgacctgggccaagcagcaccagcagaggctggagacagccctgtctgagctggtggccaatgctgagctgctggaggagctgctggcctggatccagtgggccgagaccaccctcatccagagggaccaggagcccatcccccagaacatcgacagagtgaaggccctgattgctgagcaccagaccttcatggaggagatgaccaggaagcagccagatgtggacagagtgaccaagacctacaagaggaagaacatcgagcccacccacgcccccttcatcgagaagagccgcagcggcggcaggaagagcctgagccagcccaccccaccacccatgcccatcctgagccagagcgaggccaagaacccccgcatcaaccagctgagcgcccgctggcagcaggtgtggctgctggccctggagcggcagaggaagctgaatgatgccctggaccggctggaggagctgaaggagtttgccaactttgattttgatgtgtggaggaagaagtacatgcgctggatgaaccacaagaagagccgggtgatggacttcttcagaagaattgacaaggaccaggacggcaagatcacccggcaggagttcattgatggcatcctggccagcaagttccccaccaccaagctggagatgacagctgtggccgacatctttgacagagatggagatggctacatcgactactatgaatttgtggccgccctgcaccccaacaaggatgcctaccggcccaccacagatgctgacaagattgaagatgaggtgacccggcaggtggcccagtgcaagtgtgccaagcgcttccaggtggagcagatcggggagaacaagtaccgcttcttcctgggcaaccagtttggagacagccagcagctgcggctggtgcgcatcctgcggagcacagtgatggtgcgggtgggcggcggctggatggccctggatgagttcctggtgaagaatgacccctgccgggcccggggccgcaccaacatcgagctgcgggagaagttcatcctgcctgagggcgccagccagggcatgacccccttccgcagccggggccgccgcagcaagcccagcagccgggccgccagccccaccaggagcagcagcagcgccagccagagcaaccacagctgcacctccatgcccagcagccctgccaccccagccagcggcaccaaggtgatccccagcagcggcagcaagctgaagaggcccacccccaccttccacagcagcaggaccagcctggccggggacaccagcaacagcagcagccctgccagcactggagccaagaccaacagagctgaccccaagaagagcgccagccggcccggcagccgggccggcagccgggccggcagccgggccagcagcagaagaggaagtgatgccagtgactttgacctgctggagacccagagcgcctgcagcgacaccagcgagagcagcgctgctgggggccagggcaacagccggcggggcctgaacaagcccagcaagatccccaccatgagcaagaagaccaccacagccagccccaggaccccaggccccaagaggtag

SEQ ID NO: 159744 - DNA, 16293 bp, synthetic construct
  misc_feature 1..16293: note = Description of Artificial Sequence: Synthetic coding sequence
  source 1..16293: mol_type = other DNA
atgagcagcagtgatgaggagaccctgtctgagaggagctgccgctctgagaggagctgccgctctgagaggagctacagaagtgagaggagcggcagcctgagcccctgccccccaggggacaccctgccctggaacctgcccctgcacgagcagaagaagaggaagagccaggacagcgtgctggaccctgctgagagagctgtggtgcgggtggctgatgagcgggacagagtgcagaagaagaccttcaccaagtgggtgaacaagcacctgatgaaggtgaggaagcacatcaatgacctgtatgaggacctgagagatggccacaacctgatcagcctgctggaggtgctgagcggcatcaagctgccccgggagaagggccgcatgaggttccaccggctgcagaatgtgcagatcgccctggacttcctgaagcagaggcaggtgaagctggtgaacatcagaaatgatgacatcacagatggcaaccccaagctgaccctgggcctcatctggaccatcatcctgcacttccagatcagtgacatctacatcagcggggagagcggggacatgtctgccaaggagaagctgctgctgtggacccagaaggtgacagctggctacacaggcatcaagtgcaccaacttcagcagctgctggagcgatggcaagatgtttaatgccctgatccaccgctacagaccagacctggtggacatggagcgggtgcagatccagagcaaccgggagaacctggagcaggcctttgaggtggccgagcggctgggcgtgacccggctgctggatgctgaagatgtggatgtgcccagcccagatgagaagagcgtcatcacctacgtgagcagcatctatgatgccttccccaaggtgcctgagggcggggagggcatcagcgccacagaggtggacagccgctggcaggagtaccagagccgggtggacagcctcatcccctggatcaagcagcacaccatcctgatgtctgacaagaccttcccccagaaccctgtggagctgaaggccctgtacaaccagtacatccacttcaaggagacagagatcctggccaaggagcgggagaagggccgcatcgaggagctgtacaagctgctggaggtgtggattgaatttggccgcatcaagctgccccagggctaccaccccaatgatgtggaggaggagtggggcaagctgatcatcgagatgctggagcgggagaagagcctgcggcctgctgtggagcggctggagctgctgctgcagatcgccaacaagatccagaatggagccctgaactgtgaggagaagctgaccctggccaagaacaccctgcaggctgatgctgcccacctggagagcggccagcctgtgcagtgtgagagtgatgtgatcatgtacatccaggagtgtgagggcctcatccggcagctgcaggtggacctgcagatcctgagagatgagaactactaccagctggaggagctggccttccgggtgatgaggctgcaggatgagctggtgaccctgcggctggagtgcaccaacctgtacaggaagggccacttcaccagcctggagctggtgccccccagcaccctgaccaccacccacctgaaggccgagcccctgaccaaggccacccacagcagcagcacctcctggttcaggaagcccatgaccagggctgagctggtggccatcagcagcagtgaagatgagggcaacctgcgctttgtgtatgagctgctgtcctgggtggaggagatgcagatgaagctggagcgggcagagtggggcaatgacctgcccagcgtggagctgcagctggagacccagcagcacatccacacctctgtggaggagctgggcagctctgtgaaggaggcccggctgtatgagggcaagatgagccagaacttccacaccagctatgcagagaccctgggcaagctggagacccagtactgcaagctgaaggagaccagcagcttcaggatgaggcacctgcagagcctgcacaagtttgtgtcccgggccacagctgagctgatctggctgaatgagaaggaggaggaggagctggcctatgactggagcgacaacaacagcaacatcagcgccaagaggaactacttcagcgagctgaccatggagctggaggagaagcaggatgtgttccgcagcctgcaggacacagctgagctgctgagcctggagaaccacccagccaagcagacagtggaggcctacagcgctgctgtgcagagccagctgcagtggatgaagcagctgtgcctgtgtgtggagcagcacgtgaaggagaacacagcctacttccagttcttcagtgatgcccgggagctggagagcttcctgaggaacctgcaggacagcatcaagaggaagtacagctgtgaccacaacaccagcctgagccggctggaggacctgctgcaggacagcatggatgagaaggagcagctgatccagagcaagagctctgtggccagcctggtgggccgcagcaagaccatcgtgcagctgaagcccaggagcccagaccacgtgctgaagaacaccatctctgtgaaggctgtgtgtgactaccggcagatcgagatcaccatctgcaagaatgatgaatgtgtgctggaggacaacagccagaggaccaagtggaaggtgatcagccccactggaaatgaggccatggtgcccagcgtgtgcttcctgatccccccacccaacaaggatgccatcgagatggccagccgggtggagcagagctaccagaaggtgatggccctgtggcaccagctgcacgtgaacaccaagagcctcatctcctggaactacctgaggaaggacctggacctggtgcagacctggaacctggagaagctgcggagcagcgcccctggagagtgccaccagatcatgaagaacctgcaggcccactatgaggacttcctgcaggacagccgggacagcgtgctcttctctgtggccgaccggctgcggctggaggaggaggtggaggcctgcaaggcccgcttccagcacctgatgaagtccatggagaatgaagacaaggaggagaccgtggccaagatgtacatcagcgagctgaagaacatccggctgcggctggaggagtatgagcagagggtggtgaagaggatccagagcctggccagcagcaggacagacagagatgcctggcaggacaatgccctgagaattgctgagcaggagcacacccaggaggacctgcagcagctgcggagtgacctggatgctgtgtccatgaagtgtgacagcttcctgcaccagagccccagcagcagctctgtgcccaccctgcggtctgagctgaacctgctggtggagaagatggaccacgtgtatggcctgagcacagtgtacctgaacaagctgaagacagtggatgtgattgtgcgcagcatccaggatgctgagctgctggtgaagggctatgagatcaagctgagccaggaggaggtggtgctggccgacctgagcgccctggaggcccactggagcaccctgcggcactggctgagtgatgtgaaggacaagaacagcgtcttctctgtgctggatgaggagatcgccaaggccaaggtggtggccgagcagatgagccggctgaccccagagaggaacctggacctggagcgctaccaggagaagggcagccagctgcaggagcgctggcacagggtcatcgcccagctggagatccggcagagcgagctggagagcatccaggaggtgctgggggactaccgggcctgccacggcaccctcatcaagtggattgaggagaccacagcccagcaggagatgatgaagccaggccaggccgaggacagccgggtgctgtctgagcagctgagccagcagacagccctgtttgctgagattgaaagaaaccagaccaagctggaccagtgccagaagttcagccagcagtacagcaccatcgtgaaggactatgagctgcagctgatgacctacaaggcctttgtggagagccagcagaagagccctgggaagagaagaaggatgctgagcagcagtgatgccatcacccaggagttcatggacctgcggacccgctacacagccctggtgaccctgaccacccagcacgtgaagtacatcagtgatgccctgcggcggctggaggaggaggagaaggtggtggaggaggagaagcaggagcacgtggagaaggtgaaggagctgctgggctgggtgtccaccctggccaggaacacccagggcaaggccaccagcagcgagaccaaggagagcacagacatcgagaaggccatcctggagcagcaggtgctgtctgaggagctgaccaccaagaaggagcaggtgtctgaggccatcaagaccagccagatcttcctggccaagcacggccacaagctgtctgagaaggagaagaagcagatcagcgagcagctgaatgccctgaacaaggcctaccatgacctgtgtgatggcagcgccaaccagctgcagcagctgcagagccagctggcccaccagacagagcagaagaccctgcagaagcagcagaacacctgccaccagcagctggaggacctgtgctcctgggtgggccaggccgagcgggccctggccggccaccagggccgcaccacccagcaggacctgagcgccctgcagaagaaccagagcgacctgaaggacctgcaggatgacatccagaacagagccaccagctttgccaccgtggtgaaggacatcgagggcttcatggaggagaaccagaccaagctgagcccccgggagctgacagccctgcgggagaagctgcaccaggccaaggagcagtatgaggccctgcaggaggagaccagggtggcccagaaggagctggaggaggccgtgaccagcgccctgcagcaggagacagagaagagcaaggccgccaaggagctggccgagaacaagaagaagattgatgccctgctggactgggtgacctctgtgggcagcagcggcggccagctgctgaccaacctgcccggcatggagcagctgagcggggccagcctggagaagggggccctggacaccacagatggctacatgggcgtgaaccaggcccctgagaagctggacaagcagtgtgagatgatgaaggcccggcaccaggagctgctgagccagcagcagaacttcatcctggccacccagagcgcccaggccttcctggaccagcacggccacaacctgaccccagaggagcagcagatgctgcagcagaagctgggggagctgaaggagcagtacagcaccagcctggcccagagcgaggccgagctgaagcaggtgcagaccctgcaggatgagctgcagaagttcctgcaggaccacaaggagtttgagagctggctggagaggtctgagaaggagctggagaacatgcacaagggcggcagcagccctgagaccctgcccagcctgctgaagaggcagggcagcttctctgaagatgtgatcagccacaagggggacctgcgctttgtgaccatcagcggccagaaggtgctggacatggagaacagcttcaaggagggcaaggagcccagcgagatcggcaacctggtgaaggacaagctgaaggatgccacagagcgctacacagccctgcacagcaagtgcacccggctgggcagccacctgaacatgctgctgggccagtaccaccagttccagaacagcgctgacagcctgcaggcctggatgcaggcctgtgaggccaacgtggagaagctgctgagtgacacagtggccagtgaccccggggtgctgcaggagcagctggccaccaccaagcagctgcaggaggagctggccgagcaccaggtgcctgtggagaagctgcagaaggtggcccgggacatcatggagattgaaggagagcccgccccagaccaccgccacgtgcaggagaccacagacagcatcctgagccacttccagagcctgagctacagcctggccgagaggagcagcctgctgcagaaggccatcgcccagagccagagcgtgcaggagagcctggagagcctgctgcagagcattggagaggtggagcagaacctggagggcaagcaggtgagcagcctgagcagcggggtcatccaggaggccctggccaccaacatgaagctgaagcaggacatcgcccggcagaagagcagcctggaggccacccgggagatggtgacccgcttcatggagacagctgacagcaccacagctgctgtgctgcagggcaagctggccgaggtgtcccagagatttgagcagctgtgcctgcagcagcaggagaaggagagcagcctgaagaagctgctgccccaggccgagatgtttgagcacctgagcggcaagctgcagcagttcatggagaacaagagcaggatgctggccagcggcaaccagcctgaccaggacatcacccacttcttccagcagatccaggagctgaacctggagatggaggaccagcaggagaacctggacaccctggagcacctggtgacagagctgagcagctgtggctttgccctggacctgtgccagcaccaggacagagtgcagaacctgaggaaggacttcacagagctgcagaagacagtgaaggagcgggagaaggatgccagcagctgccaggagcagctggatgagttcaggaagctggtgaggaccttccagaagtggctgaaggagacagagggcagcatccccccaacagagacctccatgtctgccaaggagctggagaagcagatcgagcacctgaagagcctgctggatgactgggccagcaagggcaccctggtggaggagatcaactgcaagggcaccagcctggagaacctgatcatggagatcacagccccagacagccagggcaagacaggcagcatcctgcccagcgtgggcagctctgtgggctctgtgaatggctaccacacctgcaaggacctgacagagatccagtgtgacatgtctgatgtgaacctgaagtatgagaagctgggcggcgtgctgcacgagcggcaggagagcctgcaggccatcctgaacaggatggaggaggtgcacaaggaggccaacagcgtgctgcagtggctggagagcaaggaggaggtgctgaagtccatggatgccatgagcagccccaccaagacagaaacagtgaaggcccaggccgagagcaacaaggccttcctggccgagctggagcagaacagccccaagatccagaaggtgaaggaggccctggccggcctgctggtgacctaccccaacagccaggaggccgagaactggaagaagatccaggaggagctgaacagccgctgggagcgggccacagaggtgacagtggcccggcagaggcagctggaggagagcgccagccacctggcctgcttccaggccgctgagagccagctgcggccctggctgatggagaaggagctgatgatgggcgtgctgggccccctgagcattgaccccaacatgctgaatgcccagaagcagcaggtgcagttcatgctgaaggagtttgaggcccggcggcagcagcacgagcagctgaatgaagctgcccagggcatcctgactggacctggagatgtgtccctgagcaccagccaggtgcagaaggagctgcagagcatcaaccagaagtgggtggagctgacagacaagctgaacagccgcagcagccagattgaccaggccatcgtgaagagcacccagtaccaggagctgctgcaggacctgtctgagaaggtgcgggctgtgggccagaggctgtctgtgcagagcgccatcagcacccagcctgaggccgtgaagcagcagctggaggagaccagcgagatccgcagtgacctggagcagctggaccacgaggtgaaggaggcccagaccctgtgtgatgagctgtctgtgctgattggagagcagtacctgaaggatgagctgaagaagaggctggagaccgtggccctgcccctgcagggcctggaggacctggccgctgaccgcatcaaccggctgcaggccgccctggccagcacccagcagttccagcagatgtttgatgagctgcggacctggctggatgacaagcagagccagcaggccaagaactgccccatcagcgccaagctggagcggctgcagagccagctgcaggagaatgaggagttccagaagagcctgaaccagcacagcggcagctatgaggtgattgtggccgagggggagagcctgctgctgtctgtgcccccaggagaggagaagaggaccctgcagaaccagctggtggagctgaagaaccactgggaggagctgagcaagaagacagctgaccggcagagccggctgaaggactgcatgcagaaggcccagaagtaccagtggcacgtggaggacctggtgccctggattgaggactgcaaggccaagatgtctgagctgcgggtgaccctggaccctgtgcagctggagagcagcctgctgcggagcaaggccatgctgaatgaggtggagaagagaagaagcctgctggagatcctgaacagcgctgctgacatcctgatcaacagcagcgaggctgatgaagatggcatcagagatgagaaggccggcatcaaccagaacatggatgctgtgacagaggagctgcaggccaagacaggcagcctggaggagatgacccagaggctgcgggagttccaggagagcttcaagaacatcgagaagaaggtggagggcgccaagcaccagctggagatctttgatgccctgggcagccaggcctgcagcaacaagaacctggagaagctgcgggcccagcaggaggtgctgcaggccctggagccccaggtggactacctgaggaacttcacccagggcctggtggaggatgccccagatggcagtgatgccagccagctgctgcaccaggccgaggtggcccagcaggagttcctggaggtgaagcagagggtgaacagcggctgtgtgatgatggagaacaagctggagggcatcggccagttccactgccgggtgcgggagatgttcagccagctggccgacctggatgatgagctggatggcatgggcgccatcggccgggacacagacagcctgcagagccagattgaagatgtgcggctcttcctgaacaagatccacgtgctgaagctggacatcgaggccagcgaggccgagtgccgccacatgctggaggaggagggcaccctggacctgctgggcctgaagcgggagctggaggccctgaacaagcagtgtgggaagctgacagagcggggcaaggcccggcaggagcagctggagctgaccctgggccgggtggaggacttctacaggaagctgaagggcctgaatgatgccaccacagctgctgaggaggccgaggccctgcagtgggtggtgggcacagaggtggagatcatcaaccagcagctggccgacttcaagatgttccagaaggagcaggtggaccccctgcagatgaagctgcagcaggtgaatggcctgggccagggcctcatccagagcgctgggaaggactgtgatgtgcagggcctggagcatgacatggaggagatcaatgcccgctggaacaccctgaacaagaaggtggcccagagaattgcccagctgcaggaggccctgctgcactgcggcaagttccaggatgccctggagcccctgctgtcctggctggccgacacagaggagctgattgccaaccagaagcccccatctgctgagtacaaggtggtgaaggcccagatccaggagcagaagctgctgcagaggctgctggatgacaggaaggccaccgtggacatgctgcaggccgagggcggccgcatcgcccagagcgctgagctggccgaccgggagaagatcaccggccagctggagagcctggagagccgctggacagagctgctgagcaaggctgctgcccggcagaagcagctggaggacatcctggtgctggccaagcagttccacgagacagctgagcccatcagtgacttcctgtctgtgacagagaagaagctggccaacagcgagcctgtgggcacccagacagccaagatccagcagcagatcatccgccacaaggccctggaggaggacattgaaaatcatgccacagatgtgcaccaggccgtgaagattggccagagcctgagcagcctgaccagccctgctgagcagggcgtgctgtctgagaagattgacagcctgcaggcccgctacagcgagatccaggaccgctgctgcaggaaggccgccctgctggaccaggccctgagcaatgcccggctgtttggagaagatgaggtggaggtgctgaactggctggccgaggtggaggacaagctgagctctgtgtttgtgaaggacttcaagcaggatgtgctgcaccggcagcacgccgaccacctggccctgaatgaggagatcgtgaacaggaagaagaatgtggaccaggccatcaagaatggccaggccctgctgaagcagaccactggagaggaggtgctgctgatccaggagaagctggatggcatcaagaccaggtatgctgacatcaccgtgaccagcagcaaggccctgcggaccctggagcaggcccggcagctggccaccaagttccagagcacctatgaggagctgaccggctggctgcgggaggtggaggaggagctggccaccagcggcggccagagccccaccggggagcagatcccccagttccagcagaggcagaaggagctgaagaaggaggtgatggagcaccggctggtgctggacacagtgaatgaggtgtcccgggccctgctggagctggtgccctggagggcccgggagggcctggacaagctggtgtctgatgccaatgagcagtacaagctggtgtctgacaccatcggccagagggtggatgaaattgatgctgccatccagaggagccagcagtatgagcaggccgcagatgctgagctggcctgggtggccgagaccaagaggaagctgatggccctgggccccatccggctggagcaggaccagaccacagcccagctgcaggtgcagaaggccttcagcattgacatcatccgccacaaggacagcatggatgagctgttcagccacaggtctgagatcttcggcacctgtggggaggagcagaagacagtgctgcaggagaagacagagagcctcatccagcagtatgaggccatcagcctgctgaacagcgagagatatgcccggctggagcgggcccaggtgctggtgaaccagttctgggagacctatgaggagctgagcccctggattgaggagacccgggccctgattgcccagctgcccagccctgccatcgaccacgagcagctgcggcagcagcaggaggagatgaggcagctgcgggagagcattgctgagcacaagccccacatcgacaagctgctgaagattggcccccagctgaaggagctgaaccctgaggagggggagatggtggaggagaagtaccagaaggccgagaacatgtatgcccagatcaaggaggaggtgcggcagagggccctggccctggatgaggccgtgtcccagagcacccaggtgtcccagttccatgacaagattgagcccatgctggagaccctggagaacctgagcagccggctgaggatgcctcctctcatcccagctgaggtggacaagatccgggagtgcatcagtgacaacaagagcgccaccgtggagctggagaagctgcagcccagctttgaggccctgaagagaagaggagaggagctgattggccgcagccagggcgctgacaaggacctggccgccaaggagatccaggacaagctggaccagatggtgttcttctgggaggacatcaaggcccgggcagaggagcgggagatcaagttcctggatgtgctggagctggccgagaagttctggtatgacatggccgccctgctgaccaccatcaaggacacccaggacatcgtgcatgacctggagagccctggcatcgaccccagcatcatcaagcagcaggtggaggccgctgagaccatcaaggaggagacagatggcctgcacgaggagctggagttcatccgcatcctgggcgctgacctgatctttgcctgtggggagacagagaagccagaggtgaggaagagcattgatgagatgaacaatgcctgggagaacctgaacaagacctggaaggagcggctggagaagctggaggatgccatgcaggccgctgtgcagtaccaggacaccctgcaggccatgtttgactggctggacaacacagtcatcaagctgtgcaccatgcctcctgtgggcacagacctgaacacagtgaaggaccagctgaatgagatgaaggagttcaaggtggaggtgtaccagcagcagatcgagatggagaagctgaaccaccagggcgagctgatgctgaagaaggccacagatgaaacagaccgggacatcatccgggagcccctgacagagctgaagcacctgtgggagaacctgggggagaagatcgcccaccggcagcacaagctggagggcgccctgctggccctgggccagttccagcacgccctggaggagctgatgtcctggctgacccacacagaggagctgctggatgcccagaggcccatcagcggggaccccaaggtgattgaggtggagctggccaagcaccacgtgctgaagaatgatgtgctggcccaccaggccaccgtggagaccgtgaacaaggctggaaatgagctgctggagagcagcgctggagatgatgccagcagcctgcggagccggctggaggccatgaaccagtgctgggagagcgtgctgcagaagacagaggagcgggagcagcagctgcagagcaccctgcagcaggcccagggcttccacagcgagattgaggacttcctgctggagctgaccaggatggagagccagctgagcgccagcaagcccactggaggcctgcctgagacagcccgggagcagctggacacccacatggagctgtacagccagctgaaggccaaggaggagacctacaaccagctgctggacaagggccgcctgatgctgctgagcagagatgacagcggcagcggcagcaagacagagcagagcgtggccctgctggagcagaagtggcacgtggtgagcagcaagatggaggagaggaagagcaagctggaggaggccctgaacctggccacagagttccagaacagcctgcaggagttcatcaactggctgaccctggccgagcagagcctgaacatcgccagcccccccagcctcatcctgaacacagtgctgagccagatcgaggagcacaaggtgtttgccaatgaggtgaatgcccaccgggaccagatcatcgagctggaccagacaggcaaccagctgaagttcctgagccagaagcaggatgtggtgctgatcaagaacctgctggtgtctgtgcagagccgctgggagaaggtggtgcagaggagcattgaaagaggccgcagcctggatgatgccaggaagagggccaagcagttccacgaggcctggaagaagctgattgactggctggaggatgctgagagccacctggacagcgagctggagatcagcaatgaccctgacaagatcaagctgcagctgagcaagcacaaggagttccagaagaccctgggcggcaagcagcctgtgtatgacaccaccatcagaacaggccgggccctgaaggagaagaccctgctgcctgaggacagccagaagctggacaacttcctgggggaggtgcgggacaagtgggacacagtgtgtgggaagtctgtggagcggcagcacaagctggaggaggccctgctcttcagcggccagttcatggatgccctgcaggccctggtggactggctgtacaaggtggagccccagctggccgaggaccagcctgtgcatggagacctggacctggtgatgaacctgatggatgcccacaaggtgttccagaaggagctgggcaagaggactggaacagtgcaggtgctgaagaggagcggccgggagctgattgagaacagcagagatgacaccacctgggtgaagggccagctgcaggagctgagcacccgctgggacacagtgtgcaagctgtctgtgtccaagcagagccggctggagcaggccctgaagcaggccgaggtgttccgggacacagtgcacatgctgctggagtggctgtctgaggccgagcagaccctgcgcttccggggggccctgcctgatgacacagaggccctgcagagcctgattgacacccacaaggagttcatgaagaaggtggaggagaagagggtggatgtgaacagcgctgtggccatgggagaggtgatcctggccgtgtgccacccagactgcatcaccaccatcaagcactggatcaccatcatccgggccaggtttgaggaggtgctgacctgggccaagcagcaccagcagaggctggagacagccctgtctgagctggtggccaatgctgagctgctggaggagctgctggcctggatccagtgggccgagaccaccctcatccagagggaccaggagcccatcccccagaacatcgacagagtgaaggccctgattgctgagcaccagaccttcatggaggagatgaccaggaagcagccagatgtggacagagtgaccaagacctacaagaggaagaacatcgagcccacccacgcccccttcatcgagaagagccgcagcggcggcaggaagagcctgagccagcccaccccaccacccatgcccatcctgagccagagcgaggccaagaacccccgcatcaaccagctgagcgcccgctggcagcaggtgtggctgctggccctggagcggcagaggaagctgaatgatgccctggaccggctggaggagctgaaggagtttgccaactttgattttgatgtgtggaggaagaagtacatgcgctggatgaaccacaagaagagccgggtgatggacttcttcagaagaattgacaaggaccaggacggcaagatcacccggcaggagttcattgatggcatcctggccagcaagttccccaccaccaagctggagatgacagctgtggccgacatctttgacagagatggagatggctacatcgactactatgaatttgtggccgccctgcaccccaacaaggatgcctaccggcccaccacagatgctgacaagattgaagatgaggtgacccggcaggtggcccagtgcaagtgtgccaagcgcttccaggtggagcagatcggggagaacaagtacagatttggagacagccagcagctgcggctggtgcgcatcctgcggagcacagtgatggtgcgggtgggcggcggctggatggccctggatgagttcctggtgaagaatgacccctgccgggcccggggccgcaccaacatcgagctgcgggagaagttcatcctgcctgagggcgccagccagggcatgacccccttccgcagccggggccgccgcagcaagcccagcagccgggccgccagccccaccaggagcagcagcagcgccagccagagcaaccacagctgcacctccatgcccagcagccctgccaccccagccagcggcaccaaggtgatccccagcagcggcagcaagctgaagaggcccacccccaccttccacagcagcaggaccagcctggccggggacaccagcaacagcagcagccctgccagcactggagccaagaccaacagagctgaccccaagaagagcgccagccggcccggcagccgggccggcagccgggccggcagccgggccagcagcagaagaggaagtgatgccagtgactttgacctgctggagacccagagcgcctgcagcgacaccagcgagagcagcgctgctgggggccagggcaacagccggcggggcctgaacaagcccagcaagatccccaccatgagcaagaagaccaccacagccagccccaggaccccaggccccaagaggtag

SEQ ID NO: 159745 - DNA, 16293 bp, synthetic construct
  misc_feature 1..16293: note = Description of Artificial Sequence: Synthetic coding sequence
  source 1..16293: mol_type = other DNA
atgagcagcagtgatgaggagaccctgtctgagaggagctgccgctctgagaggagctgccgctctgagaggagctacagaagtgagaggagcggcagcctgagcccctgccccccaggggacaccctgccctggaacctgcccctgcacgagcagaagaagaggaagagccaggacagcgtgctggaccctgctgagagagctgtggtgcgggtggctgatgagcgggacagagtgcagaagaagaccttcaccaagtgggtgaacaagcacctgatgaaggtgaggaagcacatcaatgacctgtatgaggacctgagagatggccacaacctgatcagcctgctggaggtgctgagcggcatcaagctgccccgggagaagggccgcatgaggttccaccggctgcagaatgtgcagatcgccctggacttcctgaagcagaggcaggtgaagctggtgaacatcagaaatgatgacatcacagatggcaaccccaagctgaccctgggcctcatctggaccatcatcctgcacttccagatcagtgacatctacatcagcggggagagcggggacatgtctgccaaggagaagctgctgctgtggacccagaaggtgacagctggctacacaggcatcaagtgcaccaacttcagcagctgctggagcgatggcaagatgtttaatgccctgatccaccgctacagaccagacctggtggacatggagcgggtgcagatccagagcaaccgggagaacctggagcaggcctttgaggtggccgagcggctgggcgtgacccggctgctggatgctgaagatgtggatgtgcccagcccagatgagaagagcgtcatcacctacgtgagcagcatctatgatgccttccccaaggtgcctgagggcggggagggcatcagcgccacagaggtggacagccgctggcaggagtaccagagccgggtggacagcctcatcccctggatcaagcagcacaccatcctgatgtctgacaagaccttcccccagaaccctgtggagctgaaggccctgtacaaccagtacatccacttcaaggagacagagatcctggccaaggagcgggagaagggccgcatcgaggagctgtacaagctgctggaggtgtggattgaatttggccgcatcaagctgccccagggctaccaccccaatgatgtggaggaggagtggggcaagctgatcatcgagatgctggagcgggagaagagcctgcggcctgctgtggagcggctggagctgctgctgcagatcgccaacaagatccagaatggagccctgaactgtgaggagaagctgaccctggccaagaacaccctgcaggctgatgctgcccacctggagagcggccagcctgtgcagtgtgagagtgatgtgatcatgtacatccaggagtgtgagggcctcatccggcagctgcaggtggacctgcagatcctgagagatgagaactactaccagctggaggagctggccttccgggtgatgaggctgcaggatgagctggtgaccctgcggctggagtgcaccaacctgtacaggaagggccacttcaccagcctggagctggtgccccccagcaccctgaccaccacccacctgaaggccgagcccctgaccaaggccacccacagcagcagcacctcctggttcaggaagcccatgaccagggctgagctggtggccatcagcagcagtgaagatgagggcaacctgcgctttgtgtatgagctgctgtcctgggtggaggagatgcagatgaagctggagcgggcagagtggggcaatgacctgcccagcgtggagctgcagctggagacccagcagcacatccacacctctgtggaggagctgggcagctctgtgaaggaggcccggctgtatgagggcaagatgagccagaacttccacaccagctatgcagagaccctgggcaagctggagacccagtactgcaagctgaaggagaccagcagcttcaggatgaggcacctgcagagcctgcacaagtttgtgtcccgggccacagctgagctgatctggctgaatgagaaggaggaggaggagctggcctatgactggagcgacaacaacagcaacatcagcgccaagaggaactacttcagcgagctgaccatggagctggaggagaagcaggatgtgttccgcagcctgcaggacacagctgagctgctgagcctggagaaccacccagccaagcagacagtggaggcctacagcgctgctgtgcagagccagctgcagtggatgaagcagctgtgcctgtgtgtggagcagcacgtgaaggagaacacagcctacttccagttcttcagtgatgcccgggagctggagagcttcctgaggaacctgcaggacagcatcaagaggaagtacagctgtgaccacaacaccagcctgagccggctggaggacctgctgcaggacagcatggatgagaaggagcagctgatccagagcaagagctctgtggccagcctggtgggccgcagcaagaccatcgtgcagctgaagcccaggagcccagaccacgtgctgaagaacaccatctctgtgaaggctgtgtgtgactaccggcagatcgagatcaccatctgcaagaatgatgaatgtgtgctggaggacaacagccagaggaccaagtggaaggtgatcagccccactggaaatgaggccatggtgcccagcgtgtgcttcctgatccccccacccaacaaggatgccatcgagatggccagccgggtggagcagagctaccagaaggtgatggccctgtggcaccagctgcacgtgaacaccaagagcctcatctcctggaactacctgaggaaggacctggacctggtgcagacctggaacctggagaagctgcggagcagcgcccctggagagtgccaccagatcatgaagaacctgcaggcccactatgaggacttcctgcaggacagccgggacagcgtgctcttctctgtggccgaccggctgcggctggaggaggaggtggaggcctgcaaggcccgcttccagcacctgatgaagtccatggagaatgaagacaaggaggagaccgtggccaagatgtacatcagcgagctgaagaacatccggctgcggctggaggagtatgagcagagggtggtgaagaggatccagagcctggccagcagcaggacagacagagatgcctggcaggacaatgccctgagaattgctgagcaggagcacacccaggaggacctgcagcagctgcggagtgacctggatgctgtgtccatgaagtgtgacagcttcctgcaccagagccccagcagcagctctgtgcccaccctgcggtctgagctgaacctgctggtggagaagatggaccacgtgtatggcctgagcacagtgtacctgaacaagctgaagacagtggatgtgattgtgcgcagcatccaggatgctgagctgctggtgaagggctatgagatcaagctgagccaggaggaggtggtgctggccgacctgagcgccctggaggcccactggagcaccctgcggcactggctgagtgatgtgaaggacaagaacagcgtcttctctgtgctggatgaggagatcgccaaggccaaggtggtggccgagcagatgagccggctgaccccagagaggaacctggacctggagcgctaccaggagaagggcagccagctgcaggagcgctggcacagggtcatcgcccagctggagatccggcagagcgagctggagagcatccaggaggtgctgggggactaccgggcctgccacggcaccctcatcaagtggattgaggagaccacagcccagcaggagatgatgaagccaggccaggccgaggacagccgggtgctgtctgagcagctgagccagcagacagccctgtttgctgagattgaaagaaaccagaccaagctggaccagtgccagaagttcagccagcagtacagcaccatcgtgaaggactatgagctgcagctgatgacctacaaggcctttgtggagagccagcagaagagccctgggaagagaagaaggatgctgagcagcagtgatgccatcacccaggagttcatggacctgcggacccgctacacagccctggtgaccctgaccacccagcacgtgaagtacatcagtgatgccctgcggcggctggaggaggaggagaaggtggtggaggaggagaagcaggagcacgtggagaaggtgaaggagctgctgggctgggtgtccaccctggccaggaacacccagggcaaggccaccagcagcgagaccaaggagagcacagacatcgagaaggccatcctggagcagcaggtgctgtctgaggagctgaccaccaagaaggagcaggtgtctgaggccatcaagaccagccagatcttcctggccaagcacggccacaagctgtctgagaaggagaagaagcagatcagcgagcagctgaatgccctgaacaaggcctaccatgacctgtgtgatggcagcgccaaccagctgcagcagctgcagagccagctggcccaccagacagagcagaagaccctgcagaagcagcagaacacctgccaccagcagctggaggacctgtgctcctgggtgggccaggccgagcgggccctggccggccaccagggccgcaccacccagcaggacctgagcgccctgcagaagaaccagagcgacctgaaggacctgcaggatgacatccagaacagagccaccagctttgccaccgtggtgaaggacatcgagggcttcatggaggagaaccagaccaagctgagcccccgggagctgacagccctgcgggagaagctgcaccaggccaaggagcagtatgaggccctgcaggaggagaccagggtggcccagaaggagctggaggaggccgtgaccagcgccctgcagcaggagacagagaagagcaaggccgccaaggagctggccgagaacaagaagaagattgatgccctgctggactgggtgacctctgtgggcagcagcggcggccagctgctgaccaacctgcccggcatggagcagctgagcggggccagcctggagaagggggccctggacaccacagatggctacatgggcgtgaaccaggcccctgagaagctggacaagcagtgtgagatgatgaaggcccggcaccaggagctgctgagccagcagcagaacttcatcctggccacccagagcgcccaggccttcctggaccagcacggccacaacctgaccccagaggagcagcagatgctgcagcagaagctgggggagctgaaggagcagtacagcaccagcctggcccagagcgaggccgagctgaagcaggtgcagaccctgcaggatgagctgcagaagttcctgcaggaccacaaggagtttgagagctggctggagaggtctgagaaggagctggagaacatgcacaagggcggcagcagccctgagaccctgcccagcctgctgaagaggcagggcagcttctctgaagatgtgatcagccacaagggggacctgcgctttgtgaccatcagcggccagaaggtgctggacatggagaacagcttcaaggagggcaaggagcccagcgagatcggcaacctggtgaaggacaagctgaaggatgccacagagcgctacacagccctgcacagcaagtgcacccggctgggcagccacctgaacatgctgctgggccagtaccaccagttccagaacagcgctgacagcctgcaggcctggatgcaggcctgtgaggccaacgtggagaagctgctgagtgacacagtggccagtgaccccggggtgctgcaggagcagctggccaccaccaagcagctgcaggaggagctggccgagcaccaggtgcctgtggagaagctgcagaaggtggcccgggacatcatggagattgaaggagagcccgccccagaccaccgccacgtgcaggagaccacagacagcatcctgagccacttccagagcctgagctacagcctggccgagaggagcagcctgctgcagaaggccatcgcccagagccagagcgtgcaggagagcctggagagcctgctgcagagcattggagaggtggagcagaacctggagggcaagcaggtgagcagcctgagcagcggggtcatccaggaggccctggccaccaacatgaagctgaagcaggacatcgcccggcagaagagcagcctggaggccacccgggagatggtgacccgcttcatggagacagctgacagcaccacagctgctgtgctgcagggcaagctggccgaggtgtcccagagatttgagcagctgtgcctgcagcagcaggagaaggagagcagcctgaagaagctgctgccccaggccgagatgtttgagcacctgagcggcaagctgcagcagttcatggagaacaagagcaggatgctggccagcggcaaccagcctgaccaggacatcacccacttcttccagcagatccaggagctgaacctggagatggaggaccagcaggagaacctggacaccctggagcacctggtgacagagctgagcagctgtggctttgccctggacctgtgccagcaccaggacagagtgcagaacctgaggaaggacttcacagagctgcagaagacagtgaaggagcgggagaaggatgccagcagctgccaggagcagctggatgagttcaggaagctggtgaggaccttccagaagtggctgaaggagacagagggcagcatccccccaacagagacctccatgtctgccaaggagctggagaagcagatcgagcacctgaagagcctgctggatgactgggccagcaagggcaccctggtggaggagatcaactgcaagggcaccagcctggagaacctgatcatggagatcacagccccagacagccagggcaagacaggcagcatcctgcccagcgtgggcagctctgtgggctctgtgaatggctaccacacctgcaaggacctgacagagatccagtgtgacatgtctgatgtgaacctgaagtatgagaagctgggcggcgtgctgcacgagcggcaggagagcctgcaggccatcctgaacaggatggaggaggtgcacaaggaggccaacagcgtgctgcagtggctggagagcaaggaggaggtgctgaagtccatggatgccatgagcagccccaccaagacagaaacagtgaaggcccaggccgagagcaacaaggccttcctggccgagctggagcagaacagccccaagatccagaaggtgaaggaggccctggccggcctgctggtgacctaccccaacagccaggaggccgagaactggaagaagatccaggaggagctgaacagccgctgggagcgggccacagaggtgacagtggcccggcagaggcagctggaggagagcgccagccacctggcctgcttccaggccgctgagagccagctgcggccctggctgatggagaaggagctgatgatgggcgtgctgggccccctgagcattgaccccaacatgctgaatgcccagaagcagcaggtgcagttcatgctgaaggagtttgaggcccggcggcagcagcacgagcagctgaatgaagctgcccagggcatcctgactggacctggagatgtgtccctgagcaccagccaggtgcagaaggagctgcagagcatcaaccagaagtgggtggagctgacagacaagctgaacagccgcagcagccagattgaccaggccatcgtgaagagcacccagtaccaggagctgctgcaggacctgtctgagaaggtgcgggctgtgggccagaggctgtctgtgcagagcgccatcagcacccagcctgaggccgtgaagcagcagctggaggagaccagcgagatccgcagtgacctggagcagctggaccacgaggtgaaggaggcccagaccctgtgtgatgagctgtctgtgctgattggagagcagtacctgaaggatgagctgaagaagaggctggagaccgtggccctgcccctgcagggcctggaggacctggccgctgaccgcatcaaccggctgcaggccgccctggccagcacccagcagttccagcagatgtttgatgagctgcggacctggctggatgacaagcagagccagcaggccaagaactgccccatcagcgccaagctggagcggctgcagagccagctgcaggagaatgaggagttccagaagagcctgaaccagcacagcggcagctatgaggtgattgtggccgagggggagagcctgctgctgtctgtgcccccaggagaggagaagaggaccctgcagaaccagctggtggagctgaagaaccactgggaggagctgagcaagaagacagctgaccggcagagccggctgaaggactgcatgcagaaggcccagaagtaccagtggcacgtggaggacctggtgccctggattgaggactgcaaggccaagatgtctgagctgcgggtgaccctggaccctgtgcagctggagagcagcctgctgcggagcaaggccatgctgaatgaggtggagaagagaagaagcctgctggagatcctgaacagcgctgctgacatcctgatcaacagcagcgaggctgatgaagatggcatcagagatgagaaggccggcatcaaccagaacatggatgctgtgacagaggagctgcaggccaagacaggcagcctggaggagatgacccagaggctgcgggagttccaggagagcttcaagaacatcgagaagaaggtggagggcgccaagcaccagctggagatctttgatgccctgggcagccaggcctgcagcaacaagaacctggagaagctgcgggcccagcaggaggtgctgcaggccctggagccccaggtggactacctgaggaacttcacccagggcctggtggaggatgccccagatggcagtgatgccagccagctgctgcaccaggccgaggtggcccagcaggagttcctggaggtgaagcagagggtgaacagcggctgtgtgatgatggagaacaagctggagggcatcggccagttccactgccgggtgcgggagatgttcagccagctggccgacctggatgatgagctggatggcatgggcgccatcggccgggacacagacagcctgcagagccagattgaagatgtgcggctcttcctgaacaagatccacgtgctgaagctggacatcgaggccagcgaggccgagtgccgccacatgctggaggaggagggcaccctggacctgctgggcctgaagcgggagctggaggccctgaacaagcagtgtgggaagctgacagagcggggcaaggcccggcaggagcagctggagctgaccctgggccgggtggaggacttctacaggaagctgaagggcctgaatgatgccaccacagctgctgaggaggccgaggccctgcagtgggtggtgggcacagaggtggagatcatcaaccagcagctggccgacttcaagatgttccagaaggagcaggtggaccccctgcagatgaagctgcagcaggtgaatggcctgggccagggcctcatccagagcgctgggaaggactgtgatgtgcagggcctggagcatgacatggaggagatcaatgcccgctggaacaccctgaacaagaaggtggcccagagaattgcccagctgcaggaggccctgctgcactgcggcaagttccaggatgccctggagcccctgctgtcctggctggccgacacagaggagctgattgccaaccagaagcccccatctgctgagtacaaggtggtgaaggcccagatccaggagcagaagctgctgcagaggctgctggatgacaggaaggccaccgtggacatgctgcaggccgagggcggccgcatcgcccagagcgctgagctggccgaccgggagaagatcaccggccagctggagagcctggagagccgctggacagagctgctgagcaaggctgctgcccggcagaagcagctggaggacatcctggtgctggccaagcagttccacgagacagctgagcccatcagtgacttcctgtctgtgacagagaagaagctggccaacagcgagcctgtgggcacccagacagccaagatccagcagcagatcatccgccacaaggccctggaggaggacattgaaaatcatgccacagatgtgcaccaggccgtgaagattggccagagcctgagcagcctgaccagccctgctgagcagggcgtgctgtctgagaagattgacagcctgcaggcccgctacagcgagatccaggaccgctgctgcaggaaggccgccctgctggaccaggccctgagcaatgcccggctgtttggagaagatgaggtggaggtgctgaactggctggccgaggtggaggacaagctgagctctgtgtttgtgaaggacttcaagcaggatgtgctgcaccggcagcacgccgaccacctggccctgaatgaggagatcgtgaacaggaagaagaatgtggaccaggccatcaagaatggccaggccctgctgaagcagaccactggagaggaggtgctgctgatccaggagaagctggatggcatcaagaccaggtatgctgacatcaccgtgaccagcagcaaggccctgcggaccctggagcaggcccggcagctggccaccaagttccagagcacctatgaggagctgaccggctggctgcgggaggtggaggaggagctggccaccagcggcggccagagccccaccggggagcagatcccccagttccagcagaggcagaaggagctgaagaaggaggtgatggagcaccggctggtgctggacacagtgaatgaggtgtcccgggccctgctggagctggtgccctggagggcccgggagggcctggacaagctggtgtctgatgccaatgagcagtacaagctggtgtctgacaccatcggccagagggtggatgaaattgatgctgccatccagaggagccagcagtatgagcaggccgcagatgctgagctggcctgggtggccgagaccaagaggaagctgatggccctgggccccatccggctggagcaggaccagaccacagcccagctgcaggtgcagaaggccttcagcattgacatcatccgccacaaggacagcatggatgagctgttcagccacaggtctgagatcttcggcacctgtggggaggagcagaagacagtgctgcaggagaagacagagagcctcatccagcagtatgaggccatcagcctgctgaacagcgagagatatgcccggctggagcgggcccaggtgctggtgaaccagttctgggagacctatgaggagctgagcccctggattgaggagacccgggccctgattgcccagctgcccagccctgccatcgaccacgagcagctgcggcagcagcaggaggagatgaggcagctgcgggagagcattgctgagcacaagccccacatcgacaagctgctgaagattggcccccagctgaaggagctgaaccctgaggagggggagatggtggaggagaagtaccagaaggccgagaacatgtatgcccagatcaaggaggaggtgcggcagagggccctggccctggatgaggccgtgtcccagagcacccagatcacagagttccatgacaagattgagcccatgctggagaccctggagaacctgagcagccggctgaggatgcctcctctcatcccagctgaggtggacaagatccgggagtgcatcagtgacaacaagagcgccaccgtggagctggagaagctgcagcccagctttgaggccctgaagagaagaggagaggagctgattggccgcagccagggcgctgacaaggacctggccgccaaggagatccaggacaagctggaccagatggtgttcttctgggaggacatcaaggcccgggcagaggagcgggagatcaagttcctggatgtgctggagctggccgagaagttctggtatgacatggccgccctgctgaccaccatcaaggacacccaggacatcgtgcatgacctggagagccctggcatcgaccccagcatcatcaagcagcaggtggaggccgctgagaccatcaaggaggagacagatggcctgcacgaggagctggagttcatccgcatcctgggcgctgacctgatctttgcctgtggggagacagagaagccagaggtgaggaagagcattgatgagatgaacaatgcctgggagaacctgaacaagacctggaaggagcggctggagaagctggaggatgccatgcaggccgctgtgcagtaccaggacaccctgcaggccatgtttgactggctggacaacacagtcatcaagctgtgcaccatgcctcctgtgggcacagacctgaacacagtgaaggaccagctgaatgagatgaaggagttcaaggtggaggtgtaccagcagcagatcgagatggagaagctgaaccaccagggcgagctgatgctgaagaaggccacagatgaaacagaccgggacatcatccgggagcccctgacagagctgaagcacctgtgggagaacctgggggagaagatcgcccaccggcagcacaagctggagggcgccctgctggccctgggccagttccagcacgccctggaggagctgatgtcctggctgacccacacagaggagctgctggatgcccagaggcccatcagcggggaccccaaggtgattgaggtggagctggccaagcaccacgtgctgaagaatgatgtgctggcccaccaggccaccgtggagaccgtgaacaaggctggaaatgagctgctggagagcagcgctggagatgatgccagcagcctgcggagccggctggaggccatgaaccagtgctgggagagcgtgctgcagaagacagaggagcgggagcagcagctgcagagcaccctgcagcaggcccagggcttccacagcgagattgaggacttcctgctggagctgaccaggatggagagccagctgagcgccagcaagcccactggaggcctgcctgagacagcccgggagcagctggacacccacatggagctgtacagccagctgaaggccaaggaggagacctacaaccagctgctggacaagggccgcctgatgctgctgagcagagatgacagcggcagcggcagcaagacagagcagagcgtggccctgctggagcagaagtggcacgtggtgagcagcaagatggaggagaggaagagcaagctggaggaggccctgaacctggccacagagttccagaacagcctgcaggagttcatcaactggctgaccctggccgagcagagcctgaacatcgccagcccccccagcctcatcctgaacacagtgctgagccagatcgaggagcacaaggtgtttgccaatgaggtgaatgcccaccgggaccagatcatcgagctggaccagacaggcaaccagctgaagttcctgagccagaagcaggatgtggtgctgatcaagaacctgctggtgtctgtgcagagccgctgggagaaggtggtgcagaggagcattgaaagaggccgcagcctggatgatgccaggaagagggccaagcagttccacgaggcctggaagaagctgattgactggctggaggatgctgagagccacctggacagcgagctggagatcagcaatgaccctgacaagatcaagctgcagctgagcaagcacaaggagttccagaagaccctgggcggcaagcagcctgtgtatgacaccaccatcagaacaggccgggccctgaaggagaagaccctgctgcctgaggacagccagaagctggacaacttcctgggggaggtgcgggacaagtgggacacagtgtgtgggaagtctgtggagcggcagcacaagctggaggaggccctgctcttcagcggccagttcatggatgccctgcaggccctggtggactggctgtacaaggtggagccccagctggccgaggaccagcctgtgcatggagacctggacctggtgatgaacctgatggatgcccacaaggtgttccagaaggagctgggcaagaggactggaacagtgcaggtgctgaagaggagcggccgggagctgattgagaacagcagagatgacaccacctgggtgaagggccagctgcaggagctgagcacccgctgggacacagtgtgcaagctgtctgtgtccaagcagagccggctggagcaggccctgaagcaggccgaggtgttccgggacacagtgcacatgctgctggagtggctgtctgaggccgagcagaccctgcgcttccggggggccctgcctgatgacacagaggccctgcagagcctgattgacacccacaaggagttcatgaagaaggtggaggagaagagggtggatgtgaacagcgctgtggccatgggagaggtgatcctggccgtgtgccacccagactgcatcaccaccatcaagcactggatcaccatcatccgggccaggtttgaggaggtgctgacctgggccaagcagcaccagcagaggctggagacagccctgtctgagctggtggccaatgctgagctgctggaggagctgctggcctggatccagtgggccgagaccaccctcatccagagggaccaggagcccatcccccagaacatcgacagagtgaaggccctgattgctgagcaccagaccttcatggaggagatgaccaggaagcagccagatgtggacagagtgaccaagacctacaagaggaagaacatcgagcccacccacgcccccttcatcgagaagagccgcagcggcggcaggaagagcctgagccagcccaccccaccacccatgcccatcctgagccagagcgaggccaagaacccccgcatcaaccagctgagcgcccgctggcagcaggtgtggctgctggccctggagcggcagaggaagctgaatgatgccctggaccggctggaggagctgaaggagtttgccaactttgattttgatgtgtggaggaagaagtacatgcgctggatgaaccacaagaagagccgggtgatggacttcttcagaagaattgacaaggaccaggacggcaagatcacccggcaggagttcattgatggcatcctggccagcaagttccccaccaccaagctggagatgacagctgtggccgacatctttgacagagatggagatggctacatcgactactatgaatttgtggccgccctgcaccccaacaaggatgcctaccggcccaccacagatgctgacaagattgaagatgaggtgacccggcaggtggcccagtgcaagtgtgccaagcgcttccaggtggagcagatcggggagaacaagtacagatttggagacagccagcagctgcggctggtgcgcatcctgcggagcacagtgatggtgcgggtgggcggcggctggatggccctggatgagttcctggtgaagaatgacccctgccgggcccggggccgcaccaacatcgagctgcgggagaagttcatcctgcctgagggcgccagccagggcatgacccccttccgcagccggggccgccgcagcaagcccagcagccgggccgccagccccaccaggagcagcagcagcgccagccagagcaaccacagctgcacctccatgcccagcagccctgccaccccagccagcggcaccaaggtgatccccagcagcggcagcaagctgaagaggcccacccccaccttccacagcagcaggaccagcctggccggggacaccagcaacagcagcagccctgccagcactggagccaagaccaacagagctgaccccaagaagagcgccagccggcccggcagccgggccggcagccgggccggcagccgggccagcagcagaagaggaagtgatgccagtgactttgacctgctggagacccagagcgcctgcagcgacaccagcgagagcagcgctgctgggggccagggcaacagccggcggggcctgaacaagcccagcaagatccccaccatgagcaagaagaccaccacagccagccccaggaccccaggccccaagaggtag

SEQ ID NO: 159746 - DNA, 3189 bp, synthetic construct
  misc_feature 1..3189: note = Description of Artificial Sequence: Synthetic coding sequence
  source 1..3189: mol_type = other DNA
atgggcaacagcctgggctgcttcaaggagcccaaggagagcatcgccatccctgagaaggcccccatcagccccaagaagagggtgcgcttcaagaggcgctggaggggcaagaagatccccaccccagaggccagccaccaggaggagaccagcgagggcactggagtcatcgaggagacagagaccctgaccaagctgacagagagcctgcagaaggaggatggagtgggcggcgtggagcacaccccaccagacatcctgctgcccggggacagcgcccccaacagccgggtggtggaccggggcatgattgtgcaggtgaaggagcgcttccagggcgaggtgcagacagcccacctgctgctggagaatgaatcttctgtggccggcggcgtgtgggacagcctggaggagggcatgaccgtcatcgcccacctgctggacaacccagctgagaggaactgtgagaagtctgtgtcccagctggtggagttccccaggacagccagctgcagcagcagagctgtgctgctgcccctgcagggcgagacagctgtggagaagggcaacatccagaggggcttccgcagctgtgccctgcccaggacagactaccccacagacaagggcaaccaggagcagttcagcgagggctggagcgtggaggagggcaccaagtctgtgtctggggccccccagacagcctcctggatcattgaatgttctgtgagcagcctgctgctggaccagcccggcggccagaggagaacagagcccagccacgtgggccaggtgcccccccaggacagccggctgcccaccagccagagcgacctgagcatctctggagtgacagtgtccatcctgcccagcagcagcggctacggcagtgatggcccccacatccacggcatccagcccaaggacacagagcctgagaagagcagcaccagcttctctgaagaagatggcaccctgagcctggaggccagccacacccccagctggggcctggaggagatcagtgacatctacatcagcggggagagcggggacatgtctgccaaggagaagctgctgctgtggacccagaaggtgacagctggctacacaggcatcaagtgcaccaacttcagcagctgctggagcgatggcaagatgtttaatgccctgatccaccgctacagaccagacctggtggacatggagcgggtgcagatccagagcaaccgggagaacctggagcaggcctttgaggtggccgagcggctgggcgtgacccggctgctggatgctgaagatgtggatgtgcccagcccagatgagaagagcgtcatcacctacgtgagcagcatctatgatgccttccccaaggtgcctgagggcggggagggcatcagcgccacagaggtggacagccgctggcaggagtaccagagccgggtggacagcctcatcccctggatcaagcagcacaccatcctgatgtctgacaagaccttcccccagaaccctgtggagctgaaggccctgtacaaccagtacatccacttcaaggagacagagatcctggccaaggagcgggagaagggccgcatcgaggagctgtacaagctgctggaggtgtggattgaatttggccgcatcaagctgccccagggctaccaccccaatgatgtggaggaggagtggggcaagctgatcatcgagatgctggagcgggagaagagcctgcggcctgctgtggagcggctggagctgctgctgcagatcgccaacaagatccagaatggagccctgaactgtgaggagaagctgaccctggccaagaacaccctgcaggctgatgctgcccacctggagagcggccagcctgtgcagtgtgagagtgatgtgatcatgtacatccaggagtgtgagggcctcatccggcagctgcaggtggacctgcagatcctgagagatgagaactactaccagctggaggagctggccttccgggtgatgaggctgcaggatgagctggtgaccctgcggctggagtgcaccaacctgtacaggaagggccacttcaccagcctggagctggtgccccccagcaccctgaccaccacccacctgaaggccgagcccctgaccaaggccacccacagcagcagcacctcctggttcaggaagcccatgaccagggctgagctggtggccatcagcagcagtgaagatgagggcaacctgcgctttgtgtatgagctgctgtcctgggtggaggagatgcagatgaagctggagcgggcagagtggggcaatgacctgcccagcgtggagctgcagctggagacccagcagcacatccacacctctgtggaggagctgggcagctctgtgaaggaggcccggctgtatgagggcaagatgagccagaacttccacaccagctatgcagagaccctgggcaagctggagacccagtactgcaagctgaaggagaccagcagcttcaggatgaggcacctgcagagcctgcacaagtttgtgtcccgggccacagctgagctgatctggctgaatgagaaggaggaggaggagctggcctatgactggagcgacaacaacagcaacatcagcgccaagaggaactacttcagcgagctgaccatggagctggaggagaagcaggatgtgttccgcagcctgcaggacacagctgagctgctgagcctggagaaccacccagccaagcagacagtggaggcctacagcgctgctgtgcagagccagctgcagtggatgaagcagctgtgcctgtgtgtggagcagcacgtgaaggagaacacagcctacttccagttcttcagtgatgcccgggagctggagagcttcctgaggaacctgcaggacagcatcaagaggaagtacagctgtgaccacaacaccagcctgagccggctggaggacctgctgcaggacagcatgttccaggatgagaaggagcagctgatccagagcaagagctctgtggccagcctggtgggccgcagcaagaccatcgtgcagctgaagcccaggagcccagaccacgtgctgaagaacaccatctctgtgaaggctgtgtgtgactaccggcagatcgagggccgcaccatcctgtctgagggctacggccccctggccagcgctgcctgctag

SEQ ID NO: 159747 - DNA, 22167 bp, synthetic construct
  misc_feature 1..22167: note = Description of Artificial Sequence: Synthetic coding sequence
  source 1..22167: mol_type = other DNA
atgagcagcagtgatgaggagaccctgtctgagaggagctgccgctctgagaggagctgccgctctgagaggagctacagaagtgagaggagcggcagcctgagcccctgccccccaggggacaccctgccctggaacctgcccctgcacgagcagaagaagaggaagagccaggacagcgtgctggaccctgctgagagagctgtggtgcgggtggctgatgagcgggacagagtgcagaagaagaccttcaccaagtgggtgaacaagcacctgatgaaggtgaggaagcacatcaatgacctgtatgaggacctgagagatggccacaacctgatcagcctgctggaggtgctgagcggcatcaagctgccccgggagaagggccgcatgaggttccaccggctgcagaatgtgcagatcgccctggacttcctgaagcagaggcaggtgaagctggtgaacatcagaaatgatgacatcacagatggcaaccccaagctgaccctgggcctcatctggaccatcatcctgcacttccagatcagtgacatctacatcagcggggagagcggggacatgtctgccaaggagaagctgctgctgtggacccagaaggtgacagctggctacacaggcatcaagtgcaccaacttcagcagctgctggagcgatggcaagatgtttaatgccctgatccaccgctacagaccagacctggtggacatggagcgggtgcagatccagagcaaccgggagaacctggagcaggcctttgaggtggccgagcggctgggcgtgacccggctgctggatgctgaagatgtggatgtgcccagcccagatgagaagagcgtcatcacctacgtgagcagcatctatgatgccttccccaaggtgcctgagggcggggagggcatcagcgccacagaggtggacagccgctggcaggagtaccagagccgggtggacagcctcatcccctggatcaagcagcacaccatcctgatgtctgacaagaccttcccccagaaccctgtggagctgaaggccctgtacaaccagtacatccacttcaaggagacagagatcctggccaaggagcgggagaagggccgcatcgaggagctgtacaagctgctggaggtgtggattgaatttggccgcatcaagctgccccagggctaccaccccaatgatgtggaggaggagtggggcaagctgatcatcgagatgctggagcgggagaagagcctgcggcctgctgtggagcggctggagctgctgctgcagatcgccaacaagatccagaatggagccctgaactgtgaggagaagctgaccctggccaagaacaccctgcaggctgatgctgcccacctggagagcggccagcctgtgcagtgtgagagtgatgtgatcatgtacatccaggagtgtgagggcctcatccggcagctgcaggtggacctgcagatcctgagagatgagaactactaccagctggaggagctggccttccgggtgatgaggctgcaggatgagctggtgaccctgcggctggagtgcaccaacctgtacaggaagggccacttcaccagcctggagctggtgccccccagcaccctgaccaccacccacctgaaggccgagcccctgaccaaggccacccacagcagcagcacctcctggttcaggaagcccatgaccagggctgagctggtggccatcagcagcagtgaagatgagggcaacctgcgctttgtgtatgagctgctgtcctgggtggaggagatgcagatgaagctggagcgggcagagtggggcaatgacctgcccagcgtggagctgcagctggagacccagcagcacatccacacctctgtggaggagctgggcagctctgtgaaggaggcccggctgtatgagggcaagatgagccagaacttccacaccagctatgcagagaccctgggcaagctggagacccagtactgcaagctgaaggagaccagcagcttcaggatgaggcacctgcagagcctgcacaagtttgtgtcccgggccacagctgagctgatctggctgaatgagaaggaggaggaggagctggcctatgactggagcgacaacaacagcaacatcagcgccaagaggaactacttcagcgagctgaccatggagctggaggagaagcaggatgtgttccgcagcctgcaggacacagctgagctgctgagcctggagaaccacccagccaagcagacagtggaggcctacagcgctgctgtgcagagccagctgcagtggatgaagcagctgtgcctgtgtgtggagcagcacgtgaaggagaacacagcctacttccagttcttcagtgatgcccgggagctggagagcttcctgaggaacctgcaggacagcatcaagaggaagtacagctgtgaccacaacaccagcctgagccggctggaggacctgctgcaggacagcatggatgagaaggagcagctgatccagagcaagagctctgtggccagcctggtgggccgcagcaagaccatcgtgcagctgaagcccaggagcccagaccacgtgctgaagaacaccatctctgtgaaggctgtgtgtgactaccggcagatcgagatcaccatctgcaagaatgatgaatgtgtgctggaggacaacagccagaggaccaagtggaaggtgatcagccccactggaaatgaggccatggtgcccagcgtgtgcttcctgatccccccacccaacaaggatgccatcgagatggccagccgggtggagcagagctaccagaaggtgatggccctgtggcaccagctgcacgtgaacaccaagagcctcatctcctggaactacctgaggaaggacctggacctggtgcagacctggaacctggagaagctgcggagcagcgcccctggagagtgccaccagatcatgaagaacctgcaggcccactatgaggacttcctgcaggacagccgggacagcgtgctcttctctgtggccgaccggctgcggctggaggaggaggtggaggcctgcaaggcccgcttccagcacctgatgaagtccatggagaatgaagacaaggaggagaccgtggccaagatgtacatcagcgagctgaagaacatccggctgcggctggaggagtatgagcagagggtggtgaagaggatccagagcctggccagcagcaggacagacagagatgcctggcaggacaatgccctgagaattgctgagcaggagcacacccaggaggacctgcagcagctgcggagtgacctggatgctgtgtccatgaagtgtgacagcttcctgcaccagagccccagcagcagctctgtgcccaccctgcggtctgagctgaacctgctggtggagaagatggaccacgtgtatggcctgagcacagtgtacctgaacaagctgaagacagtggatgtgattgtgcgcagcatccaggatgctgagctgctggtgaagggctatgagatcaagctgagccaggaggaggtggtgctggccgacctgagcgccctggaggcccactggagcaccctgcggcactggctgagtgatgtgaaggacaagaacagcgtcttctctgtgctggatgaggagatcgccaaggccaaggtggtggccgagcagatgagccggctgaccccagagaggaacctggacctggagcgctaccaggagaagggcagccagctgcaggagcgctggcacagggtcatcgcccagctggagatccggcagagcgagctggagagcatccaggaggtgctgggggactaccgggcctgccacggcaccctcatcaagtggattgaggagaccacagcccagcaggagatgatgaagccaggccaggccgaggacagccgggtgctgtctgagcagctgagccagcagacagccctgtttgctgagattgaaagaaaccagaccaagctggaccagtgccagaagttcagccagcagtacagcaccatcgtgaaggactatgagctgcagctgatgacctacaaggcctttgtggagagccagcagaagagccctgggaagagaagaaggatgctgagcagcagtgatgccatcacccaggagttcatggacctgcggacccgctacacagccctggtgaccctgaccacccagcacgtgaagtacatcagtgatgccctgcggcggctggaggaggaggagaaggtggtggaggaggagaagcaggagcacgtggagaaggtgaaggagctgctgggctgggtgtccaccctggccaggaacacccagggcaaggccaccagcagcgagaccaaggagagcacagacatcgagaaggccatcctggagcagcaggtgctgtctgaggagctgaccaccaagaaggagcaggtgtctgaggccatcaagaccagccagatcttcctggccaagcacggccacaagctgtctgagaaggagaagaagcagatcagcgagcagctgaatgccctgaacaaggcctaccatgacctgtgtgatggcagcgccaaccagctgcagcagctgcagagccagctggcccaccagacagagcagaaggagtgcagagctgtggccggggtcatcgacctgggcaccgtggagatcttccccatcttcaaggccatgcagaagggcctgctggaccaggacaccggcctggtgctgctggagagccaggtgatcatgagcggcctcatcgcccctgagaccggggagaacctgagcctggaggagggcatcgccaggaacctgatcaacccccagatgtaccagcagctgcgggagctgcaggatgccctggccctgatcagccggctgacagagagccggggccccctgtctgtggtggaggccatcgagaagaggatcatcagcgagaccgtgggcctgaagatcctggaggcccacctggccactggaggcttcagcctgagccccagcgagaactgcatcaacctggaggaggccttccaccagggcctcatcagcgcctggctgcacagcgtgctggagagctacctgcggaccagcaagaacctgattgaccccaacacagctgagaagattggcctgctggacctgatgcagcgctgcatcgtgcaccaggagagcggcttcaagctgctgcctgtgaagcagctggccggcggcatggtgtccctgaagagcggcaggaaggtgtccatcttccgggctgtgcaggagggcctgattgaccggcaggtgacagtgcggctgctggaggcccagctgtttgctgggggcatcgtggaccccaggacaggccaccggctgactgtggaggaggccgtgcgccacaacctgattgaccaggacatggcctgtgccatcctgatccggcagctgcagacaggaggcatcatcgacacagtgacaggccagaggctgaccattgatgaggccgtgtccaatgacctggtggccgccaagatcgccctggtgatcctggagagcctgtggagcttcatgggcctgctgtggccagagagcggggagatcctgcccatcacagatgccctggagcagggcatcgtgtccacagagctggcccacaagatcctgagcaaccggcagcacatcaaggccctcttcctgcctgccaccacagagatcctgtcctggaagaaggccattgaaagtggcatcctggaccgggacctggccaacaacctgaagagcatctgcatcccagatgtgatgccccacatgcagctggccgacagcgctgagcagaacatcaaccctggagctgctgtgctgccctgcagcaagagccaccccaaggccacagccagccagagcgagaacctgctcttccagctgatgacccacagctacatcaacgtgcagaatggccagaggctgctgctgctggacaaggagctgatggagaccctgaccagcagagatgagtaccagaccagcccccccaaggtggtggagatcggccaccagaggcagaagaccccagagggcctgcaggagagcgccaacgtgaagatcagcggcaccttcagcagcggctggacagtgcggctgcctgagttccagttcagcagccagaacaaggagtacccagaccgggaggactgcaccacagagaagggcaagaagaccaccgtggagacagaggacagctctgtggagaaccctgagcaggacctgtttgtggagcagaaggagaggaaccccaacattgatgccctgaaggtgatcaacaaggtgaagctggaggtgcagaggcagctgattggcacccagcgggaggaccagacagctgtgtctgtgagagaaaatgccagccggggccacctgctgaccatccccccagctgaggccgagggcgtgcccctggtggtggacaaggatgtgttttctgtggagacccccaagaaggagcaccagcccctgaggaacaccagcttcacctgccagaatgagcaggcccacaccctggagacagagtacatccatgatgagaccggcggcagccacatcaagccccagagcaagaagctgcaggtgcaggtgaagaagaccctgggcatcaagctggagctgaagtcagaaacagatggaaatgtgcaccccctggacaagaaggagatgctgaagaagaccttcctggccaaggatgaccacaaggagagccaggaggcccagaacattgctgggggctccatgatgatgtctgagaagacagatgaggaggacagcggccgggagatcttcctgagctgcagccaccccctggagctgctggaggaggccaccctgaatgtgctgagcgcccagctgctggatggcggcatcttccacgagcagacaggccagaagctgctgctgaatgaggccatcagccggggcatcgtgcccagccacacagctgtgaagctgatggagaagctgaacatgttccagggcttctttgacagccagacctgtgagagcctgaccacagaggaggtgatcaatgaaggcctgatggatgagaagctgctgcacaacgtgctgatggctgacaaggccatcagcggcgtgctggaccccaggacccagaccctgtgcagcgtgaaggatgctgtgacagtgggcctgctggacaaggagacagccacccgcatcctggagcggcaggtggtgactggaggcatcatcgacctgaagaggggcaagaaggtgtctgtgaccctggccagcaccctgggcctggtggatgtggccgaccagcctgagctgatcaacctggagaaggccagcaagggcagagatgctgagaagacagtgcgggagcggctcatcagcctgcagatggagaccaccggcctgattgatcctgacagcaaggcccccctgactgtggtgcagagcattgaccggggcctgctggagcgggaggaggccgtgcggctgctgaccaagcaggtggtggatggcggcatcatccaccacatcagcggcatgaggctgtctgtggacaatgccttcagacatggcctcatcggggaggacctggccgagaagctgaagagggtggagaacctgaacatccaccagatcttcaaccctgagaccaaggagaacatcagcctgcccaaggccatcaagctggacctgatcaccagtgacctgaagcgggagatccaggaggtgcaggccttcaccggcaactttgtggacctgatcagcggccagaggctgaccctggccgaggccaagaaggagggcctgctgaccaatgaagctgtgctgagccctggcatgatgcatggaattgtggaccctgagaactgcagaattgtgccctacagcgagctggtgaagaagtgcaagattgatattgaaagtggccagcgctacctggaggtgatccccttcagtgacatcaaggatggagtgtctgacaaggtgctgaccctgagccaggccatccagctgggcaaggtggactttgccagcaccctgaaggtgctggaggcccaggccaacacaggaggcatcatcgacacagccaccgggaagaggctgaccctggccagcgccctggaggagaagctggtggatgagaacatggtgcgcatcatcgccagccaccaggtgctgaatggaggcatcgtggacatcttcagtgaccagagggtgaccctggtggaggccatcgagaagaggctcatcagccctgagctggccaacatgatccagattgacagcagcgagttcagtgaccaccgggcccagatcgagaagcaggagggcatcgaggtgtgtgccctgcagaatgagttcctgggcaaggacatgctgattgcctgcaaccagacagctgagatgagctgcaacaaggtggaggagagcgagcggctcttccaggtggagaaccagagcgcccaggagaaggtgaaggtgcgggtgtctgatggagagcaggccaagaagagccgggagatcagcctgaaggagtttggctgcaaggaccagaggaagcccaggatgagcagtgatgccaaggagttcatcagcatcatcaacccccacaacctgaagggcaagagcctgggccaggtgtccctgacccacccctacagtgaatgtgacttcaagctgaaggaggtggccaggaacaacatgggaaatgacaccaatgaggagcaggagaaggctgtgaccaagattgagatcatcagccacatgaagcagagcaccagctgcctggacagcgaggagatccgggagaaccagggcgaggtgatcctggaggtgcaggagacctactgtgagaccagcggcaagctgcccagcgagcaggtgctgcagcagcccatgaatgcccgggtgaagagcaagcgggagaagcgggaggtgattgtggaggagagcatccgcacctgcaagccagccttcctgtctgaggagaagctgtaccaggagacagccatcagagatgaacatgacagccacatcaagagccagccccgggagatgaccagcagcgagaagggcaaggaggccgacacagagatgggcttcagcatcaccttcaagattgaggagagcagcagccaggtggtgccccagggcatctctgtgaagcacctggatgccctgaccctcttcagcagcaagcaggccaatgaaggcaaggtgaacaacctgagcctgtgcctgaccctgaagccagaggagaacctgagccgggagatcgcctgtggggcccagagcgagcccttcccctgcatgacccccaggcctgagggcctgcactaccaggagagtgatggcaaggcccaggtgacaggccccagccagatcagcaagacagacaagagcttccagggcaccacccggcaggagaccaactaccaggacagctgggtgaccagcaagaccaaggagaccaagcaccagatcagcagcagcaatgaatgcaaggagaagagctaccaggaggtgtcctttgatcctgcccggggcctgaagctggaggagatcaccgtgtccaggccagacagcaaggaggtgcgctacctggagttcagtgacaggaaggacctgcaccaccagggcagcaagagtgatgacaagctgtgtggcaccctgaagtctgagatcgccacccaggagctgaccggggagaagttcctggagatggccaaccccaacgtggccggcctggaggccggcagcattgaagatattgtgacccagaggggcagccgggtgctgggcagcttcctgcctgagaagctgttcaagggcgtgtcccagaaggagaacacaggccagcagaatgccatcatcagccccaccgtgctggagaccagcgaggagaagacagtgtccctgactgtgtgcagcgctgtgaagacagagaagaccccccaggagaagctgcgggagagccctggcagcgagcagacccccttcatgacagcccctgagggcaaaggaaatggaggagtgaaccctgagcccttccgggccacccagaatgtgttcacccggcagctgtgcctggagcatgatgagaagctggtgtcctacctgagcctgctgagaaatattgagatgaggaccaagcagatccagcccctggagctgaacctggccgagctgcaggacctgctgtgccaggccaaggtgctggagcgggagctgaaggacctgaccaccctggtgtcccaggagctggagtgtgtgaaccagatcatcatcagccagccccaggaggtgcctgcccagctgctgaaggccctggagaaggatgccaagaacctgcagaagagcctgagctctgtgtctgacacctggaacagccggctgctgcacttccagaatgctgtggagattgagaagaccaaggtgctgaaccagcacacccagctggagggccgcctgcaggacctgcgggcctgggtgggcaacaagaacctgatcctgaacagcaagggcagcaacagcgagattgatgtggacagcctgaacctgtgcctgcagcagtatgaggacctgaagcagcccatggccgagaggaaggcccagctggatgccctggcctttgacatccagttcttcatcagcgagcacgcccaggacctgagcccccagcagaaccggcagatgctgcggctgctgaatgagctgcagaggagcttccaggacatcctggagcagacagctgcccaggtggatgccctgcagggccacctgcagcagatggagcaggaggccctggtgaagaccctgcagaagcagcagaacacctgccaccagcagctggaggacctgtgctcctgggtgggccaggccgagcgggccctggccggccaccagggccgcaccacccagcaggacctgagcgccctgcagaagaaccagagcgacctgaaggacctgcaggatgacatccagaacagagccaccagctttgccaccgtggtgaaggacatcgagggcttcatggaggagaaccagaccaagctgagcccccgggagctgacagccctgcgggagaagctgcaccaggccaaggagcagtatgaggccctgcaggaggagaccagggtggcccagaaggagctggaggaggccgtgaccagcgccctgcagcaggagacagagaagagcaaggccgccaaggagctggccgagaacaagaagaagattgatgccctgctggactgggtgacctctgtgggcagcagcggcggccagctgctgaccaacctgcccggcatggagcagctgagcggggccagcctggagaagggggccctggacaccacagatggctacatgggcgtgaaccaggcccctgagaagctggacaagcagtgtgagatgatgaaggcccggcaccaggagctgctgagccagcagcagaacttcatcctggccacccagagcgcccaggccttcctggaccagcacggccacaacctgaccccagaggagcagcagatgctgcagcagaagctgggggagctgaaggagcagtacagcaccagcctggcccagagcgaggccgagctgaagcaggtgcagaccctgcaggatgagctgcagaagttcctgcaggaccacaaggagtttgagagctggctggagaggtctgagaaggagctggagaacatgcacaagggcggcagcagccctgagaccctgcccagcctgctgaagaggcagggcagcttctctgaagatgtgatcagccacaagggggacctgcgctttgtgaccatcagcggccagaaggtgctggacatggagaacagcttcaaggagggcaaggagcccagcgagatcggcaacctggtgaaggacaagctgaaggatgccacagagcgctacacagccctgcacagcaagtgcacccggctgggcagccacctgaacatgctgctgggccagtaccaccagttccagaacagcgctgacagcctgcaggcctggatgcaggcctgtgaggccaacgtggagaagctgctgagtgacacagtggccagtgaccccggggtgctgcaggagcagctggccaccaccaagcagctgcaggaggagctggccgagcaccaggtgcctgtggagaagctgcagaaggtggcccgggacatcatggagattgaaggagagcccgccccagaccacagacatgtgcaggagaccacagacagcatcctgagccacttccagagcctgagctacagcctggccgagaggagcagcctgctgcagaaggccatcgcccagagccagagcgtgcaggagagcctggagagcctgctgcagagcatcggggaggtggagcagaacctggagggcaagcaggtgagcagcctgagcagtggagtcatccaggaggccctggccaccaacatgaagctgaagcaggacatcgcccggcagaagagcagcctggaggccacccgggagatggtgacccgcttcatggagacagctgacagcaccacagctgctgtgctgcagggcaagctggccgaggtgtcccagagatttgagcagctgtgcctgcagcagcaggagaaggagagcagcctgaagaagctgctgccccaggccgagatgtttgagcacctgagcggcaagctgcagcagttcatggagaacaagagcaggatgctggccagcggcaaccagcctgaccaggacatcacccacttcttccagcagatccaggagctgaacctggagatggaggaccagcaggagaacctggacaccctggagcacctggtgacagagctgagcagctgtggctttgccctggacctgtgccagcaccaggacagagtgcagaacctgaggaaggacttcacagagctgcagaagacagtgaaggagcgggagaaggatgccagcagctgccaggagcagctggatgagttcaggaagctggtgaggaccttccagaagtggctgaaggagacagagggcagcatccccccaacagagacctccatgtctgccaaggagctggagaagcagatcgagcacctgaagagcctgctggatgactgggccagcaagggcaccctggtggaggagatcaactgcaagggcaccagcctggagaacctgatcatggagatcacagccccagacagccagggcaagacaggcagcatcctgcccagcgtgggcagctctgtgggctctgtgaatggctaccacacctgcaaggacctgacagagatccagtgtgacatgtctgatgtgaacctgaagtatgagaagctgggcggcgtgctgcacgagcggcaggagagcctgcaggccatcctgaacaggatggaggaggtgcacaaggaggccaacagcgtgctgcagtggctggagagcaaggaggaggtgctgaagtccatggatgccatgagcagccccaccaagacagagaccgtgaaggcccaggccgagagcaacaaggccttcctggccgagctggagcagaacagccccaagatccagaaggtgaaggaggccctggccggcctgctggtgacctaccccaacagccaggaggccgagaactggaagaagatccaggaggagctgaacagccgctgggagcgggccacagaggtgacagtggcccggcagaggcagctggaggagagcgccagccacctggcctgcttccaggccgctgagagccagctgcggccctggctgatggagaaggagctgatgatgggcgtgctgggccccctgagcattgaccccaacatgctgaatgcccagaagcagcaggtgcagttcatgctgaaggagtttgaggcccggcggcagcagcacgagcagctgaatgaggccgcccagggcatcctgaccggccctggagatgtgtccctgagcaccagccaggtgcagaaggagctgcagagcatcaaccagaagtgggtggagctgacagacaagctgaacagccgcagcagccagattgaccaggccatcgtgaagagcacccagtaccaggagctgctgcaggacctgtctgagaaggtgcgggctgtgggccagaggctgtctgtgcagagcgccatcagcacccagcctgaggccgtgaagcagcagctggaggagaccagcgagatccgcagtgacctggagcagctggaccacgaggtgaaggaggcccagaccctgtgtgatgagctgtctgtgctgattggagagcagtacctgaaggatgagctgaagaagaggctggagaccgtggccctgcccctgcagggcctggaggacctggccgctgaccgcatcaaccggctgcaggccgccctggccagcacccagcagttccagcagatgtttgatgagctgcggacctggctggatgacaagcagagccagcaggccaagaactgccccatcagcgccaagctggagcggctgcagagccagctgcaggagaatgaggagttccagaagagcctgaaccagcacagcggcagctatgaagtcatcgtggccgagggggagagcctgctgctgtctgtgcccccaggagaggagaagaggaccctgcagaaccagctggtggagctgaagaaccactgggaggagctgagcaagaagacagctgaccggcagagccggctgaaggactgcatgcagaaggcccagaagtaccagtggcacgtggaggacctggtgccctggattgaggactgcaaggccaagatgtctgagctgcgggtgaccctggaccctgtgcagctggagagcagcctgctgcggagcaaggccatgctgaatgaggtggagaagaggaggagcctgctggagatcctgaacagcgctgctgacatcctgatcaacagcagcgaggctgatgaagatggcatcagagatgagaaggccggcatcaaccagaacatggatgctgtgacagaggagctgcaggccaagacaggcagcctggaggagatgacccagaggctgcgggagttccaggagagcttcaagaacatcgagaagaaggtggagggcgccaagcaccagctggagatctttgatgccctgggcagccaggcctgcagcaacaagaacctggagaagctgcgggcccagcaggaggtgctgcaggccctggagccccaggtggactacctgaggaacttcacccagggcctggtggaggatgccccagatggcagtgatgccagccagctgctgcaccaggccgaggtggcccagcaggagttcctggaggtgaagcagagggtgaacagcggctgtgtgatgatggagaacaagctggagggcatcggccagttccactgccgggtgcgggagatgttcagccagctggccgacctggatgatgagctggatggcatgggcgccatcggccgggacacagacagcctgcagagccagattgaagatgtgcggctcttcctgaacaagatccacgtgctgaagctggacatcgaggccagcgaggctgaatgtcgccacatgctggaggaggagggcaccctggacctgctgggcctgaagcgggagctggaggccctgaacaagcagtgtgggaagctgacagagcggggcaaggcccggcaggagcagctggagctgaccctgggccgggtggaggacttctacaggaagctgaagggcctgaatgatgccaccacagctgctgaggaggccgaggccctgcagtgggtggtgggcacagaggtggagatcatcaaccagcagctggccgacttcaagatgttccagaaggagcaggtggaccccctgcagatgaagctgcagcaggtgaatggcctgggccagggcctcatccagagcgctgggaaggactgtgatgtgcagggcctggagcatgacatggaggagatcaatgcccgctggaacaccctgaacaagaaggtggcccagagaattgcccagctgcaggaggccctgctgcactgtgggaagttccaggatgccctggagcccctgctgtcctggctggccgacacagaggagctgattgccaaccagaagccacccagcgctgagtacaaggtggtgaaggcccagatccaggagcagaagctgctgcagaggctgctggatgacaggaaggccaccgtggacatgctgcaggccgagggcggcagaattgcccagagcgctgagctggccgaccgggagaagatcaccggccagctggagagcctggagagccgctggacagagctgctgagcaaggccgccgcccggcagaagcagctggaggacatcctggtgctggccaagcagttccatgaaacagctgagcccatcagtgacttcctgtctgtgacagagaagaagctggccaacagcgagcctgtgggcacccagacagccaagatccagcagcagatcatccgccacaaggccctgaatgaggagatcgtgaacaggaagaagaatgtggaccaggccatcaagaatggccaggccctgctgaagcagaccactggagaggaggtgctgctgatccaggagaagctggatggcatcaagaccaggtatgctgacatcaccgtgaccagcagcaaggccctgcggaccctggagcaggcccggcagctggccaccaagttccagagcacctatgaggagctgaccggctggctgcgggaggtggaggaggagctggccaccagcggcggccagagccccaccggggagcagatcccccagttccagcagaggcagaaggagctgaagaaggaggtgatggagcaccggctggtgctggacacagtgaatgaggtgtcccgggccctgctggagctggtgccctggagggcccgggagggcctggacaagctggtgtctgatgccaatgagcagtacaagctggtgtctgacaccatcggccagagggtggatgaaattgatgctgccatccagaggagccagcagtatgagcaggccgcagatgctgagctggcctgggtggccgagaccaagaggaagctgatggccctgggccccatccggctggagcaggaccagaccacagcccagctgcaggtgcagaaggccttcagcattgacatcatccgccacaaggacagcatggatgagctgttcagccacaggtctgagatcttcggcacctgtggggaggagcagaagacagtgctgcaggagaagacagagagcctcatccagcagtatgaggccatcagcctgctgaacagcgagagatatgcccggctggagcgggcccaggtgctggtgaaccagttctgggagacctatgaggagctgagcccctggattgaggagacccgggccctgattgcccagctgcccagccctgccatcgaccacgagcagctgcggcagcagcaggaggagatgaggcagctgcgggagagcattgctgagcacaagccccacatcgacaagctgctgaagattggcccccagctgaaggagctgaaccctgaggagggggagatggtggaggagaagtaccagaaggccgagaacatgtatgcccagatcaaggaggaggtgcggcagagggccctggccctggatgaggccgtgtcccagagcacccagatcacagagttccatgacaagattgagcccatgctggagaccctggagaacctgagcagccggctgaggatgcctcctctcatcccagctgaggtggacaagatccgggagtgcatcagtgacaacaagagcgccaccgtggagctggagaagctgcagcccagctttgaggccctgaagagaagaggagaggagctgattggccgcagccagggcgctgacaaggacctggccgccaaggagatccaggacaagctggaccagatggtgttcttctgggaggacatcaaggcccgggcagaggagcgggagatcaagttcctggatgtgctggagctggccgagaagttctggtatgacatggccgccctgctgaccaccatcaaggacacccaggacatcgtgcatgacctggagagccctggcatcgaccccagcatcatcaagcagcaggtggaggccgctgagaccatcaaggaggagacagatggcctgcacgaggagctggagttcatccgcatcctgggcgctgacctgatctttgcctgtggggagacagagaagccagaggtgaggaagagcattgatgagatgaacaatgcctgggagaacctgaacaagacctggaaggagcggctggagaagctggaggatgccatgcaggccgctgtgcagtaccaggacaccctgcaggccatgtttgactggctggacaacacagtcatcaagctgtgcaccatgcctcctgtgggcacagacctgaacacagtgaaggaccagctgaatgagatgaaggagttcaaggtggaggtgtaccagcagcagatcgagatggagaagctgaaccaccagggcgagctgatgctgaagaaggccacagatgaaacagaccgggacatcatccgggagcccctgacagagctgaagcacctgtgggagaacctgggggagaagatcgcccaccggcagcacaagctggagggcgccctgctggccctgggccagttccagcacgccctggaggagctgatgtcctggctgacccacacagaggagctgctggatgcccagaggcccatcagcggggaccccaaggtgattgaggtggagctggccaagcaccacgtgctgaagaatgatgtgctggcccaccaggccaccgtggagaccgtgaacaaggctggaaatgagctgctggagagcagcgctggagatgatgccagcagcctgcggagccggctggaggccatgaaccagtgctgggagagcgtgctgcagaagacagaggagcgggagcagcagctgcagagcaccctgcagcaggcccagggcttccacagcgagattgaggacttcctgctggagctgaccaggatggagagccagctgagcgccagcaagcccactggaggcctgcctgagacagcccgggagcagctggacacccacatggagctgtacagccagctgaaggccaaggaggagacctacaaccagctgctggacaagggccgcctgatgctgctgagcagagatgacagcggcagcggcagcaagacagagcagagcgtggccctgctggagcagaagtggcacgtggtgagcagcaagatggaggagaggaagagcaagctggaggaggccctgaacctggccacagagttccagaacagcctgcaggagttcatcaactggctgaccctggccgagcagagcctgaacatcgccagcccccccagcctcatcctgaacacagtgctgagccagatcgaggagcacaaggtgtttgccaatgaggtgaatgcccaccgggaccagatcatcgagctggaccagacaggcaaccagctgaagttcctgagccagaagcaggatgtggtgctgatcaagaacctgctggtgtctgtgcagagccgctgggagaaggtggtgcagaggagcattgaaagaggccgcagcctggatgatgccaggaagagggccaagcagttccacgaggcctggaagaagctgattgactggctggaggatgctgagagccacctggacagcgagctggagatcagcaatgaccctgacaagatcaagctgcagctgagcaagcacaaggagttccagaagaccctgggcggcaagcagcctgtgtatgacaccaccatcagaacaggccgggccctgaaggagaagaccctgctgcctgaggacagccagaagctggacaacttcctgggggaggtgcgggacaagtgggacacagtgtgtgggaagtctgtggagcggcagcacaagctggaggaggccctgctcttcagcggccagttcatggatgccctgcaggccctggtggactggctgtacaaggtggagccccagctggccgaggaccagcctgtgcatggagacctggacctggtgatgaacctgatggatgcccacaaggtgttccagaaggagctgggcaagaggactggaacagtgcaggtgctgaagaggagcggccgggagctgattgagaacagcagagatgacaccacctgggtgaagggccagctgcaggagctgagcacccgctgggacacagtgtgcaagctgtctgtgtccaagcagagccggctggagcaggccctgaagcaggccgaggtgttccgggacacagtgcacatgctgctggagtggctgtctgaggccgagcagaccctgcgcttccggggggccctgcctgatgacacagaggccctgcagagcctgattgacacccacaaggagttcatgaagaaggtggaggagaagagggtggatgtgaacagcgctgtggccatgggagaggtgatcctggccgtgtgccacccagactgcatcaccaccatcaagcactggatcaccatcatccgggccaggtttgaggaggtgctgacctgggccaagcagcaccagcagaggctggagacagccctgtctgagctggtggccaatgctgagctgctggaggagctgctggcctggatccagtgggccgagaccaccctcatccagagggaccaggagcccatcccccagaacatcgacagagtgaaggccctgattgctgagcaccagaccttcatggaggagatgaccaggaagcagccagatgtggacagagtgaccaagacctacaagaggaagaacatcgagcccacccacgcccccttcatcgagaagagccgcagcggcggcaggaagagcctgagccagcccaccccaccacccatgcccatcctgagccagagcgaggccaagaacccccgcatcaaccagctgagcgcccgctggcagcaggtgtggctgctggccctggagcggcagaggaagctgaatgatgccctggaccggctggaggagctgaaggagtttgccaactttgattttgatgtgtggaggaagaagtacatgcgctggatgaaccacaagaagagccgggtgatggacttcttcagaagaattgacaaggaccaggacggcaagatcacccggcaggagttcattgatggcatcctggccagcaagttccccaccaccaagctggagatgacagctgtggccgacatctttgacagagatggagatggctacatcgactactatgaatttgtggccgccctgcaccccaacaaggatgcctaccggcccaccacagatgctgacaagattgaagatgaggtgacccggcaggtggcccagtgcaagtgtgccaagcgcttccaggtggagcagatcggggagaacaagtacagatttggagacagccagcagctgcggctggtgcgcatcctgcggagcacagtgatggtgcgggtgggcggcggctggatggccctggatgagttcctggtgaagaatgacccctgccgggcccggggccgcaccaacatcgagctgcgggagaagttcatcctgcctgagggcgccagccagggcatgacccccttccgcagccggggccgccgcagcaagcccagcagccgggccgccagccccaccaggagcagcagcagcgccagccagagcaaccacagctgcacctccatgcccagcagccctgccaccccagccagcggcaccaaggtgatccccagcagcggcagcaagctgaagaggcccacccccaccttccacagcagcaggaccagcctggccggggacaccagcaacagcagcagccctgccagcactggagccaagaccaacagagctgaccccaagaagagcgccagccggcccggcagccgggccggcagccgggccggcagccgggccagcagcagaagaggaagtgatgccagtgactttgacctgctggagacccagagcgcctgcagcgacaccagcgagagcagcgctgctgggggccagggcaacagccggcggggcctgaacaagcccagcaagatccccaccatgagcaagaagaccaccacagccagccccaggaccccaggccccaagaggtag

SEQ ID NO: 159748 - DNA, 1155 bp, synthetic construct
  misc_feature 1..1155: note = Description of Artificial Sequence: Synthetic coding sequence
  source 1..1155: mol_type = other DNA
atcaccagcccctgggccccccggcccagctgcagcagcccctgggccatgagcagcagtgatgaggagaccctgtctgagaggagctgccgctctgagaggagctgccgctctgagaggagctacagaagtgagaggagcggcagcctgagcccctgccccccaggggacaccctgccctggaacctgcccctgcacgagcagaagaagaggaagagccaggacagcgtgctggaccctgctgagagagctgtggtgcgggtggctgatgagcgggacagagtgcagaagaagaccttcaccaagtgggtgaacaagcacctgatgaaggtgaggaagcacatcaatgacctgtatgaggacctgagagatggccacaacctgatcagcctgctggaggtgctgagcggcatcaagctgccccgggagaagggccgcatgaggttccaccggctgcagaatgtgcagatcgccctggacttcctgaagcagaggcaggtgaagctggtgaacatcagaaatgatgacatcacagatggcaaccccaagctgaccctgggcctcatctggaccatcatcctgcacttccagatcagtgacatctacatcagcggggagagcggggacatgtctgccaaggagaagctgctgctgtggacccagaaggtgacagctggctacacaggcatcaagtgcaccaacttcagcagctgctggagcgatggcaagatgtttaatgccctgatccaccgctacagaccagacctggtggacatggagcgggtgcagatccagagcaaccgggagaacctggagcaggcctttgaggtggccgagcggctgggcgtgacccggctgctggatgctgaagatgtggatgtgcccagcccagatgagaagagcgtcatcacctacgtgagcagcatctatgatgccttccccaaggtgcctgagggcggggagggcatcagcgccacagaggtggacagccgctggcaggagtaccagagccgggtggacagcctcatcccctggatcaagcagcacaccatcctgatgtctgacaagaccttcccccagaaccctgtggagctgaaggccctgtacaaccagtacatccacttcaaggagacagagatcctggccaaggagtag

SEQ ID NO: 159749 - DNA, 603 bp, synthetic construct
  misc_feature 1..603: note = Description of Artificial Sequence: Synthetic coding sequence
  source 1..603: mol_type = other DNA
atgcccctgctggacagcagctacctgccccccaccatcttcatcctgacccacgtgctgggcgtggccggcgtgctgtactggaagagacatgcccggggccgggcagatgagcgggacagagtgcagaagaagaccttcaccaagtgggtgaacaagcacctgatgaaggtgaggaagcacatcaatgacctgtatgaggacctgagagatggccacaacctgatcagcctgctggaggtgctgagcggcatcaagctgccccgggagaagggccgcatgaggttccaccggctgcagaatgtgcagatcgccctggacttcctgaagcagaggcaggtgaagctggtgaacatcagaaatgatgacatcacagatggcaaccccaagctgaccctgggcctcatctggaccatcatcctgcacttccagatcagtgacatctacatctctggagagagcggggacatgtctgccaaggagaagctgctgctgtggacccagaaggtgacagctggctacacaggcatcaagtgcaccaacttcagcagctgctggagcgatggcaagatgtttaatgccctgatccaccgctacagatag

SEQ ID NO: 159750 - DNA, 15903 bp, synthetic construct
  misc_feature 1..15903: note = Description of Artificial Sequence: Synthetic coding sequence
  source 1..15903: mol_type = other DNA
atgagcagcagtgatgaggagaccctgtctgagaggagctgccgctctgagaggagctgccgctctgagaggagctacagaagtgagaggagcggcagcctgagcccctgccccccaggggacaccctgccctggaacctgcccctgcacgagcagaagaagaggaagagccaggacagcgtgctggaccctgctgagagagctgtggtgcgggtggctgatgagcgggacagagtgcagaagaagaccttcaccaagtgggtgaacaagcacctgatgaaggtgaggaagcacatcaatgacctgtatgaggacctgagagatggccacaacctgatcagcctgctggaggtgctgagcggcatcaagctgccccgggagaagggccgcatgaggttccaccggctgcagaatgtgcagatcgccctggacttcctgaagcagaggcaggtgaagctggtgaacatcagaaatgatgacatcacagatggcaaccccaagctgaccctgggcctcatctggaccatcatcctgcacttccagatcagtgacatctacatcagcggggagagcggggacatgtctgccaaggagaagctgctgctgtggacccagaaggtgacagctggctacacaggcatcaagtgcaccaacttcagcagctgctggagcgatggcaagatgtttaatgccctgatccaccgctacagaccagacctggtggacatggagcgggtgcagatccagagcaaccgggagaacctggagcaggcctttgaggtggccgagcggctgggcgtgacccggctgctggatgctgaagatgtggatgtgcccagcccagatgagaagagcgtcatcacctacgtgagcagcatctatgatgccttccccaaggtgcctgagggcggggagggcatcagcgccacagaggtggacagccgctggcaggagtaccagagccgggtggacagcctcatcccctggatcaagcagcacaccatcctgatgtctgacaagaccttcccccagaaccctgtggagctgaaggccctgtacaaccagtacatccacttcaaggagacagagatcctggccaaggagcgggagaagggccgcatcgaggagctgtacaagctgctggaggtgtggattgaatttggccgcatcaagctgccccagggctaccaccccaatgatgtggaggaggagtggggcaagctgatcatcgagatgctggagcgggagaagagcctgcggcctgctgtggagcggctggagctgctgctgcagatcgccaacaagatccagaatggagccctgaactgtgaggagaagctgaccctggccaagaacaccctgcaggctgatgctgcccacctggagagcggccagcctgtgcagtgtgagagtgatgtgatcatgtacatccaggagtgtgagggcctcatccggcagctgcaggtggacctgcagatcctgagagatgagaactactaccagctggaggagctggccttccgggtgatgaggctgcaggatgagctggtgaccctgcggctggagtgcaccaacctgtacaggaagggccacttcaccagcctggagctggtgccccccagcaccctgaccaccacccacctgaaggccgagcccctgaccaaggccacccacagcagcagcacctcctggttcaggaagcccatgaccagggctgagctggtggccatcagcagcagtgaagatgagggcaacctgcgctttgtgtatgagctgctgtcctgggtggaggagatgcagatgaagctggagcgggcagagtggggcaatgacctgcccagcgtggagctgcagctggagacccagcagcacatccacacctctgtggaggagctgggcagctctgtgaaggaggcccggctgtatgagggcaagatgagccagaacttccacaccagctatgcagagaccctgggcaagctggagacccagtactgcaagctgaaggagaccagcagcttcaggatgaggcacctgcagagcctgcacaagtttgtgtcccgggccacagctgagctgatctggctgaatgagaaggaggaggaggagctggcctatgactggagcgacaacaacagcaacatcagcgccaagaggaactacttcagcgagctgaccatggagctggaggagaagcaggatgtgttccgcagcctgcaggacacagctgagctgctgagcctggagaaccacccagccaagcagacagtggaggcctacagcgctgctgtgcagagccagctgcagtggatgaagcagctgtgcctgtgtgtggagcagcacgtgaaggagaacacagcctacttccagttcttcagtgatgcccgggagctggagagcttcctgaggaacctgcaggacagcatcaagaggaagtacagctgtgaccacaacaccagcctgagccggctggaggacctgctgcaggacagcatggatgagaaggagcagctgatccagagcaagagctctgtggccagcctggtgggccgcagcaagaccatcgtgcagctgaagcccaggagcccagaccacgtgctgaagaacaccatctctgtgaaggctgtgtgtgactaccggcagatcgagatcaccatctgcaagaatgatgaatgtgtgctggaggacaacagccagaggaccaagtggaaggtgatcagccccactggaaatgaggccatggtgcccagcgtgtgcttcctgatccccccacccaacaaggatgccatcgagatggccagccgggtggagcagagctaccagaaggtgatggccctgtggcaccagctgcacgtgaacaccaagagcctcatctcctggaactacctgaggaaggacctggacctggtgcagacctggaacctggagaagctgcggagcagcgcccctggagagtgccaccagatcatgaagaacctgcaggcccactatgaggacttcctgcaggacagccgggacagcgtgctcttctctgtggccgaccggctgcggctggaggaggaggtggaggcctgcaaggcccgcttccagcacctgatgaagtccatggagaatgaagacaaggaggagaccgtggccaagatgtacatcagcgagctgaagaacatccggctgcggctggaggagtatgagcagagggtggtgaagaggatccagagcctggccagcagcaggacagacagagatgcctggcaggacaatgccctgagaattgctgagcaggagcacacccaggaggacctgcagcagctgcggagtgacctggatgctgtgtccatgaagtgtgacagcttcctgcaccagagccccagcagcagctctgtgcccaccctgcggtctgagctgaacctgctggtggagaagatggaccacgtgtatggcctgagcacagtgtacctgaacaagctgaagacagtggatgtgattgtgcgcagcatccaggatgctgagctgctggtgaagggctatgagatcaagctgagccaggaggaggtggtgctggccgacctgagcgccctggaggcccactggagcaccctgcggcactggctgagtgatgtgaaggacaagaacagcgtcttctctgtgctggatgaggagatcgccaaggccaaggtggtggccgagcagatgagccggctgaccccagagaggaacctggacctggagcgctaccaggagaagggcagccagctgcaggagcgctggcacagggtcatcgcccagctggagatccggcagagcgagctggagagcatccaggaggtgctgggggactaccgggcctgccacggcaccctcatcaagtggattgaggagaccacagcccagcaggagatgatgaagccaggccaggccgaggacagccgggtgctgtctgagcagctgagccagcagacagccctgtttgctgagattgaaagaaaccagaccaagctggaccagtgccagaagttcagccagcagtacagcaccatcgtgaaggactatgagctgcagctgatgacctacaaggcctttgtggagagccagcagaagagccctgggaagagaagaaggatgctgagcagcagtgatgccatcacccaggagttcatggacctgcggacccgctacacagccctggtgaccctgaccacccagcacgtgaagtacatcagtgatgccctgcggcggctggaggaggaggagaaggtggtggaggaggagaagcaggagcacgtggagaaggtgaaggagctgctgggctgggtgtccaccctggccaggaacacccagggcaaggccaccagcagcgagaccaaggagagcacagacatcgagaaggccatcctggagcagcaggtgctgtctgaggagctgaccaccaagaaggagcaggtgtctgaggccatcaagaccagccagatcttcctggccaagcacggccacaagctgtctgagaaggagaagaagcagatcagcgagcagctgaatgccctgaacaaggcctaccatgacctgtgtgatggcagcgccaaccagctgcagcagctgcagagccagctggcccaccagacagagcagaagaccctgcagaagcagcagaacacctgccaccagcagctggaggacctgtgctcctgggtgggccaggccgagcgggccctggccggccaccagggccgcaccacccagcaggacctgagcgccctgcagaagaaccagagcgacctgaaggacctgcaggatgacatccagaacagagccaccagctttgccaccgtggtgaaggacatcgagggcttcatggaggagaaccagaccaagctgagcccccgggagctgacagccctgcgggagaagctgcaccaggccaaggagcagtatgaggccctgcaggaggagaccagggtggcccagaaggagctggaggaggccgtgaccagcgccctgcagcaggagacagagaagagcaaggccgccaaggagctggccgagaacaagaagaagattgatgccctgctggactgggtgacctctgtgggcagcagcggcggccagctgctgaccaacctgcccggcatggagcagctgagcggggccagcctggagaagggggccctggacaccacagatggctacatgggcgtgaaccaggcccctgagaagctggacaagcagtgtgagatgatgaaggcccggcaccaggagctgctgagccagcagcagaacttcatcctggccacccagagcgcccaggccttcctggaccagcacggccacaacctgaccccagaggagcagcagatgctgcagcagaagctgggggagctgaaggagcagtacagcaccagcctggcccagagcgaggccgagctgaagcaggtgcagaccctgcaggatgagctgcagaagttcctgcaggaccacaaggagtttgagagctggctggagaggtctgagaaggagctggagaacatgcacaagggcggcagcagccctgagaccctgcccagcctgctgaagaggcagggcagcttctctgaagatgtgatcagccacaagggggacctgcgctttgtgaccatcagcggccagaaggtgctggacatggagaacagcttcaaggagggcaaggagcccagcgagatcggcaacctggtgaaggacaagctgaaggatgccacagagcgctacacagccctgcacagcaagtgcacccggctgggcagccacctgaacatgctgctgggccagtaccaccagttccagaacagcgctgacagcctgcaggcctggatgcaggcctgtgaggccaacgtggagaagctgctgagtgacacagtggccagtgaccccggggtgctgcaggagcagctggccaccaccaagcagctgcaggaggagctggccgagcaccaggtgcctgtggagaagctgcagaaggtggcccgggacatcatggagattgaaggagagcccgccccagaccaccgccacgtgcaggagaccacagacagcatcctgagccacttccagagcctgagctacagcctggccgagaggagcagcctgctgcagaaggccatcgcccagagccagagcgtgcaggagagcctggagagcctgctgcagagcattggagaggtggagcagaacctggagggcaagcaggtgagcagcctgagcagcggggtcatccaggaggccctggccaccaacatgaagctgaagcaggacatcgcccggcagaagagcagcctggaggccacccgggagatggtgacccgcttcatggagacagctgacagcaccacagctgctgtgctgcagggcaagctggccgaggtgtcccagagatttgagcagctgtgcctgcagcagcaggagaaggagagcagcctgaagaagctgctgccccaggccgagatgtttgagcacctgagcggcaagctgcagcagttcatggagaacaagagcaggatgctggccagcggcaaccagcctgaccaggacatcacccacttcttccagcagatccaggagctgaacctggagatggaggaccagcaggagaacctggacaccctggagcacctggtgacagagctgagcagctgtggctttgccctggacctgtgccagcaccaggacagagtgcagaacctgaggaaggacttcacagagctgcagaagacagtgaaggagcgggagaaggatgccagcagctgccaggagcagctggatgagttcaggaagctggtgaggaccttccagaagtggctgaaggagacagagggcagcatccccccaacagagacctccatgtctgccaaggagctggagaagcagatcgagcacctgaagagcctgctggatgactgggccagcaagggcaccctggtggaggagatcaactgcaagggcaccagcctggagaacctgatcatggagatcacagccccagacagccagggcaagacagacctgacagagatccagtgtgacatgtctgatgtgaacctgaagtatgagaagctgggcggcgtgctgcacgagcggcaggagagcctgcaggccatcctgaacaggatggaggaggtgcacaaggaggccaacagcgtgctgcagtggctggagagcaaggaggaggtgctgaagtccatggatgccatgagcagccccaccaagacagagaccgtgaaggcccaggccgagagcaacaaggccttcctggccgagctggagcagaacagccccaagatccagaaggtgaaggaggccctggccggcctgctggtgacctaccccaacagccaggaggccgagaactggaagaagatccaggaggagctgaacagccgctgggagcgggccacagaggtgacagtggcccggcagaggcagctggaggagagcgccagccacctggcctgcttccaggccgctgagagccagctgcggccctggctgatggagaaggagctgatgatgggcgtgctgggccccctgagcattgaccccaacatgctgaatgcccagaagcagcaggtgcagttcatgctgaaggagtttgaggcccggcggcagcagcacgagcagctgaatgaggccgcccagggcatcctgaccggccctggagatgtgtccctgagcaccagccaggtgcagaaggagctgcagagcatcaaccagaagtgggtggagctgacagacaagctgaacagccgcagcagccagattgaccaggccatcgtgaagagcacccagtaccaggagctgctgcaggacctgtctgagaaggtgcgggctgtgggccagaggctgtctgtgcagagcgccatcagcacccagcctgaggccgtgaagcagcagctggaggagaccagcgagatccgcagtgacctggagcagctggaccacgaggtgaaggaggcccagaccctgtgtgatgagctgtctgtgctgattggagagcagtacctgaaggatgagctgaagaagaggctggagaccgtggccctgcccctgcagggcctggaggacctggccgctgaccgcatcaaccggctgcaggccgccctggccagcacccagcagttccagcagatgtttgatgagctgcggacctggctggatgacaagcagagccagcaggccaagaactgccccatcagcgccaagctggagcggctgcagagccagctgcaggagaatgaggagttccagaagagcctgaaccagcacagcggcagctatgaagtcatcgtggccgagggggagagcctgctgctgtctgtgcccccaggagaggagaagaggaccctgcagaaccagctggtggagctgaagaaccactgggaggagctgagcaagaagacagctgaccggcagagccggctgaaggactgcatgcagaaggcccagaagtaccagtggcacgtggaggacctggtgccctggattgaggactgcaaggccaagatgtctgagctgcgggtgaccctggaccctgtgcagctggagagcagcctgctgcggagcaaggccatgctgaatgaggtggagaagaggaggagcctgctggagatcctgaacagcgctgctgacatcctgatcaacagcagcgaggctgatgaagatggcatcagagatgagaaggccggcatcaaccagaacatggatgctgtgacagaggagctgcaggccaagacaggcagcctggaggagatgacccagaggctgcgggagttccaggagagcttcaagaacatcgagaagaaggtggagggcgccaagcaccagctggagatctttgatgccctgggcagccaggcctgcagcaacaagaacctggagaagctgcgggcccagcaggaggtgctgcaggccctggagccccaggtggactacctgaggaacttcacccagggcctggtggaggatgccccagatggcagtgatgccagccagctgctgcaccaggccgaggtggcccagcaggagttcctggaggtgaagcagagggtgaacagcggctgtgtgatgatggagaacaagctggagggcatcggccagttccactgccgggtgcgggagatgttcagccagctggccgacctggatgatgagctggatggcatgggcgccatcggccgggacacagacagcctgcagagccagattgaagatgtgcggctcttcctgaacaagatccacgtgctgaagctggacatcgaggccagcgaggctgaatgtcgccacatgctggaggaggagggcaccctggacctgctgggcctgaagcgggagctggaggccctgaacaagcagtgtgggaagctgacagagcggggcaaggcccggcaggagcagctggagctgaccctgggccgggtggaggacttctacaggaagctgaagggcctgaatgatgccaccacagctgctgaggaggccgaggccctgcagtgggtggtgggcacagaggtggagatcatcaaccagcagctggccgacttcaagatgttccagaaggagcaggtggaccccctgcagatgaagctgcagcaggtgaatggcctgggccagggcctcatccagagcgctgggaaggactgtgatgtgcagggcctggagcatgacatggaggagatcaatgcccgctggaacaccctgaacaagaaggtggcccagagaattgcccagctgcaggaggccctgctgcactgtgggaagttccaggatgccctggagcccctgctgtcctggctggccgacacagaggagctgattgccaaccagaagccacccagcgctgagtacaaggtggtgaaggcccagatccaggagcagaagctgctgcagaggctgctggatgacaggaaggccaccgtggacatgctgcaggccgagggcggcagaattgcccagagcgctgagctggccgaccgggagaagatcaccggccagctggagagcctggagagccgctggacagagctgctgagcaaggccgccgcccggcagaagcagctggaggacatcctggtgctggccaagcagttccatgaaacagctgagcccatcagtgacttcctgtctgtgacagagaagaagctggccaacagcgagcctgtgggcacccagacagccaagatccagcagcagatcatccgccacaaggccctgaatgaggagatcgtgaacaggaagaagaatgtggaccaggccatcaagaatggccaggccctgctgaagcagaccactggagaggaggtgctgctgatccaggagaagctggatggcatcaagaccaggtatgctgacatcaccgtgaccagcagcaaggccctgcggaccctggagcaggcccggcagctggccaccaagttccagagcacctatgaggagctgaccggctggctgcgggaggtggaggaggagctggccaccagcggcggccagagccccaccggggagcagatcccccagttccagcagaggcagaaggagctgaagaaggaggtgatggagcaccggctggtgctggacacagtgaatgaggtgtcccgggccctgctggagctggtgccctggagggcccgggagggcctggacaagctggtgtctgatgccaatgagcagtacaagctggtgtctgacaccatcggccagagggtggatgaaattgatgctgccatccagaggagccagcagtatgagcaggccgcagatgctgagctggcctgggtggccgagaccaagaggaagctgatggccctgggccccatccggctggagcaggaccagaccacagcccagctgcaggtgcagaaggccttcagcattgacatcatccgccacaaggacagcatggatgagctgttcagccacaggtctgagatcttcggcacctgtggggaggagcagaagacagtgctgcaggagaagacagagagcctcatccagcagtatgaggccatcagcctgctgaacagcgagagatatgcccggctggagcgggcccaggtgctggtgaaccagttctgggagacctatgaggagctgagcccctggattgaggagacccgggccctgattgcccagctgcccagccctgccatcgaccacgagcagctgcggcagcagcaggaggagatgaggcagctgcgggagagcattgctgagcacaagccccacatcgacaagctgctgaagattggcccccagctgaaggagctgaaccctgaggagggggagatggtggaggagaagtaccagaaggccgagaacatgtatgcccagatcaaggaggaggtgcggcagagggccctggccctggatgaggccgtgtcccagagcacccaggtgtcccagttccatgacaagattgagcccatgctggagaccctggagaacctgagcagccggctgaggatgcctcctctcatcccagctgaggtggacaagatccgggagtgcatcagtgacaacaagagcgccaccgtggagctggagaagctgcagcccagctttgaggccctgaagagaagaggagaggagctgattggccgcagccagggcgctgacaaggacctggccgccaaggagatccaggacaagctggaccagatggtgttcttctgggaggacatcaaggcccgggcagaggagcgggagatcaagttcctggatgtgctggagctggccgagaagttctggtatgacatggccgccctgctgaccaccatcaaggacacccaggacatcgtgcatgacctggagagccctggcatcgaccccagcatcatcaagcagcaggtggaggccgctgagaccatcaaggaggagacagatggcctgcacgaggagctggagttcatccgcatcctgggcgctgacctgatctttgcctgtggggagacagagaagccagaggtgaggaagagcattgatgagatgaacaatgcctgggagaacctgaacaagacctggaaggagcggctggagaagctggaggatgccatgcaggccgctgtgcagtaccaggacaccctgcaggccatgtttgactggctggacaacacagtcatcaagctgtgcaccatgcctcctgtgggcacagacctgaacacagtgaaggaccagctgaatgagatgaaggagttcaaggtggaggtgtaccagcagcagatcgagatggagaagctgaaccaccagggcgagctgatgctgaagaaggccacagatgaaacagaccgggacatcatccgggagcccctgacagagctgaagcacctgtgggagaacctgggggagaagatcgcccaccggcagcacaagctggagggcgccctgctggccctgggccagttccagcacgccctggaggagctgatgtcctggctgacccacacagaggagctgctggatgcccagaggcccatcagcggggaccccaaggtgattgaggtggagctggccaagcaccacgtgctgaagaatgatgtgctggcccaccaggccaccgtggagaccgtgaacaaggctggaaatgagctgctggagagcagcgctggagatgatgccagcagcctgcggagccggctggaggccatgaaccagtgctgggagagcgtgctgcagaagacagaggagcgggagcagcagctgcagagcaccctgcagcaggcccagggcttccacagcgagattgaggacttcctgctggagctgaccaggatggagagccagctgagcgccagcaagcccactggaggcctgcctgagacagcccgggagcagctggacacccacatggagctgtacagccagctgaaggccaaggaggagacctacaaccagctgctggacaagggccgcctgatgctgctgagcagagatgacagcggcagcggcagcaagacagagcagagcgtggccctgctggagcagaagtggcacgtggtgagcagcaagatggaggagaggaagagcaagctggaggaggccctgaacctggccacagagttccagaacagcctgcaggagttcatcaactggctgaccctggccgagcagagcctgaacatcgccagcccccccagcctcatcctgaacacagtgctgagccagatcgaggagcacaaggtgtttgccaatgaggtgaatgcccaccgggaccagatcatcgagctggaccagacaggcaaccagctgaagttcctgagccagaagcaggatgtggtgctgatcaagaacctgctggtgtctgtgcagagccgctgggagaaggtggtgcagaggagcattgaaagaggccgcagcctggatgatgccaggaagagggccaagcagttccacgaggcctggaagaagctgattgactggctggaggatgctgagagccacctggacagcgagctggagatcagcaatgaccctgacaagatcaagctgcagctgagcaagcacaaggagttccagaagaccctgggcggcaagcagcctgtgtatgacaccaccatcagaacaggccgggccctgaaggagaagaccctgctgcctgaggacagccagaagctggacaacttcctgggggaggtgcgggacaagtgggacacagtgtgtgggaagtctgtggagcggcagcacaagctggaggaggccctgctcttcagcggccagttcatggatgccctgcaggccctggtggactggctgtacaaggtggagccccagctggccgaggaccagcctgtgcatggagacctggacctggtgatgaacctgatggatgcccacaaggtgttccagaaggagctgggcaagaggactggaacagtgcaggtgctgaagaggagcggccgggagctgattgagaacagcagagatgacaccacctgggtgaagggccagctgcaggagctgagcacccgctgggacacagtgtgcaagctgtctgtgtccaagcagagccggctggagcaggccctgaagcaggccgaggtgttccgggacacagtgcacatgctgctggagtggctgtctgaggccgagcagaccctgcgcttccggggggccctgcctgatgacacagaggccctgcagagcctgattgacacccacaaggagttcatgaagaaggtggaggagaagagggtggatgtgaacagcgctgtggccatgggagaggtgatcctggccgtgtgccacccagactgcatcaccaccatcaagcactggatcaccatcatccgggccaggtttgaggaggtgctgacctgggccaagcagcaccagcagaggctggagacagccctgtctgagctggtggccaatgctgagctgctggaggagctgctggcctggatccagtgggccgagaccaccctcatccagagggaccaggagcccatcccccagaacatcgacagagtgaaggccctgattgctgagcaccagaccttcatggaggagatgaccaggaagcagccagatgtggacagagtgaccaagacctacaagaggaagaacatcgagcccacccacgcccccttcatcgagaagagccgcagcggcggcaggaagagcctgagccagcccaccccaccacccatgcccatcctgagccagagcgaggccaagaacccccgcatcaaccagctgagcgcccgctggcagcaggtgtggctgctggccctggagcggcagaggaagctgaatgatgccctggaccggctggaggagctgaaggagtttgccaactttgattttgatgtgtggaggaagaagtacatgcgctggatgaaccacaagaagagccgggtgatggacttcttcagaagaattgacaaggaccaggacggcaagatcacccggcaggagttcattgatggcatcctggccagcaagttccccaccaccaagctggagatgacagctgtggccgacatctttgacagagatggagatggctacatcgactactatgaatttgtggccgccctgcaccccaacaaggatgcctaccggcccaccacagatgctgacaagattgaagatgaggtgacccggcaggtggcccagtgcaagtgtgccaagcgcttccaggtggagcagatcggggagaacaagtacagatttggagacagccagcagctgcggctggtgcgcatcctgcggagcacagtgatggtgcgggtgggcggcggctggatggccctggatgagttcctggtgaagaatgacccctgccgggcccggggccgcaccaacatcgagctgcgggagaagttcatcctgcctgagggcgccagccagggcatgacccccttccgcagccggggccgccgcagcaagcccagcagccgggccgccagccccaccaggagcagcagcagcgccagccagagcaaccacagctgcacctccatgcccagcagccctgccaccccagccagcggcaccaaggtgatccccagcagcggcagcaagctgaagaggcccacccccaccttccacagcagcaggaccagcctggccggggacaccagcaacagcagcagccctgccagcactggagccaagaccaacagagctgaccccaagaagagcgccagccggcccggcagccgggccggcagccgggccggcagccgggccagcagcagaagaggaagtgatgccagtgactttgacctgctggagacccagagcgcctgcagcgacaccagcgagagcagcgctgctgggggccagggcaacagccggcggggcctgaacaagcccagcaagatccccaccatgagcaagaagaccaccacagccagccccaggaccccaggccccaagaggtag

SEQ ID NO: 159751 - DNA, 1035 bp, synthetic construct
  misc_feature 1..1035: note = Description of Artificial Sequence: Synthetic coding sequence
  source 1..1035: mol_type = other DNA
atgacagctgtggccgacatctttgacagagatggagatggctacatcgactactatgaatttgtggccgccctgcaccccaacaaggatgcctaccggcccaccacagatgctgacaagattgaagatgaggtgacccggcaggtggcccagtgcaagtgtgccaagcgcttccaggtggagcagattggagagaacaagtacagatttggagacagccagcagctgcggctggtgcgcatcctgcggagcacagtgatggtgcgggtgggcggcggctggatggccctggatgagttcctggtgaagaatgacccctgccgggcccggggccgcaccaacatcgagctgcgggagaagttcatcctgcctgagggcgccagccagggcatgacccccttccgcagccggggcagaagaagcaagcccagcagcagagctgccagccccaccaggagcagcagcagcgccagccagagcaaccacagctgcacctccatgcccagcagccctgccaccccagccagcggcaccaagaccagcctgcagttcagccgctgctatgacaagccctggctggtgaacagcaaggccggcacccccatccgggacagccacagcccagacctgcagctgcccaccccagaggtgatccccagcagcggcagcaagctgaagaggcccacccccaccttccacagcagcaggaccagcctggccggggacaccagcaacagcagcagccctgccagcactggagccaagaccaacagagctgaccccaagaagagcgccagccggcccggcagccgggccggcagccgggccggcagccgggccagcagcagaagaggaagtgatgccagtgactttgacctgctggagacccagagcgcctgcagcgacaccagcgagagcagcgctgctgggggccagggcaacagccggcggggcctgaacaagcccagcaagatccccaccatgagcaagaagaccaccacagccagccccaggaccccaggccccaagaggtag

SEQ ID NO: 159752 - DNA, 16293 bp, synthetic construct; identical to SEQ ID NO: 159745
  misc_feature 1..16293: note = Description of Artificial Sequence: Synthetic coding sequence
  source 1..16293: mol_type = other DNA

SEQ ID NO: 159753 - DNA, 8412 bp, synthetic construct
  misc_feature 1..8412: note = Description of Artificial Sequence: Synthetic coding sequence
  source 1..8412: mol_type = other DNA
atggatggagtggccgagttctctgaatatgtgtctgagaccgtggatgtgcccagcccctttgacctgctggagccccccaccagcggcggcttcctgaagctgagcaagccctgctgctacatcttccctgggggccgcggggacagcgccctgtttgctgtgaatggcttcaacatcctggtggatggcggcagtgacaggaagagctgcttctggaagctggtgcgccacctggacagaattgacagcgtgctgctgacccacatcggggctgacaacctgcccggcatcaatggcctgctgcagaggaaggtggccgagctggaggaggagcagagccagggcagcagcagctacagcgactgggtgaagaacctgatcagccctgagctgggcgtggtgttcttcaacgtgcctgagaagctgcggctgcctgatgccagcaggaaggccaagaggagcattgaggaggcctgcctgaccctgcagcacctgaaccggctgggcatccaggccgagcccctgtacagagtggtgagcaacaccatcgagcccctgaccctcttccacaagatgggcgtgggccgcctggacatgtatgtgctgaaccctgtgaaggacagcaaggagatgcagttcctgatgcagaagtgggccggcaacagcaaggccaagacaggaattgtgctgcccaacgggaaggaggccgagatctctgtgccctacctgaccagcatcacagccctggtggtgtggctgcctgccaaccccacagagaagatcgtgcgggtgctcttccctggaaatgccccccagaacaagatcctggagggcctggagaagctgcggcacctggacttcctgcgctaccctgtggccacccagaaggacctggccagcggggctgtgcccaccaacctgaagcccagcaagatcaagcagagagctgacagcaaggagagcctgaaggccaccaccaagacagctgtgtccaagctggccaagcgggaggaggtggtggaggagggcgccaaggaggcccggtctgagctggccaaggagctggccaagacagagaagaaggccaaggagagcagcgagaagcccccagagaagccagccaagccagagcgggtgaagacagagagcagcgaggccctgaaggccgagaagaggaagctgatcaaggacaaggtgggcaagaagcacctgaaggagaagatcagcaagctggaggagaagaaggacaaggagaagaaggagatcaagaaggagaggaaggagctgaagaaggatgagggcaggaaggaggagaagaaggatgccaagaaggaggagaagaggaaggacaccaagccagagctgaagaagatcagcaagccagacctgaagcccttcaccccagaggtgaggaagaccctgtacaaggccaaggtgcccggccgggtgaagattgacaggagccgggccatccggggggagaaggagctgagcagcgagccccagaccccaccagcccagaagggcaccgtgcccctgcccaccatcagcggccaccgggagctggtgctgagcagccctgaggacctgacccaggactttgaggagatgaagcgggaggagcgggccctgctggccgagcagagggacaccggcctgggggacaagcccttccccctggacacagctgaggagggcccccccagcacagccatccagggcaccccaccttctgtgcccggcctgggccaggaggagcacgtgatgaaggagaaggagctggtgcctgaggtgcctgaggagcagggcagcaaggaccggggcctggacagcggggctgagacagaggaggagaaggacacctgggaggagaagaagcagcgggaggccgagcggctgcctgacagaacagaggcccgggaggagagcgagcctgaggtgaaggaggatgtgattgagaaggccgagctggaggagatggaggaggtgcaccccagtgatgaggaggaggaggatgccaccaaggccgagggcttctaccagaagcacatgcaggagcccctgaaggtgacccccaggagccgggaggcctttggaggccgggagctgggcctgcagggcaaggcccctgagaaggagaccagcctcttcctgagcagcctgaccaccccagctggggccacagaacatgtgtcctacatccaggatgagaccatccctggctacagcgagacagagcagaccatcagtgatgaggagatccatgatgagcctgaggagaggcctgccccaccccgcttccacaccagcacctatgacctgcccggccctgagggcgccggcccctttgaggccagccagcctgctgacagcgctgtgcctgccaccagcggcaaggtgtatggcaccccagagacagagctgacctaccccaccaacatcgtggccgcccccctggccgaggaggagcacgtgagcagcgccaccagcatcacagaatgtgacaagctgagcagctttgccacctctgtggccgaggaccagagcgtggccagcctgacagccccccagacagaggagaccgggaagagcagcctgctgctggacacagtgaccagcatccccagcagcaggacagaggccacccagggcctggactatgtgcccagcgctggcaccatcagccccaccagcagcctggaggaggacaagggcttcaagagccccccctgtgaggacttctctgtgactggagagagcgagaagagaggagagatcatcggcaagggcctgtctggagagagagctgtggaggaggaggaggaggagacagccaacgtggagatgtctgagaagctgtgcagccagtatggcacccctgtgttcagcgcccctggccacgccctgcaccctggagagcccgccctgggggaggccgaggagcgctgcctgagcccagatgacagcacagtgaagatggccagccccccacccagcggcccccccagcgccacccacacccccttccaccagagccctgtggaggagaagtctgagccccaggacttccaggaggccgacagctggggagacaccaagaggaccccaggagtgggcaaggaggatgctgctgaggagaccgtgaagccaggccctgaggagggcaccctggagaaggaggagaaggtgcccccacccaggagcccccaggcccaggaggcccctgtgaacattgatgagggcctgaccggctgcaccatccagctgctgcctgcccaggacaaggccatcgtgtttgagatcatggaggccggggagcccaccggccccatcctgggcgctgaggccctgcccggcggcctgcggaccctgccccaggagcccgggaagccccagaaggatgaggtgctgcgctacccagacaggagcctgagcccagaagatgctgagagcctgtctgtgctgtctgtgcccagcccagacacagccaaccaggagcccacccccaagagcccctgtggcctgacagagcagtacctgcacaaggaccgctggccagaggtgtccccagaggacacccagagcctgagcctgtctgaggagagccccagcaaggagaccagcctggatgtgagcagcaagcagctgagccctgagagcctgggcaccctgcagtttggagagctgaacctgggcaaggaggagatgggccacctgatgcaggccgaggacaccagccaccacacagcccccatgtctgtgcctgagccccacgccgccacagccagccccccaacagatggcaccacccgctacagcgcccagacagacatcacagatgacagcctggacaggaagagccctgccagcagcttcagccacagcaccccatctggaaatggcaagtacctgcccggggccatcaccagcccagatgagcacatcctgaccccagacagcagcttcagcaagagccctgagagcctgcccggccctgccctggaggacatcgccatcaagtgggaggacaaggtgcccggcctgaaggacaggaccagcgagcagaagaaggagcctgagcccaaggatgaggtgctgcagcagaaggacaagaccctggagcacaaggaggtggtggagcccaaggacacagccatctaccagaaggatgaggccctgcacgtgaagaatgaggccgtgaagcagcaggacaaggccctggagcagaagggccgggacctggagcagaaggacacagccctggagcagaaggacaaggccctggagcccaaggacaaggacctggaggagaaggacaaggccctggagcagaaggacaagatccctgaggagaaggacaaggccctggagcagaaggacacagccctggagcagaaggacaaggccctggagcccaaggacaaggacctggagcagaaggacagagtgctggagcagaaggagaagatccctgaggagaaggacaaggccctggaccagaaggtgcgctctgtggagcacaaggcccctgaggacacagtggccgagatgaaggaccgggacctggagcagacagacaaggcccctgagcagaagcaccaggcccaggagcagaaggacaaggtgtctgagaagaaggaccaggccctggagcagaagtactgggccctgggccagaaggatgaggccctggagcagaacatccaggccctggaggagaaccaccagacccaggagcaggagagcctggtgcaggaggacaagaccaggaagcccaagatgctggaggagaagagccctgagaaggtgaaggccatggaggagaagctggaggccctgctggagaagaccaaggccctgggcctggaggagagcctggtgcaggagggccgggcccgggagcaggaggagaagtactggaggggccaggatgtggtgcaggagtggcaggagaccagccccacccgggaggagcctgctggggagcagaaggagctggccccagcctgggaggacaccagccctgagcaggacaaccgctactggagaggaagagaagatgtggccctggagcaggacacctactggagggagctgagctgtgagaggaaggtgtggttcccccatgagctggatggccagggcgcccggccccactacacagaggagcgggagagcaccttcctggatgagggcccagatgatgagcaggaggtgcccctgcgggagcacgccaccaggagcccctgggccagtgacttcaaggacttccaggagagcagcccccagaagggcctggaggtggagcgctggctggccgagagccctgtgggcctgcccccagaggaggaggacaagctgaccaggagcccctttgagatcatcagccccccagccagccccccagagatggtgggccagagggtgcccagcgcccctggccaggagagccccatcccagaccccaagctgatgccccacatgaagaatgagcccaccacccccagctggctggccgacatccccccctgggtgcccaaggaccggcccctgcccccagcccccctgagccctgcccctggcccccccaccccagcccctgagagccacaccccagcccccttctcctggggcacagcagaatatgattctgtggtggccgctgtgcaggagggcgctgctgagctggagggcggcccctacagccccctgggcaaggactacaggaaggccgagggggagcgggaggaggagggccgggcagaggccccagacaagagcagccacagcagcaaggtgcctgaggccagcaagagccacgccaccacagagcctgagcagacagagcctgagcagcgggagcccaccccctacccagatgagaggagcttccagtatgctgacatctatgagcagatgatgctgaccggcctgggccctgcctgccccacccgggagccccccctgggcgctgctggggactggccaccctgcctgagcaccaaggaggccgctgctggaagaaacaccagcgctgagaaggagctgagcagccccatcagccccaagagcctgcagagcgacacccccaccttctcctatgctgccctggccggccccaccgtgccccccaggcctgagcccggccccagcatggagcccagcctgaccccacctgctgtgcccccccgggcccccatcctgagcaagggccccagcccccccctgaatggaaacatcctgagctgcagcccagaccggcgcagccccagccccaaggagagcggccgcagccactgggatgacagcaccagtgacagcgagctggagaagggggcccgggagcagcctgagaaggaggcccagagccccagccccccccaccccatccccatgggcagccccaccctgtggccagagacagaggcccacgtgagcccccccctggacagccacctgggccctgcccggcccagcctggacttccctgccagcgccttcggcttcagcagcctgcagcctgccccaccccagctgcccagccctgctgagcccaggtctgccccctgtggcagcctggccttcagcggggaccgggccctggccctggcccctggcccccccaccaggaccaggcatgatgagtacctggaggtgaccaaggcccccagcctggacagcagcctgccccagctgcccagccccagcagccctggggcccccctgctgagcaacctgcccaggcctgccagccctgccctgtctgagggcagcagcagcgaggccaccacccctgtgatcagctctgtggccgagcgcttcagccccagcctggaggccgctgagcaggagagcggggagctggaccccggcatggagcctgctgcccacagcctgtgggacctgacccccctgagccctgcccccccagccagcctggacctggccctggccccagcccccagcctgcccggggacatgggagatggcatcctgccctgccacctggagtgcagcgaggccgccacagagaagcccagccccttccaggtgcccagcgaggactgtgccgccaacggccccacagagaccagccccaaccccccaggccctgccccagccaaggccgagaatgaggaggccgccgcctgcccagcctgggagcggggggcctggccagagggcgctgagaggagcagcaggccagacaccctgctgagccctgagcagcctgtgtgcccagctgggggcagcggcggcccccccagcagcgccagccctgaggtggaggccggcccccagggctgtgccacagagccccggccccacagaggagagctgagccccagcttcctgaacccccccctgccccccagcattgatgaccgggacctgagcacagaggaggtgcggctggtgggccggggcggcagaagaagagtgggcggccctggcaccaccggcggcccctgccctgtgacagatgagaccccacccaccagcgccagtgacagcggcagcagccagagcgacagtgatgtgcccccagagacagaagaatgtcccagcatcacagctgaggccgccctggacagtgatgaagatggagacttcctgcctgtggacaaggccggcggcgtgtctggcacccaccacccccggcccggccatgaccccccacccctgccccagcctgacccccggcccagcccccccaggccagatgtgtgcatggctgaccctgagggcctgagcagcgagagcggccgggtggagcggctgcgggagaaggagaaggtgcagggccgggtgggcagaagagcccctgggaaggccaagccagccagccctgcccggcggctggacctgcggggcaagaggagccccacccctgggaagggccctgctgaccgggccagccgggccccaccccggcccaggagcaccaccagccaggtgaccccagctgaggagaaggatggccacagccccatgagcaagggcctggtgaatggcctgaaggccggccccatggccctgagcagcaagggcagcagcggggcccctgtgtatgtggacctggcctacatccccaaccactgcagcggcaagacagctgacctggacttcttcagaagagtgcgggccagctactacgtggtgtctggaaatgaccctgccaatggagagcccagcagagctgtgctggatgccctgctggagggcaaggcccagtggggcgagaacctgcaggtgaccctcatccccacccatgacacagaggtgacccgggagtggtaccagcagacccatgagcagcagcagcagctgaatgtgctggtgctggccagcagcagcacagtggtgatgcaggatgagagcttccctgcctgcaagattgagttctag

SEQ ID NO: 159754 - DNA, 9126 bp, synthetic construct
  misc_feature 1..9126: note = Description of Artificial Sequence: Synthetic coding sequence
  source 1..9126: mol_type = other DNA
atggagacagaagctgagcccgcccggccccatggagtggccatggagaccaccccaggcctgggcctgcggagccctggggcccccctggcccagaacccagctgagctgctgtgtgaggccggggctgctgtggccgccgcccgctgggacctgcagaagcacagcctgctgattgtgattggagacatcggcacagagagccagctgcgggctgtgcgggcccacctggagcagggcatcctgtcctggaacatcgacctgagcagctttgacctgaaccagcagctgcggctcttcatcaccaggcacctggcccacttcagcagcgaggtgaagggccagaggaccctgtgccaccagagcgagatcctggagaccatcatcctggtgaaccccagcgctgacagcatcagcagcgaggtgcaccacctgctgagcagcagcagcgcctacaagctgctgatcctgagcggccagagcctggagcccggcggggacctgatcctgcagagcggcacctacagctatgagaactttgcccaggtgctgcacaaccctgagatcagccagctgctgagcaacagagaccccggcatccaggccttcctgactgtgtcctgcctgggggagggggactggagccacctgggcctgagcagcagccaggagaccctgcacctgcggctgaaccctgagcccaccctgcccaccatggatggagtggccgagttctctgaatatgtgtctgagaccgtggatgtgcccagcccctttgacctgctggagccccccaccagcggcggcttcctgaagctgagcaagccctgctgctacatcttccctgggggccgcggggacagcgccctgtttgctgtgaatggcttcaacatcctggtggatggcggcagtgacaggaagagctgcttctggaagctggtgcgccacctggacagaattgacagcgtgctgctgacccacatcggggctgacaacctgcccggcatcaatggcctgctgcagaggaaggtggccgagctggaggaggagcagagccagggcagcagcagctacagcgactgggtgaagaacctgatcagccctgagctgggcgtggtgttcttcaacgtgcctgagaagctgcggctgcctgatgccagcaggaaggccaagaggagcattgaggaggcctgcctgaccctgcagcacctgaaccggctgggcatccaggccgagcccctgtacagagtggtgagcaacaccatcgagcccctgaccctcttccacaagatgggcgtgggccgcctggacatgtatgtgctgaaccctgtgaaggacagcaaggagatgcagttcctgatgcagaagtgggccggcaacagcaaggccaagacaggaattgtgctgcccaacgggaaggaggccgagatctctgtgccctacctgaccagcatcacagccctggtggtgtggctgcctgccaaccccacagagaagatcgtgcgggtgctcttccctggaaatgccccccagaacaagatcctggagggcctggagaagctgcggcacctggacttcctgcgctaccctgtggccacccagaaggacctggccagcggggctgtgcccaccaacctgaagcccagcaagatcaagcagagagctgacagcaaggagagcctgaaggccaccaccaagacagctgtgtccaagctggccaagcgggaggaggtggtggaggagggcgccaaggaggcccggtctgagctggccaaggagctggccaagacagagaagaaggccaaggagagcagcgagaagcccccagagaagccagccaagccagagcgggtgaagacagagagcagcgaggccctgaaggccgagaagaggaagctgatcaaggacaaggtgggcaagaagcacctgaaggagaagatcagcaagctggaggagaagaaggacaaggagaagaaggagatcaagaaggagaggaaggagctgaagaaggatgagggcaggaaggaggagaagaaggatgccaagaaggaggagaagaggaaggacaccaagccagagctgaagaagatcagcaagccagacctgaagcccttcaccccagaggtgaggaagaccctgtacaaggccaaggtgcccggccgggtgaagattgacaggagccgggccatccggggggagaaggagctgagcagcgagccccagaccccaccagcccagaagggcaccgtgcccctgcccaccatcagcggccaccgggagctggtgctgagcagccctgaggacctgacccaggactttgaggagatgaagcgggaggagcgggccctgctggccgagcagagggacaccggcctgggggacaagcccttccccctggacacagctgaggagggcccccccagcacagccatccagggcaccccaccttctgtgcccggcctgggccaggaggagcacgtgatgaaggagaaggagctggtgcctgaggtgcctgaggagcagggcagcaaggaccggggcctggacagcggggctgagacagaggaggagaaggacacctgggaggagaagaagcagcgggaggccgagcggctgcctgacagaacagaggcccgggaggagagcgagcctgaggtgaaggaggatgtgattgagaaggccgagctggaggagatggaggaggtgcaccccagtgatgaggaggaggaggatgccaccaaggccgagggcttctaccagaagcacatgcaggagcccctgaaggtgacccccaggagccgggaggcctttggaggccgggagctgggcctgcagggcaaggcccctgagaaggagaccagcctcttcctgagcagcctgaccaccccagctggggccacagaacatgtgtcctacatccaggatgagaccatccctggctacagcgagacagagcagaccatcagtgatgaggagatccatgatgagcctgaggagaggcctgccccaccccgcttccacaccagcacctatgacctgcccggccctgagggcgccggcccctttgaggccagccagcctgctgacagcgctgtgcctgccaccagcggcaaggtgtatggcaccccagagacagagctgacctaccccaccaacatcgtggccgcccccctggccgaggaggagcacgtgagcagcgccaccagcatcacagaatgtgacaagctgagcagctttgccacctctgtggccgaggaccagagcgtggccagcctgacagccccccagacagaggagaccgggaagagcagcctgctgctggacacagtgaccagcatccccagcagcaggacagaggccacccagggcctggactatgtgcccagcgctggcaccatcagccccaccagcagcctggaggaggacaagggcttcaagagccccccctgtgaggacttctctgtgactggagagagcgagaagagaggagagatcatcggcaagggcctgtctggagagagagctgtggaggaggaggaggaggagacagccaacgtggagatgtctgagaagctgtgcagccagtatggcacccctgtgttcagcgcccctggccacgccctgcaccctggagagcccgccctgggggaggccgaggagcgctgcctgagcccagatgacagcacagtgaagatggccagccccccacccagcggcccccccagcgccacccacacccccttccaccagagccctgtggaggagaagtctgagccccaggacttccaggaggccgacagctggggagacaccaagaggaccccaggagtgggcaaggaggatgctgctgaggagaccgtgaagccaggccctgaggagggcaccctggagaaggaggagaaggtgcccccacccaggagcccccaggcccaggaggcccctgtgaacattgatgagggcctgaccggctgcaccatccagctgctgcctgcccaggacaaggccatcgtgtttgagatcatggaggccggggagcccaccggccccatcctgggcgctgaggccctgcccggcggcctgcggaccctgccccaggagcccgggaagccccagaaggatgaggtgctgcgctacccagacaggagcctgagcccagaagatgctgagagcctgtctgtgctgtctgtgcccagcccagacacagccaaccaggagcccacccccaagagcccctgtggcctgacagagcagtacctgcacaaggaccgctggccagaggtgtccccagaggacacccagagcctgagcctgtctgaggagagccccagcaaggagaccagcctggatgtgagcagcaagcagctgagccctgagagcctgggcaccctgcagtttggagagctgaacctgggcaaggaggagatgggccacctgatgcaggccgaggacaccagccaccacacagcccccatgtctgtgcctgagccccacgccgccacagccagccccccaacagatggcaccacccgctacagcgcccagacagacatcacagatgacagcctggacaggaagagccctgccagcagcttcagccacagcaccccatctggaaatggcaagtacctgcccggggccatcaccagcccagatgagcacatcctgaccccagacagcagcttcagcaagagccctgagagcctgcccggccctgccctggaggacatcgccatcaagtgggaggacaaggtgcccggcctgaaggacaggaccagcgagcagaagaaggagcctgagcccaaggatgaggtgctgcagcagaaggacaagaccctggagcacaaggaggtggtggagcccaaggacacagccatctaccagaaggatgaggccctgcacgtgaagaatgaggccgtgaagcagcaggacaaggccctggagcagaagggccgggacctggagcagaaggacacagccctggagcagaaggacaaggccctggagcccaaggacaaggacctggaggagaaggacaaggccctggagcagaaggacaagatccctgaggagaaggacaaggccctggagcagaaggacacagccctggagcagaaggacaaggccctggagcccaaggacaaggacctggagcagaaggacagagtgctggagcagaaggagaagatccctgaggagaaggacaaggccctggaccagaaggtgcgctctgtggagcacaaggcccctgaggacacagtggccgagatgaaggaccgggacctggagcagacagacaaggcccctgagcagaagcaccaggcccaggagcagaaggacaaggtgtctgagaagaaggaccaggccctggagcagaagtactgggccctgggccagaaggatgaggccctggagcagaacatccaggccctggaggagaaccaccagacccaggagcaggagagcctggtgcaggaggacaagaccaggaagcccaagatgctggaggagaagagccctgagaaggtgaaggccatggaggagaagctggaggccctgctggagaagaccaaggccctgggcctggaggagagcctggtgcaggagggccgggcccgggagcaggaggagaagtactggaggggccaggatgtggtgcaggagtggcaggagaccagccccacccgggaggagcctgctggggagcagaaggagctggccccagcctgggaggacaccagccctgagcaggacaaccgctactggagaggaagagaagatgtggccctggagcaggacacctactggagggagctgagctgtgagaggaaggtgtggttcccccatgagctggatggccagggcgcccggccccactacacagaggagcgggagagcaccttcctggatgagggcccagatgatgagcaggaggtgcccctgcgggagcacgccaccaggagcccctgggccagtgacttcaaggacttccaggagagcagcccccagaagggcctggaggtggagcgctggctggccgagagccctgtgggcctgcccccagaggaggaggacaagctgaccaggagcccctttgagatcatcagccccccagccagccccccagagatggtgggccagagggtgcccagcgcccctggccaggagagccccatcccagaccccaagctgatgccccacatgaagaatgagcccaccacccccagctggctggccgacatccccccctgggtgcccaaggaccggcccctgcccccagcccccctgagccctgcccctggcccccccaccccagcccctgagagccacaccccagcccccttctcctggggcacagcagaatatgattctgtggtggccgctgtgcaggagggcgctgctgagctggagggcggcccctacagccccctgggcaaggactacaggaaggccgagggggagcgggaggaggagggccgggcagaggccccagacaagagcagccacagcagcaaggtgcctgaggccagcaagagccacgccaccacagagcctgagcagacagagcctgagcagcgggagcccaccccctacccagatgagaggagcttccagtatgctgacatctatgagcagatgatgctgaccggcctgggccctgcctgccccacccgggagccccccctgggcgctgctggggactggccaccctgcctgagcaccaaggaggccgctgctggaagaaacaccagcgctgagaaggagctgagcagccccatcagccccaagagcctgcagagcgacacccccaccttctcctatgctgccctggccggccccaccgtgccccccaggcctgagcccggccccagcatggagcccagcctgaccccacctgctgtgcccccccgggcccccatcctgagcaagggccccagcccccccctgaatggaaacatcctgagctgcagcccagaccggcgcagccccagccccaaggagagcggccgcagccactgggatgacagcaccagtgacagcgagctggagaagggggcccgggagcagcctgagaaggaggcccagagccccagccccccccaccccatccccatgggcagccccaccctgtggccagagacagaggcccacgtgagcccccccctggacagccacctgggccctgcccggcccagcctggacttccctgccagcgccttcggcttcagcagcctgcagcctgccccaccccagctgcccagccctgctgagcccaggtctgccccctgtggcagcctggccttcagcggggaccgggccctggccctggcccctggcccccccaccaggaccaggcatgatgagtacctggaggtgaccaaggcccccagcctggacagcagcctgccccagctgcccagccccagcagccctggggcccccctgctgagcaacctgcccaggcctgccagccctgccctgtctgagggcagcagcagcgaggccaccacccctgtgatcagctctgtggccgagcgcttcagccccagcctggaggccgctgagcaggagagcggggagctggaccccggcatggagcctgctgcccacagcctgtgggacctgacccccctgagccctgcccccccagccagcctggacctggccctggccccagcccccagcctgcccggggacatgggagatggcatcctgccctgccacctggagtgcagcgaggccgccacagagaagcccagccccttccaggtgcccagcgaggactgtgccgccaacggccccacagagaccagccccaaccccccaggccctgccccagccaaggccgagaatgaggaggccgccgcctgcccagcctgggagcggggggcctggccagagggcgctgagaggagcagcaggccagacaccctgctgagccctgagcagcctgtgtgcccagctgggggcagcggcggcccccccagcagcgccagccctgaggtggaggccggcccccagggctgtgccacagagccccggccccacagaggagagctgagccccagcttcctgaacccccccctgccccccagcattgatgaccgggacctgagcacagaggaggtgcggctggtgggccggggcggcagaagaagagtgggcggccctggcaccaccggcggcccctgccctgtgacagatgagaccccacccaccagcgccagtgacagcggcagcagccagagcgacagtgatgtgcccccagagacagaagaatgtcccagcatcacagctgaggccgccctggacagtgatgaagatggagacttcctgcctgtggacaaggccggcggcgtgtctggcacccaccacccccggcccggccatgaccccccacccctgccccagcctgacccccggcccagcccccccaggccagatgtgtgcatggctgaccctgagggcctgagcagcgagagcggccgggtggagcggctgcgggagaaggagaaggtgcagggccgggtgggcagaagagcccctgggaaggccaagccagccagccctgcccggcggctggacctgcggggcaagaggagccccacccctgggaagggccctgctgaccgggccagccgggccccaccccggcccaggagcaccaccagccaggtgaccccagctgaggagaaggatggccacagccccatgagcaagggcctggtgaatggcctgaaggccggccccatggccctgagcagcaagggcagcagcggggcccctgtgtatgtggacctggcctacatccccaaccactgcagcggcaagacagctgacctggacttcttcagaagagtgcgggccagctactacgtggtgtctggaaatgaccctgccaatggagagcccagcagagctgtgctggatgccctgctggagggcaaggcccagtggggcgagaacctgcaggtgaccctcatccccacccatgacacagaggtgacccgggagtggtaccagcagacccatgagcagcagcagcagctgaatgtgctggtgctggccagcagcagcacagtggtgatgcaggatgagagcttccctgcctgcaagattgagttctag

SEQ ID NO: 159755 - DNA, 8418 bp, synthetic construct
  misc_feature 1..8418: note = Description of Artificial Sequence: Synthetic coding sequence
  source 1..8418: mol_type = other DNA
atggatggagtggccgagttctctgaatatgtgtctgagaccgtggatgtgcccagcccctttgacctgctggagccccccaccagcggcggcttcctgaagctgagcaagccctgctgctacatcttccctgggggccgcggggacagcgccctgtttgctgtgaatggcttcaacatcctggtggatggcggcagtgacaggaagagctgcttctggaagctggtgcgccacctggacagaattgacagcgtgctgctgacccacatcggggctgacaacctgcccggcatcaatggcctgctgcagaggaaggtggccgagctggaggaggagcagagccagggcagcagcagctacagcgactgggtgaagaacctgatcagccctgagctgggcgtggtgttcttcaacgtgcctgagaagctgcggctgcctgatgccagcaggaaggccaagaggagcattgaggaggcctgcctgaccctgcagcacctgaaccggctgggcatccaggccgagcccctgtacagagtggtgagcaacaccatcgagcccctgaccctcttccacaagatgggcgtgggccgcctggacatgtatgtgctgaaccctgtgaaggacagcaaggagatgcagttcctgatgcagaagtgggccggcaacagcaaggccaagacaggaattgtgctgcccaacgggaaggaggccgagatctctgtgccctacctgaccagcatcacagccctggtggtgtggctgcctgccaaccccacagagaagatcgtgcgggtgctcttccctggaaatgccccccagaacaagatcctggagggcctggagaagctgcggcacctggacttcctgcgctaccctgtggccacccagaaggacctggccagcggggctgtgcccaccaacctgaagcccagcaagatcaagcagagagctgacagcaaggagagcctgaaggccaccaccaagacagctgtgtccaagctggccaagcgggaggaggtggtggaggagggcgccaaggaggcccggtctgagctggccaaggagctggccaagacagagaagaaggccaaggagagcagcgagaagcccccagagaagccagccaagccagagcgggtgaagacagagagcagcgaggccctgaaggccgagaagaggaagctgatcaaggacaaggtgggcaagaagcacctgaaggagaagatcagcaagctggaggagaagaaggacaaggagaagaaggagatcaagaaggagaggaaggagctgaagaaggatgagggcaggaaggaggagaagaaggatgccaagaaggaggagaagaggaaggacaccaagccagagctgaagaagatcagcaagccagacctgaagcccttcaccccagaggtgaggaagaccctgtacaaggccaaggtgcccggccgggtgaagattgacaggagccgggccatccggggggagaaggagctgagcagcgagccccagaccccaccagcccagaagggcaccgtgcccctgcccaccatcagcggccaccgggagctggtgctgagcagccctgaggacctgacccaggactttgaggagatgaagcgggaggagcgggccctgctggccgagcagagggacaccggcctgggggacaagcccttccccctggacacagctgaggagggcccccccagcacagccatccagggcaccccaccttctgtgcccggcctgggccaggaggagcacgtgatgaaggagaaggagctggtgcctgaggtgcctgaggagcagggcagcaaggaccggggcctggacagcggggctgagacagaggaggagaaggacacctgggaggagaagaagcagcgggaggccgagcggctgcctgacagaacagaggcccgggaggagagcgagcctgaggtgaaggaggatgtgattgagaaggccgagctggaggagatggaggaggtgcaccccagtgatgaggaggaggaggatgccaccaaggccgagggcttctaccagaagcacatgcaggagcccctgaaggtgacccccaggagccgggaggcctttggaggccgggagctgggcctgcagggcaaggcccctgagaaggagaccagcctcttcctgagcagcctgaccaccccagctggggccacagaacatgtgtcctacatccaggatgagaccatccctggctacagcgagacagagcagaccatcagtgatgaggagatccatgatgagcctgaggagaggcctgccccaccccgcttccacaccagcacctatgacctgcccggccctgagggcgccggcccctttgaggccagccagcctgctgacagcgctgtgcctgccaccagcggcaaggtgtatggcaccccagagacagagctgacctaccccaccaacatcgtggccgcccccctggccgaggaggagcacgtgagcagcgccaccagcatcacagaatgtgacaagctgagcagctttgccacctctgtggccgaggaccagagcgtggccagcctgacagccccccagacagaggagaccgggaagagcagcctgctgctggacacagtgaccagcatccccagcagcaggacagaggccacccagggcctggactatgtgcccagcgctggcaccatcagccccaccagcagcctggaggaggacaagggcttcaagagccccccctgtgaggacttctctgtgactggagagagcgagaagagaggagagatcatcggcaagggcctgtctggagagagagctgtggaggaggaggaggaggagacagccaacgtggagatgtctgagaagctgtgcagccagtatggcacccctgtgttcagcgcccctggccacgccctgcaccctggagagcccgccctgggggaggccgaggagcgctgcctgagcccagatgacagcacagtgaagatggccagccccccacccagcggcccccccagcgccacccacacccccttccaccagagccctgtggaggagaagtctgagccccaggacttccaggaggccgacagctggggagacaccaagaggaccccaggagtgggcaaggaggatgctgctgaggagaccgtgaagccaggccctgaggagggcaccctggagaaggaggagaaggtgcccccacccaggagcccccaggcccaggaggcccctgtgaacattgatgagggcctgaccggctgcaccatccagctgctgcctgcccaggacaaggccatcgtgtttgagatcatggaggccggggagcccaccggccccatcctgggcgctgaggccctgcccggcggcctgcggaccctgccccaggagcccgggaagccccagaaggatgaggtgctgcgctacccagacaggagcctgagcccagaagatgctgagagcctgtctgtgctgtctgtgcccagcccagacacagccaaccaggagcccacccccaagagcccctgtggcctgacagagcagtacctgcacaaggaccgctggccagaggtgtccccagaggacacccagagcctgagcctgtctgaggagagccccagcaaggagaccagcctggatgtgagcagcaagcagctgagccctgagagcctgggcaccctgcagtttggagagctgaacctgggcaaggaggagatgggccacctgatgcaggccgaggacaccagccaccacacagcccccatgtctgtgcctgagccccacgccgccacagccagccccccaacagatggcaccacccgctacagcgcccagacagacatcacagatgacagcctggacaggaagagccctgccagcagcttcagccacagcaccccatctggaaatggcaagtacctgcccggggccatcaccagcccagatgagcacatcctgaccccagacagcagcttcagcaagagccctgagagcctgcccggccctgccctggaggacatcgccatcaagtgggaggacaaggtgcccggcctgaaggacaggaccagcgagcagaagaaggagcctgagcccaaggatgaggtgctgcagcagaaggacaagaccctggagcacaaggaggtggtggagcccaaggacacagccatctaccagaaggatgaggccctgcacgtgaagaatgaggccgtgaagcagcaggacaaggccctggagcagaagggccgggacctggagcagaaggacacagccctggagcagaaggacaaggccctggagcccaaggacaaggacctggaggagaaggacaaggccctggagcagaaggacaagatccctgaggagaaggacaaggccctggagcagaaggacacagccctggagcagaaggacaaggccctggagcccaaggacaaggacctggagcagaaggacagagtgctggagcagaaggagaagatccctgaggagaaggacaaggccctggaccagaaggtgcgctctgtggagcacaaggcccctgaggacacagtggccgagatgaaggaccgggacctggagcagacagacaaggcccctgagcagaagcaccaggcccaggagcagaaggacaaggtgtctgagaagaaggaccaggccctggagcagaagtactgggccctgggccagaaggatgaggccctggagcagaacatccaggccctggaggagaaccaccagacccaggagcaggagagcctggtgcaggaggacaagaccaggaagcccaagatgctggaggagaagagccctgagaaggtgaaggccatggaggagaagctggaggccctgctggagaagaccaaggccctgggcctggaggagagcctggtgcaggagggccgggcccgggagcaggaggagaagtactggaggggccaggatgtggtgcaggagtggcaggagaccagccccacccgggaggagcctgctggggagcagaaggagctggccccagcctgggaggacaccagccctgagcaggacaaccgctactggagaggaagagaagatgtggccctggagcaggacacctactggagggagctgagctgtgagaggaaggtgtggttcccccatgagctggatggccagggcgcccggccccactacacagaggagcgggagagcaccttcctggatgagggcccagatgatgagcaggaggtgcccctgcgggagcacgccaccaggagcccctgggccagtgacttcaaggacttccaggagagcagcccccagaagggcctggaggtggagcgctggctggccgagagccctgtgggcctgcccccagaggaggaggacaagctgaccaggagcccctttgagatcatcagccccccagccagccccccagagatggtgggccagagggtgcccagcgcccctggccaggagagccccatcccagaccccaagctgatgccccacatgaagaatgagcccaccacccccagctggctggccgacatccccccctgggtgcccaaggaccggcccctgcccccagcccccctgagccctgcccctggcccccccaccccagcccctgagagccacaccccagcccccttctcctggggcacagcagaatatgattctgtggtggccgctgtgcaggagggcgctgctgagctggagggcggcccctacagccccctgggcaaggactacaggaaggccgagggggagcgggaggaggagggccgggcagaggccccagacaagagcagccacagcagcaaggtgcctgaggccagcaagagccacgccaccacagagcctgagcagacagagcctgagcagcgggagcccaccccctacccagatgagaggagcttccagtatgctgacatctatgagcagatgatgctgaccggcctgggccctgcctgccccacccgggagccccccctgggcgctgctggggactggccaccctgcctgagcaccaaggaggccgctgctggaagaaacaccagcgctgagaaggagctgagcagccccatcagccccaagagcctgcagagcgacacccccaccttctcctatgctgccctggccggccccaccgtgccccccaggcctgagcccggccccagcatggagcccagcctgaccccacctgctgtgcccccccgggcccccatcctgagcaagggccccagcccccccctgaatggaaacatcctgagctgcagcccagaccggcgcagccccagccccaaggagagcggccgcagccactgggatgacagcaccagtgacagcgagctggagaagggggcccgggagcagcctgagaaggaggcccagagccccagccccccccaccccatccccatgggcagccccaccctgtggccagagacagaggcccacgtgagcccccccctggacagccacctgggccctgcccggcccagcctggacttccctgccagcgccttcggcttcagcagcctgcagcctgccccaccccagctgcccagccctgctgagcccaggtctgccccctgtggcagcctggccttcagcggggaccgggccctggccctggcccctggcccccccaccaggaccaggcatgatgagtacctggaggtgaccaaggcccccagcctggacagcagcctgccccagctgcccagccccagcagccctggggcccccctgctgagcaacctgcccaggcctgccagccctgccctgtctgagggcagcagcagcgaggccaccacccctgtgatcagctctgtggccgagcgcttcagccccagcctggaggccgctgagcaggagagcggggagctggaccccggcatggagcctgctgcccacagcctgtgggacctgacccccctgagccctgcccccccagccagcctggacctggccctggccccagcccccagcctgcccggggacatgggagatggcatcctgccctgccacctggagtgcagcgaggccgccacagagaagcccagccccttccaggtgcccagcgaggactgtgccgccaacggccccacagagaccagccccaaccccccaggccctgccccagccaaggccgagaatgaggaggccgccgcctgcccagcctgggagcggggggcctggccagagggcgctgagaggagcagcaggccagacaccctgctgagccctgagcagcctgtgtgcccagctgggggcagcggcggcccccccagcagcgccagccctgaggtggaggccggcccccagggctgtgccacagagccccggccccacagaggagagctgagccccagcttcctgaacccccccctgccccccagcattgatgaccgggacctgagcacagaggaggtgcggctggtgggccggggcggcagaagaagagtgggcggccctggcaccaccggcggcccctgccctgtgacagatgagaccccacccaccagcgccagtgacagcggcagcagccagagcgacagtgatgtgcccccagagacagaagaatgtcccagcatcacagctgaggccgccctggacagtgatgaagatggagacttcctgcctgtggacaaggccggcggcgtgtctggcacccaccacccccggcccggccatgaccccccacccctgccccagcctgacccccggcccagcccccccaggccagatgtgtgcatggctgaccctgagggcctgagcagcgagagcggccgggtggagcggctgcgggagaaggagaaggtgcagggccgggtgggcagaagagcccctgggaaggccaagccagccagccctgcccggcggctggacctgcggggcaagaggagccccacccctgggaagggccctgctgaccgggccagccgggccccaccccggcccaggagcaccaccagccaggtgaccccagctgaggagaaggatggccacagccccatgagcaagggcctggtgaatggcctgaaggccggccccatggccctgagcagcaagggcagcagcggggcccctgtgtatgtggacctggcctacatccccaaccactgcagcggcaagacagctgacctggacttcttcagaagagtgcgggccagctactacgtggtgtctggaaatgaccctgccaatggagagcccagcagagctgtgctggatgccctgctggagggcaaggcccagtggggcgagaacctgcaggtgtctgtgaccctcatccccacccatgacacagaggtgacccgggagtggtaccagcagacccatgagcagcagcagcagctgaatgtgctggtgctggccagcagcagcacagtggtgatgcaggatgagagcttccctgcctgcaagattgagttctag

SEQ ID NO: 159756 - DNA, 1884 bp, synthetic construct
  misc_feature 1..1884: note = Description of Artificial Sequence: Synthetic coding sequence
  source 1..1884: mol_type = other DNA
atggatggagtggccgagttctctgaatatgtgtctgagaccgtggatgtgcccagcccctttgacctgctggagccccccaccagcggcggcttcctgaagctgagcaagccctgctgctacatcttccctgggggccgcggggacagcgccctgtttgctgtgaatggcttcaacatcctggtggatggcggcagtgacaggaagagctgcttctggaagctggtgcgccacctggacagaattgacagcgtgctgctgacccacatcggggctgacaacctgcccggcatcaatggcctgctgcagaggaaggtggccgagctggaggaggagcagagccagggcagcagcagctacagcgactgggtgaagaacctgatcagccctgagctgggcgtggtgttcttcaacgtgcctgagaagctgcggctgcctgatgccagcaggaaggccaagaggagcattgaggaggcctgcctgaccctgcagcacctgaaccggctgggcatccaggccgagcccctgtacagagtggtgagcaacaccatcgagcccctgaccctcttccacaagatgggcgtgggccgcctggacatgtatgtgctgaaccctgtgaaggacagcaaggagatgcagttcctgatgcagaagtgggccggcaacagcaaggccaagacaggaattgtgctgcccaacgggaaggaggccgagatctctgtgccctacctgaccagcatcacagccctggtggtgtggctgcctgccaaccccacagagaagatcgtgcgggtgctcttccctggaaatgccccccagaacaagatcctggagggcctggagaagctgcggcacctggacttcctgcgctaccctgtggccacccagaaggacctggccagcggggctgtgcccaccaacctgaagcccagcaagatcaagcagagagctgacagcaaggagagcctgaaggccaccaccaagacagctgtgtccaagctggccaagcgggaggaggtggtggaggagggcgccaaggaggcccggtctgagctggccaaggagctggccaagacagagaagaaggccaaggagagcagcgagaagcccccagagaagccagccaagccagagcgggtgaagacagagagcagcgaggccctgaaggccgagaagaggaagctgatcaaggacaaggtgggcaagaagcacctgaaggagaagatcagcaagctggaggagaagaaggacaaggagaagaaggagatcaagaaggagaggaaggagctgaagaaggatgagggcaggaaggaggagaagaaggatgccaagaaggaggagaagaggaaggacaccaagccagagctgaagaagatcagcaagccagacctgaagcccttcaccccagaggtgaggaagaccctgtacaaggccaaggtgcccggccgggtgaagattgacaggagccgggccatccggggggagaaggagctgagcagcgagccccagaccccaccagcccagaagggcaccgtgcccctgcccaccatcagcggccaccgggagctggtgctgagcagccctgaggacctgacccaggactttgaggagatgaagcgggaggagcgggccctgctggccgagcagagggacaccggcctgggggacaagcccttccccctggacacagctgaggagggcccccccagcacagccatccagggcaccccaccttctgtgcccggcctgggccaggaggagcacgtgatgaaggagaaggagctggtgcctgaggtgcctgaggagcagggcagcaaggaccggggcctggacagcggggctgagacagaggagaagaagaagaagaagaagaagaagaagtag

SEQ ID NO: 159757 - DNA, 1680 bp, synthetic construct
  misc_feature 1..1680: note = Description of Artificial Sequence: Synthetic coding sequence
  source 1..1680: mol_type = other DNA
atggctgatgagaggaaggatgaggccaaggccccccactggaccagcgcccccctgacagaggccagcgcccacagccaccccccagagatcaaggaccagggcggggccggggagggcctggtgcgcagcgccaacggcttcccctaccgggaggatgaggagggcgccttcggggagcacggcagccagggcacctacagcaacaccaaggaaaatggcatcaacggggagctgaccagcgctgaccgggagacagctgaggaggtgtctgcccgcatcgtgcaggtggtgacagctgaggccgtggccgtgctgaagggggagcaggagaaggaggcccagcacaaggaccagacagctgccctgcccctggccgctgaggagacagccaacctgccccccagccccccacccagccctgccagcgagcagacagtgacagtggaggaggccgccggcggggagagcgccctggcccccagcgtcttcaagcaggccaaggacaaggtgagcaacagcaccctgagcaagatcccagccctgcagggcagcaccaagagcccccgctacagcagcgcctgccccagcaccaccaagagggccaccttcagtgacagcctgctgatccagcccaccagcgctggcagcacagaccggctgccctacagcaagagcggcaacaaggatggagtgaccaagagccctgagaagaggagcagcctgccccggcccagcagcatcctgcccccccggcggggcgtgtctggggacagagatgaaaattccttcagcctgaacagcagcatcagcagcagcgcccggaggaccaccaggtctgagcccatccggcgggccggcaagagcggcaccagcacccccaccaccccaggcagcacagccatcaccccaggcaccccacccagctacagcagcaggaccccaggcaccccaggcacccccagctaccccaggaccccccacaccccaggcacccccaagagcgccatcctggtgcccagcgagaagaaggtggccatcatccgcaccccacccaagagccctgccacccccaagcagctgcggctcatcaaccagcccctgcctgacctgaagaatgtgaagagcaagattggcagcacagacaacatcaagtaccagcccaagggcggccaggtgcgcatcctgaacaagaagattgacttcagcaaggtgcagagccgctgtggcagcaaggacaacatcaagcacagcgctgggggcggcaatgtgcagatcgtgaccaagaagattgacctgagccacgtgaccagcaaatgtggcagcctgaagaacatccgccacaggcctgggggcggccgggtgaagattgaatctgtgaagctggacttcaaggagaaggcccaggccaaggtgggcagcctggacaatgcccaccacgtgcctgggggcggcaatgtgaagattgacagccagaagctgaacttccgggagcacgccaaggcccgggtggaccacggggctgagatcatcacccagagccctggccgcagctctgtggccagcccccggcggctgagcaatgtgagcagcagcggcagcatcaacctgctggagagcccccagctggccaccctggccgaggatgtgacagctgccctggccaagcagggcctgtag

SEQ ID NO: 159758 - DNA, 5484 bp, synthetic construct
  misc_feature 1..5484: note = Description of Artificial Sequence: Synthetic coding sequence
  source 1..5484: mol_type = other DNA
atggctgatgagaggaaggatgaggccaaggccccccactggaccagcgcccccctgacagaggccagcgcccacagccaccccccagagatcaaggaccagggcggggccggggagggcctggtgcgcagcgccaacggcttcccctaccgggaggatgaggagggcgccttcggggagcacggcagccagggcacctacagcaacaccaaggaaaatggcatcaacggggagctgaccagcgctgaccgggagacagctgaggaggtgtctgcccgcatcgtgcaggtggtgacagctgaggccgtggccgtgctgaagggggagcaggagaaggaggcccagcacaaggaccagacagctgccctgcccctggccgctgaggagacagccaacctgccccccagccccccacccagccctgccagcgagcagacagtgacagtggaggaggacctgctgacagccagcaagatggagttccatgaccagcaggagctgacccccagcacagctgagcccagcgaccagaaggagaaggagagcgagaagcagagcaagccaggagaggacctgaagcatgctgccctggtgtcccagcctgagaccaccaagacctacccagacaagaaggacatgcagggcacagaggaggagaaggcccccctggccctgtttggccacaccctggtggccagcctggaggacatgaagcagaagacagagcccagcctggtggtgcccggcatcgacctgcccaaggagccccccacccccaaggagcagaaggactggttcatcgagatgcccacagaggccaagaaggatgagtggggcctggtggcccccatcagccctggccccctgacccccatgagggagaaggatgtgtttgatgacatccccaagtgggagggcaagcagtttgacagccccatgcccagccccttccagggcggcagcttcaccctgcccctggatgtgatgaagaatgaaattgtgacagagaccagcccctttgccccagccttcctgcagccagatgacaagaagagcctgcagcagaccagcggccctgccacagccaaggacagcttcaagattgaggagccccatgaggccaagccagacaagatggccgaggcccctccttctgaggccatgaccctgcccaaggatgcccacatccctgtggtggaggagcacgtgatgggcaaggtgctggaggaggagaaggaggccatcaaccaggagaccgtgcagcagagggacaccttcaccccatctggccaggagcccatcctgacagagaaggagacagagctgaagctggaggagaagaccaccatcagtgacaaggaggccgtgcccaaggagagcaagccacccaagccagcagatgaggagatcggcatcatccagaccagcacagagcacaccttcagcgagcagaaggaccaggagcccaccacagacatgctgaagcaggacagcttccctgtgtccctggagcaggccgtgacagacagcgccatgaccagcaagaccctggagaaggccatgacagagcccagcgccctgattgagaagagcagcatccaggagctgtttgagatgagggtggatgacaaggacaagattgaaggagtgggcgccgccaccagcgctgagctggacatgcccttctatgaggacaagagcggcatgagcaagtactttgagaccagcgccctgaaggaggaggccaccaagagcattgagcccggcagtgactactatgagctgagtgacacccgggagagcgtgcatgagagcattgacaccatgagccccatgcacaagaatggagacaaggagttccagacaggcaaggagagccagcccagccccccagcccaggaggccggctacagcaccctggcccagagctaccccagcgacctgcctgaggagcccagcagcccccaggagaggatgttcaccatcgaccccaaggtgtatggagagaagagggacctgcacagcaagaacaaggatgacctgaccctgagccgcagcctgggcctgggcggccgcagcgccatcgagcagaggtccatgagcatcaacctgcccatgagctgcctggacagcatcgccctgggcttcaactttggccggggccatgacctgagccccctggccagtgacatcctgaccaacaccagcggctccatggatgaaggagatgactacctgcctgccaccaccccagccctggagaaggccccctgcttccctgtggagagcaaggaggaggagcagatcgagaaggtgaaggccactggagaggagagcacccaggccgagatcagctgtgagagccccttcctggccaaggacttctacaagaatggcaccgtgatggccccagacctgcctgagatgctggacctggccggcaccaggagccggctggcctctgtgtctgcagatgctgaggtggcccggaggaagtctgtgcccagcgagaccgtggtggaggacagcaggacaggcctgccccctgtgacagatgaaaatcatgtgattgtgaagacagacagccagctggaggacctgggctactgtgtgttcaacaagtacacagtgcccctgcccagccctgtgcaggacagcgagaacctgagcggggagagcggcaccttctatgagggcacagatgacaaggtgagaagagacctggccacagacctgagcctgattgaggtgaagctggccgccgccggccgggtgaaggatgagttctctgtggacaaggaggccagcgcccacatcagcggggacaagagcggcctgagcaaggagtttgaccaggagaagaaggccaatgaccggctggacacagtgctggagaagtctgaggagcacgccgacagcaaggagcacgccaagaagacagaggaggccggagatgaaattgagaccttcggcctgggcgtgacctatgagcaggccctggccaaggacctgagcatccccacagatgccagcagcgagaaggccgagaagggcctgagctctgtgcctgagattgctgaggtggagcccagcaagaaggtggagcagggcctggactttgctgtgcagggccagctggatgtgaagatcagtgactttggccagatggccagcggcctgaacattgatgacagaagagccacagagctgaagctggaggccacccaggacatgacccccagcagcaaggccccccaggaggctgatgccttcatgggcgtggagagcggccacatgaaggagggcaccaaggtgtctgaaacagaggtgaaggagaaggtggccaagccagacctggtgcaccaggaggccgtggacaaggaggagagctatgagagcagcggggagcacgagagcctgaccatggagagcctgaaggcagatgagggcaagaaggagaccagccctgagagcagcctcatccaggatgaaattgctgtgaagctgtctgtggagatcccctgccccccagctgtgtctgaggccgacctggccacagatgagcgggcagatgtgcagatggagttcatccagggccccaaggaggagagcaaggagaccccagacatcagcatcacccccagtgatgtggccgagcccctgcacgagaccatcgtgtctgagcctgctgagatccagagcgaggaggaggagattgaggcccagggcgagtatgacaagctgctcttcagaagtgacaccctgcagatcacagacctgggcgtgtctggggcccgggaggagtttgtggagacctgccccagcgagcacaagggcgtgattgaatctgtggtgaccattgaagatgacttcatcaccgtggtgcagaccaccacagatgaaggagagagcggcagccacagcgtgcgctttgctgccctggagcagcctgaggtggagcggcggcccagcccccatgatgaggaggagtttgaggtggaggaggccgctgaggcccaggccgagcccaaggatggcagccctgaggccccagccagccctgagcgggaggaggtggccctgtctgagtacaagacagagacctatgatgactacaaggatgagaccaccattgatgacagcatcatggatgctgacagcctgtgggtggacacccaggatgatgacaggagcatcatgacagagcagctggagaccatccccaaggaggagaaggccgagaaggaggcccggcgcagcagcctggagaagcacaggaaggagaagcccttcaagacaggccggggccgcatcagcaccccagagaggaaggtggccaagaaggagcccagcacagtgtccagagatgaggtgcggaggaagaaggctgtgtacaagaaggccgagctggccaagaagacagaggtgcaggcccacagccccagcaggaagttcatcctgaagccagccatcaagtacacccggcccacccacctgagctgtgtgaagaggaagaccacagctgctggaggagagagcgccctggcccccagcgtcttcaagcaggccaaggacaaggtgtctgatggagtgaccaagagccctgagaagaggagcagcctgccccggcccagcagcatcctgcccccaagaagaggagtgtctggggacagagatgagaacagcttcagcctgaacagcagcatcagcagcagcgcccggaggaccaccaggtctgagcccatcagaagagctgggaagagcggcaccagcacccccaccaccccaggcagcacagccatcaccccaggcaccccacccagctacagcagcaggaccccaggcaccccaggcacccccagctaccccaggaccccccacaccccaggcacccccaagagcgccatcctggtgcccagcgagaagaaggtggccatcatccgcaccccacccaagagccctgccacccccaagcagctgcggctcatcaaccagcccctgcctgacctgaagaatgtgaagagcaagattggcagcacagacaacatcaagtaccagcccaagggcggccaggtgcagatcgtgaccaagaagattgacctgagccacgtgaccagcaaatgtggcagcctgaagaacatccgccacaggcctgggggcggccgggtgaagattgaatctgtgaagctggacttcaaggagaaggcccaggccaaggtgggcagcctggacaatgcccaccacgtgcctgggggcggcaatgtgaagattgacagccagaagctgaacttccgggagcacgccaaggcccgggtggaccacggggctgagatcatcacccagagccctggccgcagctctgtggccagcccccggcggctgagcaatgtgagcagcagcggcagcatcaacctgctggagagcccccagctggccaccctggccgaggatgtgacagctgccctggccaagcagggcctgtag

SEQ ID NO: 159759 - DNA, 1416 bp, synthetic construct
  misc_feature 1..1416: note = Description of Artificial Sequence: Synthetic coding sequence
  source 1..1416: mol_type = other DNA
atggctgatgagaggaaggatgaggccaaggccccccactggaccagcgcccccctgacagaggccagcgcccacagccaccccccagagatcaaggaccagggcggggccggggagggcctggtgcgcagcgccaacggcttcccctaccgggaggatgaggagggcgccttcggggagcacggcagccagggcacctacagcaacaccaaggaaaatggcatcaacggggagctgaccagcgctgaccgggagacagctgaggaggtgtctgcccgcatcgtgcaggtggtgacagctgaggccgtggccgtgctgaagggggagcaggagaaggaggcccagcacaaggaccagacagctgccctgcccctggccgctgaggagacagccaacctgccccccagccccccacccagccctgccagcgagcagacagtgacagtggaggaggccgccggcggggagagcgccctggcccccagcgtcttcaagcaggccaaggacaaggtgtctgatggagtgaccaagagccctgagaagaggagcagcctgccccggcccagcagcatcctgcccccaagaagaggagtgtctggggacagagatgagaacagcttcagcctgaacagcagcatcagcagcagcgcccggaggaccaccaggtctgagcccatcagaagagctgggaagagcggcaccagcacccccaccaccccaggcagcacagccatcaccccaggcaccccacccagctacagcagcaggaccccaggcaccccaggcacccccagctaccccaggaccccccacaccccaggcacccccaagagcgccatcctggtgcccagcgagaagaaggtggccatcatccgcaccccacccaagagccctgccacccccaagcagctgcggctcatcaaccagcccctgcctgacctgaagaatgtgaagagcaagattggcagcacagacaacatcaagtaccagcccaagggcggccaggtgcagatcgtgaccaagaagattgacctgagccacgtgaccagcaaatgtggcagcctgaagaacatccgccacaggcctgggggcggccgggtgaagattgaatctgtgaagctggacttcaaggagaaggcccaggccaaggtgggcagcctggacaatgcccaccacgtgcctgggggcggcaatgtgaagattgacagccagaagctgaacttccgggagcacgccaaggcccgggtggaccacggggctgagatcatcacccagagccctggccgcagctctgtggccagcccccggcggctgagcaatgtgagcagcagcggcagcatcaacctgctggagagcccccagctggccaccctggccgaggatgtgacagctgccctggccaagcagggcctgtag

SEQ ID NO: 159760 - DNA, 321 bp, synthetic construct
  misc_feature 1..321: note = Description of Artificial Sequence: Synthetic coding sequence
  source 1..321: mol_type = other DNA
atggctgatgagaggaaggatgaggccaaggccccccactggaccagcgcccccctgacagaggccagcgcccacagccaccccccagagatcaaggaccagggcggggccggggagggcctggtgcgcagcgccaacggcttcccctaccgggaggatgaggagggcgccttcggggagcacggcagccagggcacctacagcaacaccaaggaaaatggcatcaacggggagctgaccagcgctgaccgggagacagctgaggaggtgtctgcccgcatcgtgcaggtggtgacagctgaggccgtggccgtgctgtag

SEQ ID NO: 159761 - DNA, 1416 bp, synthetic construct; identical to SEQ ID NO: 159759
  misc_feature 1..1416: note = Description of Artificial Sequence: Synthetic coding sequence
  source 1..1416: mol_type = other DNA

SEQ ID NO: 159762 - DNA, 5472 bp, synthetic construct
  misc_feature 1..5472: note = Description of Artificial Sequence: Synthetic coding sequence
  source 1..5472: mol_type = other DNA
atggctgatgagaggaaggatgaggccaaggccccccactggaccagcgcccccctgacagaggccagcgcccacagccaccccccagagatcaaggaccagggcggggccggggagggcctggtgcgcagcgccaacggcttcccctaccgggaggatgaggagggcgccttcggggagcacggcagccagggcacctacagcaacaccaaggaaaatggcatcaacggggagctgaccagcgctgaccgggagacagctgaggaggtgtctgcccgcatcgtgcaggtggtgacagctgaggccgtggccgtgctgaagggggagcaggagaaggaggcccagcacaaggaccagacagctgccctgcccctggccgctgaggagacagccaacctgccccccagccccccacccagccctgccagcgagcagacagtgacagtggaggaggccagcaagatggagttccatgaccagcaggagctgacccccagcacagctgagcccagcgaccagaaggagaaggagagcgagaagcagagcaagccaggagaggacctgaagcatgctgccctggtgtcccagcctgagaccaccaagacctacccagacaagaaggacatgcagggcacagaggaggagaaggcccccctggccctgtttggccacaccctggtggccagcctggaggacatgaagcagaagacagagcccagcctggtggtgcccggcatcgacctgcccaaggagccccccacccccaaggagcagaaggactggttcatcgagatgcccacagaggccaagaaggatgagtggggcctggtggcccccatcagccctggccccctgacccccatgagggagaaggatgtgtttgatgacatccccaagtgggagggcaagcagtttgacagccccatgcccagccccttccagggcggcagcttcaccctgcccctggatgtgatgaagaatgaaattgtgacagagaccagcccctttgccccagccttcctgcagccagatgacaagaagagcctgcagcagaccagcggccctgccacagccaaggacagcttcaagattgaggagccccatgaggccaagccagacaagatggccgaggcccctccttctgaggccatgaccctgcccaaggatgcccacatccctgtggtggaggagcacgtgatgggcaaggtgctggaggaggagaaggaggccatcaaccaggagaccgtgcagcagagggacaccttcaccccatctggccaggagcccatcctgacagagaaggagacagagctgaagctggaggagaagaccaccatcagtgacaaggaggccgtgcccaaggagagcaagccacccaagccagcagatgaggagatcggcatcatccagaccagcacagagcacaccttcagcgagcagaaggaccaggagcccaccacagacatgctgaagcaggacagcttccctgtgtccctggagcaggccgtgacagacagcgccatgaccagcaagaccctggagaaggccatgacagagcccagcgccctgattgagaagagcagcatccaggagctgtttgagatgagggtggatgacaaggacaagattgaaggagtgggcgccgccaccagcgctgagctggacatgcccttctatgaggacaagagcggcatgagcaagtactttgagaccagcgccctgaaggaggaggccaccaagagcattgagcccggcagtgactactatgagctgagtgacacccgggagagcgtgcatgagagcattgacaccatgagccccatgcacaagaatggagacaaggagttccagacaggcaaggagagccagcccagccccccagcccaggaggccggctacagcaccctggcccagagctaccccagcgacctgcctgaggagcccagcagcccccaggagaggatgttcaccatcgaccccaaggtgtatggagagaagagggacctgcacagcaagaacaaggatgacctgaccctgagccgcagcctgggcctgggcggccgcagcgccatcgagcagaggtccatgagcatcaacctgcccatgagctgcctggacagcatcgccctgggcttcaactttggccggggccatgacctgagccccctggccagtgacatcctgaccaacaccagcggctccatggatgaaggagatgactacctgcctgccaccaccccagccctggagaaggccccctgcttccctgtggagagcaaggaggaggagcagatcgagaaggtgaaggccactggagaggagagcacccaggccgagatcagctgtgagagccccttcctggccaaggacttctacaagaatggcaccgtgatggccccagacctgcctgagatgctggacctggccggcaccaggagccggctggcctctgtgtctgcagatgctgaggtggcccggaggaagtctgtgcccagcgagaccgtggtggaggacagcaggacaggcctgccccctgtgacagatgaaaatcatgtgattgtgaagacagacagccagctggaggacctgggctactgtgtgttcaacaagtacacagtgcccctgcccagccctgtgcaggacagcgagaacctgagcggggagagcggcaccttctatgagggcacagatgacaaggtgagaagagacctggccacagacctgagcctgattgaggtgaagctggccgccgccggccgggtgaaggatgagttctctgtggacaaggaggccagcgcccacatcagcggggacaagagcggcctgagcaaggagtttgaccaggagaagaaggccaatgaccggctggacacagtgctggagaagtctgaggagcacgccgacagcaaggagcacgccaagaagacagaggaggccggagatgaaattgagaccttcggcctgggcgtgacctatgagcaggccctggccaaggacctgagcatccccacagatgccagcagcgagaaggccgagaagggcctgagctctgtgcctgagattgctgaggtggagcccagcaagaaggtggagcagggcctggactttgctgtgcagggccagctggatgtgaagatcagtgactttggccagatggccagcggcctgaacattgatgacagaagagccacagagctgaagctggaggccacccaggacatgacccccagcagcaaggccccccaggaggctgatgccttcatgggcgtggagagcggccacatgaaggagggcaccaaggtgtctgaaacagaggtgaaggagaaggtggccaagccagacctggtgcaccaggaggccgtggacaaggaggagagctatgagagcagcggggagcacgagagcctgaccatggagagcctgaaggcagatgagggcaagaaggagaccagccctgagagcagcctcatccaggatgaaattgctgtgaagctgtctgtggagatcccctgccccccagctgtgtctgaggccgacctggccacagatgagcgggcagatgtgcagatggagttcatccagggccccaaggaggagagcaaggagaccccagacatcagcatcacccccagtgatgtggccgagcccctgcacgagaccatcgtgtctgagcctgctgagatccagagcgaggaggaggagattgaggcccagggcgagtatgacaagctgctcttcagaagtgacaccctgcagatcacagacctgggcgtgtctggggcccgggaggagtttgtggagacctgccccagcgagcacaagggcgtgattgaatctgtggtgaccattgaagatgacttcatcaccgtggtgcagaccaccacagatgaaggagagagcggcagccacagcgtgcgctttgctgccctggagcagcctgaggtggagcggcggcccagcccccatgatgaggaggagtttgaggtggaggaggccgctgaggcccaggccgagcccaaggatggcagccctgaggccccagccagccctgagcgggaggaggtggccctgtctgagtacaagacagagacctatgatgactacaaggatgagaccaccattgatgacagcatcatggatgctgacagcctgtgggtggacacccaggatgatgacaggagcatcatgacagagcagctggagaccatccccaaggaggagaaggccgagaaggaggcccggcgcagcagcctggagaagcacaggaaggagaagcccttcaagacaggccggggccgcatcagcaccccagagaggaaggtggccaagaaggagcccagcacagtgtccagagatgaggtgcggaggaagaaggctgtgtacaagaaggccgagctggccaagaagacagaggtgcaggcccacagccccagcaggaagttcatcctgaagccagccatcaagtacacccggcccacccacctgagctgtgtgaagaggaagaccacagctgctggaggagagagcgccctggcccccagcgtcttcaagcaggccaaggacaaggtgtctgatggagtgaccaagagccctgagaagaggagcagcctgccccggcccagcagcatcctgcccccaagaagaggagtgtctggggacagagatgagaacagcttcagcctgaacagcagcatcagcagcagcgcccggaggaccaccaggtctgagcccatcagaagagctgggaagagcggcaccagcacccccaccaccccaggcagcacagccatcaccccaggcaccccacccagctacagcagcaggaccccaggcaccccaggcacccccagctaccccaggaccccccacaccccaggcacccccaagagcgccatcctggtgcccagcgagaagaaggtggccatcatccgcaccccacccaagagccctgccacccccaagcagctgcggctcatcaaccagcccctgcctgacctgaagaatgtgaagagcaagattggcagcacagacaacatcaagtaccagcccaagggcggccaggtgcagatcgtgaccaagaagattgacctgagccacgtgaccagcaaatgtggcagcctgaagaacatccgccacaggcctgggggcggccgggtgaagattgaatctgtgaagctggacttcaaggagaaggcccaggccaaggtgggcagcctggacaatgcccaccacgtgcctgggggcggcaatgtgaagattgacagccagaagctgaacttccgggagcacgccaaggcccgggtggaccacggggctgagatcatcacccagagccctggccgcagctctgtggccagcccccggcggctgagcaatgtgagcagcagcggcagcatcaacctgctggagagcccccagctggccaccctggccgaggatgtgacagctgccctggccaagcagggcctgtag

SEQ ID NO: 159763 - DNA, 2664 bp, synthetic construct
  misc_feature 1..2664: note = Description of Artificial Sequence: Synthetic coding sequence
  source 1..2664: mol_type = other DNA
atggagaccaccggggaccagggcatcgagggcatggcctacatggatgaaaatagaaacatcaccttcacctgccccaggacccccagcgagctgatcaacaagagcagccccctggaggtgctggagagcgctgcctgtgagaagctgcccacccccaccccccaggtggtgaaggagggggacagcttcccagacaccctggccaagaatggccaggagatcgccccagcccagatcagcaagagcctgatggtggacaactacaccaaggatggagtgcccggccaggagcggcccaagggccccagcgctgtggtgcccagcaccagcactggaggagtggccctgcccatcaccacagccattgaaacagtgaacatccatggagaccacagcctgaagaacaaggccgagctggccgacagcatgaagaatgaggccggcattgatgagggccacgtgattggagagagcgagagcgtgcacagcggggccagcaagcacagcgtggagaaggtgacagagctggccaagggccacctgctgcccggggtgcctgtggaggaccagagcctgcccggggaggcccgggccctggagggctacgccgaccggggcaacttccctgcccaccctgtgaatgaggagaaggagaccaaggagggctctgtggccgtgcagatcccagacctgctggaggacaaggcccagaagctgtccttctgtgaggaccagaatgcccaggacaggaacagcaagggcagtgacagcctgaacaagaaggtggacctgaccctgctgagccccaagtcagaaaatgacaagctgaaggagatcagcctggcctgcaagatcacagagctggagagcgtgtccctgcccaccccagagatccagagcgacttcctgcacagcaaggtggaggcccctccttctgaggtggccgacaccctggtgatcatgacagccagcaagggcgtgcggctgcctgagcccaaggacaagatcctggagaccccccagaagatgacagagaagtctgagagcaagaccccaggagagggcaagaaggaggacaagagcaggatggccgagcccatgaagggctacatgaggcccaccaagagccggggcctgacccccctgctgcccaagagcaccatccaggagcaggagcggcacaagcagctgaagtctgctggcatcgcccggcctgaggagggccggcctgtggtgtctggaactggaaatgacatcaccaccccacccaacaaggagctgccccccagccctgagaagaagaccaagcccctggccaccacccagcctgccaagaccagcaccagcaaggccaagacccagcccaccagcctgcccaagcagcctgcccccaccaccatcggcggcctgaacaagaagcccatgagcctggccagcggcctggtgcctgctgccccacccaagaggcctgctgtggccagcgcccggcccagcatcctgcccagcaaggatgtgaagcccaagcccatcgcagatgccaaggcccctgagaagagggccagccccagcaagccagccagcgccccagccagccgcagcggcagcaagagcacccagacagtggccaagaccaccacagctgctgctgtggccagcacaggccccagcagccgcagccccagcaccctgctgcccaagaagcccacagccatcaagacagagggcaagccagctgaggtgaagaagatgacagccaagtctgtgcctgctgacctgagccggcccaagagcaccagcaccagctccatgaagaagaccaccaccctgtctggaacagccccagctgctggggtggtgcccagccgggtgaaggccacccccatgcccagccggcccagcaccacccccttcatcgacaagaagcccaccagcgccaagcccagcagcaccaccccccggctgagccggctggccaccaacaccagcgccccagacctgaagaatgtgcgcagcaaggtgggcagcacagagaacatcaagcaccagcccggcggcggccgggccaaggtggagaagaagacagaagctgctgccaccaccaggaagccagagagcaatgctgtgaccaagacagctggccccatcgccagcgcccagaagcagcctgctgggaaggtgcagatcgtgtccaagaaggtgtcctacagccacatccagagcaaatgtggcagcaaggacaacatcaagcacgtgcctgggggcggcaatgtgcagatccagaacaagaaggtggacatcagcaaggtgagcagcaaatgtggcagcaaggccaacatcaagcacaagccaggcggcggagatgtgaagattgagagccagaagctgaacttcaaggagaaggcccaggccaaggtgggcagcctggacaacgtgggccacctgcctgctggaggagctgtgaagacagaaggaggcggcagcgaggcccccctgtgccccggccccccagctggggaggagcccgccatcagcgaggccgcccctgaggccggggcccccaccagcgccagcggcctgaatggccaccccaccctgagcggcggcggggaccagcgggaggcccagaccctggacagccagatccaggagaccagcatctag

SEQ ID NO: 159764 - DNA, 1392 bp, synthetic construct
  misc_feature 1..1392: note = Description of Artificial Sequence: Synthetic coding sequence
  source 1..1392: mol_type = other DNA
atctgtgaggagcctgtggccaagaagcgggaggagctggcccacttcagcaacagcagcagcaacagcggcaagaaggagctgggcacagctggcctgtacctgcacagcaagctggagcagatccctgagggcagcagcaaggagaagggccaggaggacttcagcgagaccagaattgacagctgcagccaggtgtgccagagaggagagaagcagcccggccagacagccctggccggcaagaaggagattgaggtgacagccacccagagcacccccagcttcctgtttgagaagcccccaagagatggcatcgcccggcctgaggagggccggcctgtggtgtctggaactggaaatgacatcaccaccccacccaacaaggagctgccccccagccctgagaagaagaccaagcccatcgcagatgccaaggcccctgagaagagggccagccccagcaagccagccagcgccccagccagccgcagcggcagcaagagcacccagacagtggccaagaccaccacagctgctgctgtggccagcacaggccccagcagccgcagccccagcaccctgctgcccaagaagcccacagccatcaagacagagggcaagccagctgaggtgaagaagatgacagccaagtctgtgcctgctgacctgagccggcccaagagcaccagcaccagctccatgaagaagaccaccaccctgagcggcacagccccagctgctggggtggtgcccagccgggtgaaggccacccccatgcccagccggcccagcaccacccccttcatcgacaagaagcccaccagcgccaagcccagcagcaccaccccccggctgagccggctggccaccaacaccagcgccccagacctgaagaatgtgcgcagcaaggtgggcagcacagagaacatcaagcaccagcccggcggcggccgggtgcagatcgtgtccaagaaggtgtcctacagccacatccagagcaaatgtggcagcaaggacaacatcaagcacgtgcctgggggcggcaatgtgcagatccagaacaagaaggtggacatcagcaaggtgagcagcaaatgtggcagcaaggccaacatcaagcacaagccaggcggcggagatgtgaagattgagagccagaagctgaacttcaaggagaaggcccaggccaaggtgggcagcctggacaacgtgggccacctgcctgctgggggcgctgtgaagattgagacctaccgcctgaccttccgggccaatgcccgggccaggacagaccatggagctgacatcgtgtccaggcctccccacttccctgggggccccaacagcggcagccgggtgctgggccccctgagcagagctgtgcactag

SEQ ID NO: 159765 - DNA, 3459 bp, synthetic construct
  misc_feature 1..3459: note = Description of Artificial Sequence: Synthetic coding sequence
  source 1..3459: mol_type = other DNA
atggctgacctgagcctggctgatgccctgacagagcccagcccagacattgaaggagagatcaagagggacttcatcgccaccctggaggccgaggcctttgatgatgtggtgggggagaccgtgggcaagacagactacatccccctgctggatgtggatgagaagacaggcaacagcgagagcaagaagaagccctgcagcgagaccagccagatcgaggacacccccagcagcaagcccaccctgctggccaacggcggccatggagtggagggcagtgacaccaccggcagccccacagagttcctggaggagaagatggcctaccaggagtaccccaacagccagaactggccagaggacaccaacttctgcttccagcctgagcaggtggtggaccccatccagacagaccccttcaagatgtaccatgatgatgacctggccgacctggtgttccccagcagcgccacagctgacaccagcatctttgctggccagaatgaccccctgaaggacagctatggcatgagcccctgcaacacagctgtggtgccccagggctggagcgtggaggccctgaacagcccccacagcgagagctttgtgtccccagaggccgtggccgagcccccccagcccacagctgtgcccctggagctggccaaggagattgagatggccagcgaggagcggcccccagcccaggccctggagatcatgatgggcctgaagaccacagacatggcccccagcaaggagacagagatggccctggccaaggacatggccctggccaccaagacagaggtggccctggccaaggacatggagagccccaccaagctggatgtgaccctggccaaggacatgcagcccagcatggagagtgacatggccctggtgaaggacatggagctgcccacagagaaggaggtggccctggtgaaggatgtgcgctggcccacagaaacagatgtgagcagcgccaagaatgtggtgctgcccacagaaacagaggtggccccagccaaggatgtgaccctgctgaaggagacagagcgggccagccccatcaagatggacctggcccccagcaaggacatgggcccccccaaggagaacaagaaggagacagagcgggccagccccatcaagatggacctggcccccagcaaggacatgggcccccccaaggagaacaagatcgtgcctgccaaggacctggtgctgctgtctgaaattgaggtggcccaggccaatgacatcatcagcagcacagagatcagcagcgctgagaaggtggccctgagcagcgagacagaggtggccctggcccgggacatgaccctgcccccagagaccaacgtcatcctgaccaaggacaaggccctgcccctggaggccgaggtggcccctgtgaaggacatggcccagctgcctgagacagagatcgccccagccaaggatgtggcccccagcacagtgaaggaggtgggcctgctgaaggacatgagccccctgtctgaaacagagatggccctgggcaaggatgtgaccccacctcctgagacagaggtggtgctgatcaagaatgtgtgcctgcccccagagatggaggtggccctgacagaggaccaggtgcctgccctgaagacagaggcccccctggccaaggatggagtgctgaccctggccaacaacgtgaccccagccaaggatgtgccccccctgtctgaaacagaggccacccctgtgcccatcaaggacatggagatcgcccagacccagaagggcatcagcgaggacagccacctggagagcctgcaggatgtgggccagagcgctgcccccaccttcatgatcagccctgagaccgtgactggaacaggcaagaagtgcagcctgcctgcagaagaagattctgtgctggagaagctgggggagaggaagccctgcaacagccagcccagcgagctgagcagcgagaccagcggcatcgcccggcctgaggagggccggcctgtggtgtctggaactggaaatgacatcaccaccccacccaacaaggagctgccccccagccctgagaagaagaccaagcccctggccaccacccagcctgccaagaccagcaccagcaaggccaagacccagcccaccagcctgcccaagcagcctgcccccaccaccatcggcggcctgaacaagaagcccatgagcctggccagcggcctggtgcctgctgccccacccaagaggcctgctgtggccagcgcccggcccagcatcctgcccagcaaggatgtgaagcccaagcccatcgcagatgccaaggcccctgagaagagggccagccccagcaagccagccagcgccccagccagccgcagcggcagcaagagcacccagacagtggccaagaccaccacagctgctgctgtggccagcacaggccccagcagccgcagccccagcaccctgctgcccaagaagcccacagccatcaagacagagggcaagccagctgaggtgaagaagatgacagccaagtctgtgcctgctgacctgagccggcccaagagcaccagcaccagctccatgaagaagaccaccaccctgagcggcacagccccagctgctggggtggtgcccagccgggtgaaggccacccccatgcccagccggcccagcaccacccccttcatcgacaagaagcccaccagcgccaagcccagcagcaccaccccccggctgagccggctggccaccaacaccagcgccccagacctgaagaatgtgcgcagcaaggtgggcagcacagagaacatcaagcaccagcccggcggcggccgggccaaggtggagaagaagacagaggccgccgccaccaccaggaagccagagagcaatgctgtgaccaagacagctggccccatcgccagcgcccagaagcagcctgctgggaaggtgcagatcgtgtccaagaaggtgtcctacagccacatccagagcaaatgtggcagcaaggacaacatcaagcacgtgcctgggggcggcaatgtgcagatccagaacaagaaggtggacatcagcaaggtgagcagcaaatgtggcagcaaggccaacatcaagcacaagccaggcggcggagatgtgaagattgagagccagaagctgaacttcaaggagaaggcccaggccaaggtgggcagcctggacaacgtgggccacctgcctgctgggggcgctgtgaagacagagggcggcggcagcgaggcccccctgtgccccggccccccagctggggaggagcccgccatcagcgaggccgcccctgaggccggggcccccaccagcgccagcggcctgaatggccaccccaccctgagcggcggcggggaccagcgggaggcccagaccctggacagccagatccaggagaccagcatctag

SEQ ID NO: 159766 - DNA, 2139 bp, synthetic construct
  misc_feature 1..2139: note = Description of Artificial Sequence: Synthetic coding sequence
  source 1..2139: mol_type = other DNA
atggagaccaccggggaccagggcatcgagggcatggcctacatggatgaaaatagaaacatcaccttcacctgccccaggacccccagcgagctgatcaacaagagcagccccctggaggtgctggagagcgctgcctgtgagaagctgcccacccccaccccccaggtggtgaaggagggggacagcttcccagacaccctggccaagaatggccaggagatcgccccagcccagatcagcaagagcctgatggtggacaactacaccaaggatggagtgcccggccaggagcggcccaagggccccagcgctgtggtgcccagcaccagcactggaggagtggccctgcccatcaccacagccattgaaacagtgaacatccatggagaccacagcctgaagaacaaggccgagctggccgacagcatgaagaatgaggccggcattgatgagggccacgtgattggagagagcgagagcgtgcacagcggggccagcaagcacagcgtggagaaggtgacagagctggccaagggccacctgctgcccggggtgcctgtggaggaccagagcctgcccggggaggcccgggccctggagggctacgccgaccggggcaacttccctgcccaccctgtgaatgaggagaaggagaccaaggagggctctgtggccgtgcagatcccagacctgctggaggacaaggcccagaagctgtccttctgtgaggaccagaatgcccaggacaggaacagcaagggcagtgacagcctgaacaagaaggtggacctgaccctgctgagccccaagtcagaaaatgacaagctgaaggagatcagcctggcctgcaagatcacagagctggagagcgtgtccctgcccaccccagagatccagagcgacttcctgcacagcaaggtggaggcccctccttctgaggtggccgacaccctggtgatcatgacagccagcaagggcgtgcggctgcctgagcccaaggacaagatcctggagaccccccagaagatgacagagaagtctgagagcaagaccccaggagagggcaagaaggaggacaagagcaggatggccgagcccatgaagggctacatgaggcccaccaagagccggggcctgacccccctgctgcccaagagcaccatccaggagcaggagcggcacaagcagctgaagtctgctggcatcgcccggcctgaggagggccggcctgtggtgtctggaactggaaatgacatcaccaccccacccaacaaggagctgccccccagccctgagaagaagaccaagcccctggccaccacccagcctgccaagaccagcaccagcaaggccaagacccagcccaccagcctgcccaagcagcctgcccccaccaccatcggcggcctgaacaagaagcccatgagcctggccagcggcctggtgcctgctgccccacccaagaggcctgctgtggccagcgcccggcccagcatcctgcccagcaaggatgtgaagcccaagcccatcgcagatgccaaggcccctgagaagagggccagccccagcaagccagccagcgccccagccagccgcagcggcagcaagagcacccagacagtggccaagaccaccacagctgctgctgtggccagcacaggccccagcagccgcagccccagcaccctgctgcccaagaagcccacagccatcaagacagagggcaagccagctgaggtgaagaagatgacagccaagtctgtgcctgctgacctgagccggcccaagagcaccagcaccagctccatgaagaagaccaccaccctgtctggaacagccccagctgctggggtggtgcccagccgggtgaaggccacccccatgcccagccggcccagcaccacccccttcatcgacaagaagcccaccagcgccaagcccagcagcaccaccccccggctgagccggctggccaccaacaccagcgccccagacctgaagaatgtgcgcagcaaggccaaggtggagaagaagacagaggccgccgccaccaccaggaagccagagagcaatgctgtgaccaagacagctggccccatcgccagcgcccagaagcagcctgctgggaaggtgtag

SEQ ID NO: 159767 - DNA, 2436 bp, synthetic construct
  misc_feature 1..2436: note = Description of Artificial Sequence: Synthetic coding sequence
  source 1..2436: mol_type = other DNA
atggctgacctgagcctggctgatgccctgacagagcccagcccagacattgaaggagagatcaagagggacttcatcgccaccctggaggccgaggcctttgatgatgtggtgggggagaccgtgggcaagacagactacatccccctgctggatgtggatgagaagacaggcaacagcgagagcaagaagaagccctgcagcgagaccagccagatcgaggacacccccagcagcaagcccaccctgctggccaacggcggccatggagtggagggcagtgacaccaccggcagccccacagagttcctggaggagaagatggcctaccaggagtaccccaacagccagaactggccagaggacaccaacttctgcttccagcctgagcaggtggtggaccccatccagacagaccccttcaagatgtaccatgatgatgacctggccgacctggtgttccccagcagcgccacagctgacaccagcatctttgctggccagaatgaccccctgaaggacagctatggcatgagcccctgcaacacagctgtggtgccccagggctggagcgtggaggccctgaacagcccccacagcgagagctttgtgtccccagaggccgtggccgagcccccccagcccacagctgtgcccctggagctggccaaggagattgagatggccagcgaggagcggcccccagcccaggccctggagatcatgatgggcctgaagaccacagacatggcccccagcaaggagacagagatggccctggccaaggacatggccctggccaccaagacagaggtggccctggccaaggacatggagagccccaccaagctggatgtgaccctggccaaggacatgcagcccagcatggagagtgacatggccctggtgaaggacatggagctgcccacagagaaggaggtggccctggtgaaggatggagtgcggctgcctgagcccaaggacaagatcctggagaccccccagaagatgacagagaagtctgagagcaagaccccaggagagggcaagaaggaggacaagagcaggatggccgagcccatgaagggctacatgaggcccaccaagagccggggcctgacccccctgctgcccaagagcaccatccaggagcaggagcggcacaagcagctgaagtctgctggcatcgcccggcctgaggagggccggcctgtggtgtctggaactggaaatgacatcaccaccccacccaacaaggagctgccccccagccctgagaagaagaccaagcccctggccaccacccagcctgccaagaccagcaccagcaaggccaagacccagcccaccagcctgcccaagcagcctgcccccaccaccatcggcggcctgaacaagaagcccatgagcctggccagcggcctggtgcctgctgccccacccaagaggcctgctgtggccagcgcccggcccagcatcctgcccagcaaggatgtgaagcccaagcccatcgcagatgccaaggcccctgagaagagggccagccccagcaagccagccagcgccccagccagccgcagcggcagcaagagcacccagacagtggccaagaccaccacagctgctgctgtggccagcacaggccccagcagccgcagccccagcaccctgctgcccaagaagcccacagccatcaagacagagggcaagccagctgaggtgaagaagatgacagccaagtctgtgcctgctgacctgagccggcccaagagcaccagcaccagctccatgaagaagaccaccaccctgagcggcacagccccagctgctggggtggtgcccagccgggtgaaggccacccccatgcccagccggcccagcaccacccccttcatcgacaagaagcccaccagcgccaagcccagcagcaccaccccccggctgagccggctggccaccaacaccagcgccccagacctgaagaatgtgcgcagcaaggtgggcagcacagagaacatcaagcaccagcccggcggcggccgggtgcagatccagaacaagaaggtggacatcagcaaggtgagcagcaaatgtggcagcaaggccaacatcaagcacaagccaggcggcggagatgtgaagattgagagccagaagctgaacttcaaggagaaggcccaggccaaggtgggcagcctggacaacgtgggccacctgcctgctggaggagctgtgaagacagaaggaggcggcagcgaggcccccctgtgccccggccccccagctggggaggagcccgccatcagcgaggccgcccctgaggccggggcccccaccagcgccagcggcctgaatggccaccccaccctgagcggcggcggggaccagcgggaggcccagaccctggacagccagatccaggagaccagcatctag

SEQ ID NO: 159768 - DNA, 3408 bp, synthetic construct
  misc_feature 1..3408: note = Description of Artificial Sequence: Synthetic coding sequence
  source 1..3408: mol_type = other DNA
atggctgacctgagcctggctgatgccctgacagagcccagcccagacattgaaggagagatcaagagggacttcatcgccaccctggaggccgaggcctttgatgatgtggtgggggagaccgtgggcaagacagactacatccccctgctggatgtggatgagaagacaggcaacagcgagagcaagaagaagccctgcagcgagaccagccagatcgaggacacccccagcagcaagcccaccctgctggccaacggcggccatggagtggagggcagtgacaccaccggcagccccacagagttcctggaggagaagatggcctaccaggagtaccccaacagccagaactggccagaggacaccaacttctgcttccagcctgagcaggtggtggaccccatccagacagaccccttcaagatgtaccatgatgatgacctggccgacctggtgttccccagcagcgccacagctgacaccagcatctttgctggccagaatgaccccctgaaggacagctatggcatgagcccctgcaacacagctgtggtgccccagggctggagcgtggaggccctgaacagcccccacagcgagagctttgtgtccccagaggccgtggccgagcccccccagcccacagctgtgcccctggagctggccaaggagattgagatggccagcgaggagcggcccccagcccaggccctggagatcatgatgggcctgaagaccacagacatggcccccagcaaggagacagagatggccctggccaaggacatggccctggccaccaagacagaggtggccctggccaaggacatggagagccccaccaagctggatgtgaccctggccaaggacatgcagcccagcatggagagtgacatggccctggtgaaggacatggagctgcccacagagaaggaggtggccctggtgaaggatgtgcgctggcccacagaaacagatgtgagcagcgccaagaatgtggtgctgcccacagaaacagaggtggccccagccaaggatgtgaccctgctgaaggagacagagcgggccagccccatcaagatggacctggcccccagcaaggacatgggcccccccaaggagaacaagaaggagacagagcgggccagccccatcaagatggacctggcccccagcaaggacatgggcccccccaaggagaacaagatcgtgcctgccaaggacctggtgctgctgtctgaaattgaggtggcccaggccaatgacatcatcagcagcacagagatcagcagcgctgagaaggtggccctgagcagcgagacagaggtggccctggcccgggacatgaccctgcccccagagaccaacgtcatcctgaccaaggacaaggccctgcccctggaggccgaggtggcccctgtgaaggacatggcccagctgcctgagacagagatcgccccagccaaggatgtggcccccagcacagtgaaggaggtgggcctgctgaaggacatgagccccctgtctgaaacagagatggccctgggcaaggatgtgaccccacctcctgagacagaggtggtgctgatcaagaatgtgtgcctgcccccagagatggaggtggccctgacagaggaccaggtgcctgccctgaagacagaggcccccctggccaaggatggagtgctgaccctggccaacaacgtgaccccagccaaggatgtgccccccctgtctgaaacagaggccacccctgtgcccatcaaggacatggagatcgcccagacccagaagggcatcagcgaggacagccacctggagagcctgcaggatgtgggccagagcgctgcccccaccttcatgatcagccctgagaccgtgactggaacaggcaagaagtgcagcctgcctgcagaagaagattctgtgctggagaagctgggggagaggaagccctgcaacagccagcccagcgagctgagcagcgagaccagcggcatcgcccggcctgaggagggccggcctgtggtgtctggaactggaaatgacatcaccaccccacccaacaaggagctgccccccagccctgagaagaagaccaagcccctggccaccacccagcctgccaagaccagcaccagcaaggccaagacccagcccaccagcctgcccaagcagcctgcccccaccaccatcggcggcctgaacaagaagcccatgagcctggccagcggcctggtgcctgctgccccacccaagaggcctgctgtggccagcgcccggcccagcatcctgcccagcaaggatgtgaagcccaagcccatcgcagatgccaaggcccctgagaagagggccagccccagcaagccagccagcgccccagccagccgcagcggcagcaagagcacccagacagtggccaagaccaccacagctgctgctgtggccagcacaggccccagcagccgcagccccagcaccctgctgcccaagaagcccacagccatcaagacagagggcaagccagctgaggtgaagaagatgacagccaagtctgtgcctgctgacctgagccggcccaagagcaccagcaccagctccatgaagaagaccaccaccctgagcggcacagccccagctgctggggtggtgcccagccgggtgaaggccacccccatgcccagccggcccagcaccacccccttcatcgacaagaagcccaccagcgccaagcccagcagcaccaccccccggctgagccggctggccaccaacaccagcgccccagacctgaagaatgtgcgcagcaaggtgggcagcacagagaacatcaagcaccagcccggcggcggccgggccaaggtggagaagaagacagaggccgccgccaccaccaggaagccagagagcaatgctgtgaccaagacagctggccccatcgccagcgcccagaagcagcctgctgggaaggtgcagatcgtgtccaagaaggtgtcctacagccacatccagagcaaatgtggcagcaaggacaacatcaagcacgtgcctgggggcggcaatgtgcagatccagaacaagaaggtggacatcagcaaggtgagcagcaaatgtggcagcaaggccaacatcaagcacaagccaggcggcggagatgtgaagattgagagccagaagctgaacttcaaggagaaggcccaggccaaggtgggcagcctggacaacgtgggccacctgcctgctgggggcgctgtgaagattgagacctaccgcctgaccttccgggccaatgcccgggccaggacagaccatggagctgacatcgtgtccaggcctccccacttccctgggggccccaacagcggcagccgggtgctgggccccctgagcagagctgtgcactag

SEQ ID NO: 159769 - DNA, 2487 bp, synthetic construct
  misc_feature 1..2487: note = Description of Artificial Sequence: Synthetic coding sequence
  source 1..2487: mol_type = other DNA
atgagcctgagtgacaagcagacagccagcctgacagctgcctacggccagctgagcaagggcaagccagcagaatgtaggatggacagccccaaggagatcagccaggccggctttgagtggcagaggacagagggcaagctgaatgaaattggcctgaatgtgtccatggatggccagcccaaggatggcctggtgaagaatgccagcttcctggagcagaacaagctgtgcttctttgagggcaagctggacaaggagctgagcattgagatgcaggacaaggactgccaggaggccagcggccacctggagagccgctacgtgatcagcgagacctgccaccccctggagggcaacagcgtgcaccagaagaccagcgagttccacctgggcctcatcgagggccctgacaagaacaagaccatccctgtgcagggcaaggtggccggcaagaatggcctggagaccaagagccagagcgacctggacttccctggagctgctgacatccccaccaggtatgtgaaggagcaggagacctctgtgtggaaccccagcttccaccctgtggcccagggcagcctgggcagccgggaggccaccccaggagagatggagaacagcatcaccccaggctgccctgtgattggagtggtgaatgacaacagcgagcagctgaagtgtgagagccccctgctggtgtccctggcccacccagcccccatcatcgagcacagccccaccaccatcccccccatcaccatggtgttcacccaggagcacctgaatgccagctgccacatccgggaccatgacaaggagctggagaagctgagcagcacagaggaggccgtgctgaaccaggccccccagcagaagaaggctgtgcggcgggccctgtctgaatgtagccacctgtctgtgcccccagctgtgaacctggccgacaagtacccagagctgcctgcccgggaggagcccagcagcggcctgctgcccccacccagcagccccatgcccagccccaccccaggcaagctgggcgccccagccatgaagaggtccatgacagtgggggaggagcagacagccagctacaagctgagccctgggaagctgcccatcctgagcaccaaggagatcccccccttcatctgtgaggagcctgtggccaagaagcgggaggagctggcccacttcagcaacagcagcagcaacagcggcaagaaggagctgggcacagctggcctgtacctgcacagcaagctggagcagatccctgagggcagcagcaaggagaagggccaggaggacttcagcgagaccagaattgacagctgcagccaggtgtgccagagaggagagaagcagcccggccagacagccctggccggcaagaaggagattgaggtgacagccacccagagcacccccagcttcctgtttgagaagcccccaagagatggcatcgcccggcctgaggagggccggcctgtggtgtctggaactggaaatgacatcaccaccccacccaacaaggagctgccccccagccctgagaagaagaccaagcccatcgcagatgccaaggcccctgagaagagggccagccccagcaagccagccagcgccccagccagccgcagcggcagcaagagcacccagacagtggccaagaccaccacagctgctgctgtggccagcacaggccccagcagccgcagccccagcaccctgctgcccaagaagcccacagctgacctgagccggcccaagagcaccagcaccagctccatgaagaagaccaccaccctgtctggaacagccccagctgctggggtggtgcccagccgggtgaaggccacccccatgcccagccggcccagcaccacccccttcatcgacaagaagcccaccagcgccaagcccagcagcaccaccccccggctgagccggctggccaccaacaccagcgccccagacctgaagaatgtgcgcagcaaggtgggcagcacagagaacatcaagcaccagcccggcggcggccgggtgcagatcgtgtccaagaaggtgtcctacagccacatccagagcaaatgtggcagcaaggacaacatcaagcacgtgcctgggggcggcaatgtgcagatccagaacaagaaggtggacatcagcaaggtgagcagcaaatgtggcagcaaggccaacatcaagcacaagccaggcggcggagatgtgaagattgagagccagaagctgaacttcaaggagaaggcccaggccaaggtgggcagcctggacaacgtgggccacctgcctgctggaggagctgtgaagattgagacctaccgcctgaccttccgggccaatgcccgggccaggacagaccacggggctgacatcgtgtcccggcccccccacttccctgggggccccaacagcggcagccgggtgctgggccccctgagcagagctgtgcactag

SEQ ID NO: 159770 - DNA, 6894 bp, synthetic construct
  misc_feature 1..6894: note = Description of Artificial Sequence: Synthetic coding sequence
  source 1..6894: mol_type = other DNA
atggctgacctgagcctggctgatgccctgacagagcccagcccagacattgaaggagagatcaagagggacttcatcgccaccctggaggccgaggcctttgatgatgtggtgggggagaccgtgggcaagacagactacatccccctgctggatgtggatgagaagacaggcaacagcgagagcaagaagaagccctgcagcgagaccagccagatcgaggacctgcccctgcccccccacccagccagcctgtccttccacctgcccctggacacccccagcagcaagcccaccctgctggccaatggaggccacggcgtggagggcagtgacaccaccggcagccccacagagttcctggaggagaagatggcctaccaggagtaccccaacagccagaactggccagaggacaccaacttctgcttccagcctgagcaggtggtggaccccatccagacagaccccttcaagatgtaccatgatgatgacctggccgacctggtgttccccagcagcgccacagctgacaccagcatctttgctggccagaatgaccccctgaaggacagctatggcatgagcccctgcaacacagctgtggtgccccagggctggagcgtggaggccctgaacagcccccacagcgagagctttgtgtccccagaggccgtggccgagcccccccagcccacagctgtgcccctggagctggccaaggagattgagatggccagcgaggagcggcccccagcccaggccctggagatcatgatgggcctgaagaccacagacatggcccccagcaaggagacagagatggccctggccaaggacatggccctggccaccaagacagaggtggccctggccaaggacatggagagccccaccaagctggatgtgaccctggccaaggacatgcagcccagcatggagagtgacatggccctggtgaaggacatggagctgcccacagagaaggaggtggccctggtgaaggatgtgcgctggcccacagaaacagatgtgtcctctgccaagaatgtggtgctgcccacagaaacagaggtggccccagccaaggatgtgaccctgctgaaggagacagagcgggccagccccatcaagatggacctggcccccagcaaggacatgggcccccccaaggagaacaagaaggagacagagcgggccagccccatcaagatggacctggcccccagcaaggacatgggcccccccaaggagaacaagatcgtgcctgccaaggacctggtgctgctgtctgaaattgaggtggcccaggccaatgacatcatcagcagcacagagatcagcagcgctgagaaggtggccctgagcagcgagacagaggtggccctggcccgggacatgaccctgcccccagagaccaacgtcatcctgaccaaggacaaggccctgcccctggaggccgaggtggcccctgtgaaggacatggcccagctgcctgagacagaaattgccccagccaaggatgtggcccccagcacagtgaaggaggtgggcctgctgaaggacatgagccccctgtctgaaacagagatggccctgggcaaggatgtgaccccacctcctgagacagaggtggtgctgatcaagaatgtgtgcctgcccccagagatggaggtggccctgacagaggaccaggtgcctgccctgaagacagaggcccccctggccaaggatggagtgctgaccctggccaacaacgtgaccccagccaaggatgtgccccccctgtctgaaacagaggccacccctgtgcccatcaaggacatggagatcgcccagacccagaagggcatcagcgaggacagccacctggagagcctgcaggatgtgggccagagcgctgcccccaccttcatgatcagccctgagaccgtgacaggcaccgggaagaagtgcagcctgcctgctgaggaggacagcgtgctggagaagctgggggagaggaagccctgcaacagccagcccagcgagctgagcagcgagaccagcgccaacttcatgtactgcggcaccccacccacccaggccaagcaggtgtgccggcccagcgacagaagaagcacccggcccaagccagcccgggtgcccccagagctgctgggcggcagccccccctggaagaccctggaccaccggctgggccactgcagcctgtctgagagcggctgggtgtctggcagcagcagctgtggcggccctggcaaccagaggaagagcatccacgtggacagcctggagccccagagggacctgggccgggaggcctgggacatcgagagcacccccatcatgatgaagaagaagaagaagaagcccaagcagaagcgctacagccagccccgggccggcggccccagtgatgatgacaatgctgacaagcccaagggccacccctttgctgctgacacccagaagagcggcgtgctgcccagccagcccaccaccatgggcacagaatatggcctggtgtctggagagaacctgaagagagaatgtctggtgaacagcagcgctgcccggctggtggccgagaactttgtgtctgagagcctgcgcatccccctgtaccccagcgaggaggcccccaagacagccatcagcagccagagcaagctgcgggtggaggaggagagcaagagcaacaagtctgtgctgcagaaccaggacaagaagctgctgaagcagcacgagtacaagccccagcctgccccccacctgaagacccctgtggacaagagccagagcgtgggccccctgaacctgaagggccccctggccgaggtgtctgcctacaacgtggagacccccctggacatccggctgaaggagggctgcagccccttcctggaccaggaggtgatgggcgtggtgtccaagcccacagctgccaaggagatccccaacctggtgcccaccctcatcgccagcaaccccctggagtgcaacctgaaggagggcaacaatgaaagcaagatgaccaagctgcagaatgtgaagctgaaggagttccctgagggcgctgaggaggacaaggagctgaagaaggaggccttccccaatgaaaggcaggagatcagcatcttcaccagcgagcagctgcagggccaggtgctggtgcaggtgcctggggtggagaatgagcccttcaagaggatggctggagatggcaagagcaggaagggccggggcagcagcggcaagatgaggacagacagcggcaaggtgaaggccaagtctgagctgcccttcctgctggacagccagaaggatggccgggctgtgctgatccccagcgagcctgtgtccaagacagagggcatgaccacccaggacaagtctgaggagctgggcctgaacagcagcaagcagcccggcaccaaggctgacctgacagaagctgtggtgatgggagagcccaaggagatgacccagcccaaggtggccggcaccatgcaggccctgatccccctggagagcggcagcggcatgacccagaccagcggcgtgtccacagaaacaggagatgtggtgaaggacatgggcgtgaacaaccagagcaaggagggccgctgcccctggaaggaccacgaggccgccccctggatcagcgagaagcccaagaagagaggaaatgaaggcaagagcaagaagttcaagaacaactacagcacccagcctgccaggatggagaggaaggaggagatcctgaaccccccatttgagggcaaggatggagacaccggcagcatcccccacaagagcaaggagatcggcttcaccttccccaagatgcatgacagcagcttcagccacaccccagacacccccaccgtggaggccgtggacaggaagggcggcaacttccaggtgaactttgtggagctgggcaccctgggggagaacaagatcagcacagtgaaggccagcacagtgacagagcccccagccaaggtgacagatgtgtcctgccaggagcagatccagggcgccggctttgtgcccagcgtggtgtctgaggagaacaagacagatgctgccaaccgctacacagctgtggccgacaagcccagcaagaggagcaatgatggcaagagcaagaaggtgaagaacagcagccctgagaagcacatcctggagaacaagattgatgccaccaagatccacgtgcccatggagaccaccggggaccagggcatcgagggcatggcctacatggatgaaaatagaaacatcaccttcacctgccccaggacccccagcgagctgatcaacaagagcagccccctggaggtgctggagagcgctgcctgtgagaagctgcccacccccaccccccaggtggtgaaggagggggacagcttcccagacaccctggccaagaatggccaggagatcgccccagcccagatcagcaagagcctgatggtggacaactacaccaaggatggagtgcccggccaggagcggcccaagggccccagcgctgtggtgcccagcaccagcactggaggagtggccctgcccatcaccacagccattgaaacagtgaacatccatggagaccacagcctgaagaacaaggccgagctggccgacagcatgaagaatgaggccggcattgatgagggccacgtgattggagagagcgagagcgtgcacagcggggccagcaagcacagcgtggagaaggtgacagagctggccaagggccacctgctgcccggggtgcctgtggaggaccagagcctgcccggggaggcccgggccctggagggctacgccgaccggggcaacttccctgcccaccctgtgaatgaggagaaggagaccaaggagggctctgtggccgtgcagatcccagacctgctggaggacaaggcccagaagctgtccttctgtgaggaccagaatgcccaggacaggaacagcaagggcagtgacagcctgaacaagaaggtggacctgaccctgctgagccccaagtcagaaaatgacaagctgaaggagatcagcctggcctgcaagatcacagagctggagagcgtgtccctgcccaccccagagatccagagcgacttcctgcacagcaaggtggaggcccctccttctgaggtggccgacaccctggtgatcatgacagccagcaagggcgtgcggctgcctgagcccaaggacaagatcctggagaccccccagaagatgacagagaagtctgagagcaagaccccaggagagggcaagaaggaggacaagagcaggatggccgagcccatgaagggctacatgaggcccaccaagagccggggcctgacccccctgctgcccaagagcaccatccaggagcaggagcggcacaagcagctgaagtctgctggcatcgcccggcctgaggagggccggcctgtggtgtctggaactggaaatgacatcaccaccccacccaacaaggagctgccccccagccctgagaagaagaccaagcccctggccaccacccagcctgccaagaccagcaccagcaaggccaagacccagcccaccagcctgcccaagcagcctgcccccaccaccatcggcggcctgaacaagaagcccatgagcctggccagcggcctggtgcctgctgccccacccaagaggcctgctgtggccagcgcccggcccagcatcctgcccagcaaggatgtgaagcccaagcccatcgcagatgccaaggcccctgagaagagggccagccccagcaagccagccagcgccccagccagccgcagcggcagcaagagcacccagacagtggccaagaccaccacagctgctgctgtggccagcacaggccccagcagccgcagccccagcaccctgctgcccaagaagcccacagccatcaagacagagggcaagccagctgaggtgaagaagatgacagccaagtctgtgcctgctgacctgagccggcccaagagcaccagcaccagctccatgaagaagaccaccaccctgtctggaacagccccagctgctggggtggtgcccagccgggtgaaggccacccccatgcccagccggcccagcaccacccccttcatcgacaagaagcccaccagcgccaagcccagcagcaccaccccccggctgagccggctggccaccaacaccagcgccccagacctgaagaatgtgcgcagcaaggtgggcagcacagagaacatcaagcaccagcccggcggcggccgggccaaggtggagaagaagacagaagctgctgccaccaccaggaagccagagagcaatgctgtgaccaagacagctggccccatcgccagcgcccagaagcagcctgctgggaaggtgcagatcgtgtccaagaaggtgtcctacagccacatccagagcaaatgtggcagcaaggacaacatcaagcacgtgcctgggggcggcaatgtgcagatccagaacaagaaggtggacatcagcaaggtgagcagcaaatgtggcagcaaggccaacatcaagcacaagccaggcggcggagatgtgaagattgagagccagaagctgaacttcaaggagaaggcccaggccaaggtgggcagcctggacaacgtgggccacctgcctgctggaggagctgtgaagacagaaggaggcggcagcgaggcccccctgtgccccggccccccagctggggaggagcccgccatcagcgaggccgcccctgaggccggggcccccaccagcgccagcggcctgaatggccaccccaccctgagcggcggcggggaccagcgggaggcccagaccctggacagccagatccaggagaccagcatctag

SEQ ID NO: 159771 - DNA, 750 bp, synthetic construct
  misc_feature 1..750: note = Description of Artificial Sequence: Synthetic coding sequence
  source 1..750: mol_type = other DNA
atgacagccaagtctgtgcctgctgacctgagccggcccaagagcaccagcaccagctccatgaagaagaccaccaccctgagcggcacagccccagctgctggggtggtgcccagccgggtgaaggccacccccatgcccagccggcccagcaccacccccttcatcgacaagaagcccaccagcgccaagcccagcagcaccaccccccggctgagccggctggccaccaacaccagcgccccagacctgaagaatgtgcgcagcaaggtgggcagcacagagaacatcaagcaccagcccggcggcggccgggtgcagatcgtgtccaagaaggtgtcctacagccacatccagagcaaatgtggcagcaaggacaacatcaagcacgtgcctgggggcggcaatgtgcagatccagaacaagaaggtggacatcagcaaggtgagcagcaaatgtggcagcaaggccaacatcaagcacaagccaggcggcggagatgtgaagattgagagccagaagctgaacttcaaggagaaggcccaggccaaggtgggcagcctggacaacgtgggccacctgcctgctgggggcgctgtgaagattgagacctaccgcctgaccttccgggccaatgcccgggccaggacagaccatggagctgacatcgtgtccaggcctccccacttccctgggggccccaacagcggcagccgggtgctgggccccctgagcagagctgtgcactag

SEQ ID NO: 159772 - DNA, 300 bp, synthetic construct
  misc_feature 1..300: note = Description of Artificial Sequence: Synthetic coding sequence
  source 1..300: mol_type = other DNA
atggctgacctgagcctggctgatgccctgacagagcccagcccagacattgaaggagagatcaagagggacttcatcgccaccctggaggccgaggcctttgatgatgtggtgggggagaccgtgggcaagacagactacatccccctgctggatgtggatgagaagacaggcaacagcgagagcaagaagaagccctgcagcgagaccagccagatcgaggacacccccagcagcaagcccaccctgctggccaacggcggccatggagtggagggcagtgacaccacagaggcctag

SEQ ID NO: 159773 - DNA, 2277 bp, synthetic construct
  misc_feature 1..2277: note = Description of Artificial Sequence: Synthetic coding sequence
  source 1..2277: mol_type = other DNA
atggccgagccccggcaggagtttgaggtgatggaggaccatgctggcacctacggcctgggggacaggaaggaccagggcggctacaccatgcaccaggaccaggagggggacacagatgctggcctgaaggagagccccctgcagacccccacagaagatggcagcgaggagcccggcagcgagaccagtgatgccaagagcacccccacagcagaagatgtgacagcccccctggtggatgaaggagcccctgggaagcaggccgccgcccagccccacacagagatccctgagggcaccacagctgaggaggccggcatcggggacacccccagcctggaggatgaggccgccggccacgtgacccaggagcctgagagcggcaaggtggtgcaggagggcttcctgcgggagcccggccccccaggcctgagccaccagctgatgagcggcatgcctggggcccccctgctgcctgagggcccccgggaggccacccggcagcccagcggcactggacctgaggacacagagggcggcagacatgcccctgagctgctgaagcaccagctgctgggggacctgcaccaggagggcccccccctgaagggggccggcggcaaggagcggcccggcagcaaggaggaggtggatgaggacagagatgtggatgagagcagcccccaggacagcccccccagcaaggccagccctgcccaggacggccggcccccccagacagctgcccgggaggccaccagcatccctggcttccctgctgagggcgccatccccctgcctgtggacttcctgagcaaggtgtccacagagatcccagccagcgagccagatggccccagcgtgggccgggccaagggccaggatgcccccctggagttcaccttccacgtggagatcacccccaacgtgcagaaggagcaggcccacagcgaggagcacctgggccgggccgccttccctggggcccctggagagggccctgaggcccggggccccagcctgggggaggacaccaaggaggccgacctgcctgagcccagcgagaagcagcctgctgctgccccccggggcaagcctgtgtcccgggtgccccagctgaaggccaggatggtgtccaagagcaaggatggcaccggcagtgatgacaagaaggccaagaccagcaccaggagcagcgccaagaccctgaagaaccggccctgcctgagccccaagcaccccaccccaggcagcagtgaccccctcatccagcccagcagccctgctgtgtgcccagagccccccagcagccccaagtatgtgtcctctgtgaccagcaggacaggcagcagcggggccaaggagatgaagctgaagggagcagatggcaagaccaagatcgccacccccaggggggccgcccctcctggccagaagggccaggccaatgccacccgcatcccagccaagaccccaccagcccccaagaccccacccagcagcggggagccccccaagagcggggacaggagcggctacagcagccctggcagccctggcaccccaggcagccgcagcaggacccccagcctgcccaccccacccacccgggagcccaagaaggtggccgtggtgaggaccccacccaagagccccagcagcgccaagagccggctgcagacagcccctgtgcccatgccagacctgaagaatgtgaagagcaagattggcagcacagagaacctgaagcaccagcccggcggcggcaaggtgcagatcatcaacaagaagctggacctgagcaatgtgcagagcaaatgtggcagcaaggacaacatcaagcacgtgcctgggggcggctctgtgcagatcgtgtacaagcctgtggacctgagcaaggtgaccagcaaatgtggcagcctgggcaacatccaccacaagccaggcggcggccaggtggaggtgaagtctgagaagctggacttcaaggacagagtgcagagcaagattggcagcctggacaacatcacccacgtgcctgggggcggcaacaagaagattgagacccacaagctgaccttcagagaaaatgccaaggccaagacagaccatggagctgagatcgtgtacaagagccctgtggtgtctggggacaccagccccaggcacctgagcaatgtgagcagcacaggcagcattgacatggtggacagcccccagctggccaccctggctgatgaggtgtctgccagcctggccaagcagggcctgtag

SEQ ID NO: 159774 - DNA, 1152 bp, synthetic construct
  misc_feature 1..1152: note = Description of Artificial Sequence: Synthetic coding sequence
  source 1..1152: mol_type = other DNA
atggccgagccccggcaggagtttgaggtgatggaggaccatgctggcacctacggcctgggggacaggaaggaccagggcggctacaccatgcaccaggaccaggagggggacacagatgctggcctgaaggccgaggaggccggcatcggggacacccccagcctggaggatgaggccgccggccacgtgacccaggccaggatggtgtccaagagcaaggatggcactggaagtgatgacaagaaggccaagggagcagatggcaagaccaagatcgccaccccaagaggagctgcccctcctggccagaagggccaggccaatgccacccgcatcccagccaagaccccaccagcccccaagaccccacccagcagtggagagccccccaagagcggggacagaagtggctacagcagccctggcagccctggcaccccaggcagccgcagcaggacccccagcctgcccaccccacccacccgggagcccaagaaggtggccgtggtgaggaccccacccaagagccccagcagcgccaagagccggctgcagacagcccctgtgcccatgccagacctgaagaatgtgaagagcaagattggcagcacagagaacctgaagcaccagcccggcggcggcaaggtgcagatcatcaacaagaagctggacctgagcaatgtgcagagcaaatgtggcagcaaggacaacatcaagcacgtgcctgggggcggctctgtgcagatcgtgtacaagcctgtggacctgagcaaggtgaccagcaaatgtggcagcctgggcaacatccaccacaagccaggcggcggccaggtggaggtgaagtctgagaagctggacttcaaggacagagtgcagagcaagattggcagcctggacaacatcacccacgtgcctgggggcggcaacaagaagattgagacccacaagctgaccttccgggagaatgccaaggccaagacagaccacggggctgagatcgtgtacaagagccctgtggtgtctggggacaccagccccaggcacctgagcaatgtgagcagcacaggcagcattgacatggtggacagcccccagctggccaccctggctgatgaggtgtctgccagcctggccaagcagggcctgtag

SEQ ID NO: 159775 - DNA, 1239 bp, synthetic construct
  misc_feature 1..1239: note = Description of Artificial Sequence: Synthetic coding sequence
  source 1..1239: mol_type = other DNA
atggccgagccccggcaggagtttgaggtgatggaggaccatgctggcacctacggcctgggggacaggaaggaccagggcggctacaccatgcaccaggaccaggagggggacacagatgctggcctgaaggagagccccctgcagacccccacagaagatggcagcgaggagcccggcagcgagaccagtgatgccaagagcacccccacagctgaggccgaggaggccggcattggagacacccccagcctggaggatgaagctgctggccacgtgacccaggccaggatggtgtccaagagcaaggatggcaccggcagtgatgacaagaaggccaagggagcagatggcaagaccaagatcgccacccccaggggggccgcccctcctggccagaagggccaggccaatgccacccgcatcccagccaagaccccaccagcccccaagaccccacccagcagcggggagccccccaagagcggggacaggagcggctacagcagccctggcagccctggcaccccaggcagccgcagcaggacccccagcctgcccaccccacccacccgggagcccaagaaggtggccgtggtgaggaccccacccaagagccccagcagcgccaagagccggctgcagacagcccctgtgcccatgccagacctgaagaatgtgaagagcaagattggcagcacagagaacctgaagcaccagcccggcggcggcaaggtgcagatcatcaacaagaagctggacctgagcaatgtgcagagcaaatgtggcagcaaggacaacatcaagcacgtgcctgggggcggctctgtgcagatcgtgtacaagcctgtggacctgagcaaggtgaccagcaaatgtggcagcctgggcaacatccaccacaagccaggcggcggccaggtggaggtgaagtctgagaagctggacttcaaggacagagtgcagagcaagattggcagcctggacaacatcacccacgtgcctgggggcggcaacaagaagattgagacccacaagctgaccttcagagaaaatgccaaggccaagacagaccatggagctgagatcgtgtacaagagccctgtggtgtctggggacaccagccccaggcacctgagcaatgtgagcagcacaggcagcattgacatggtggacagcccccagctggccaccctggctgatgaggtgtctgccagcctggccaagcagggcctgtag

SEQ ID NO: 159776 - DNA, 2331 bp, synthetic construct
  misc_feature 1..2331: note = Description of Artificial Sequence: Synthetic coding sequence
  source 1..2331: mol_type = other DNA
atggccgagccccggcaggagtttgaggtgatggaggaccatgctggcacctacggcctgggggacaggaaggaccagggcggctacaccatgcaccaggaccaggagggggacacagatgctggcctgaaggagagccccctgcagacccccacagaagatggcagcgaggagcccggcagcgagaccagtgatgccaagagcacccccacagcagaagatgtgacagcccccctggtggatgaaggagcccctgggaagcaggccgccgcccagccccacacagagatccctgagggcaccacagctgaggaggccggcatcggggacacccccagcctggaggatgaggccgccggccacgtgacccaggagcctgagagcggcaaggtggtgcaggagggcttcctgcgggagcccggccccccaggcctgagccaccagctgatgagcggcatgcctggggcccccctgctgcctgagggcccccgggaggccacccggcagcccagcggcactggacctgaggacacagagggcggcagacatgcccctgagctgctgaagcaccagctgctgggggacctgcaccaggagggcccccccctgaagggggccggcggcaaggagcggcccggcagcaaggaggaggtggatgaggacagagatgtggatgagagcagcccccaggacagcccccccagcaaggccagccctgcccaggacggccggcccccccagacagctgcccgggaggccaccagcatccctggcttccctgctgagggcgccatccccctgcctgtggacttcctgagcaaggtgtccacagagatcccagccagcgagccagatggccccagcgtgggccgggccaagggccaggatgcccccctggagttcaccttccacgtggagatcacccccaacgtgcagaaggagcaggcccacagcgaggagcacctgggccgggccgccttccctggggcccctggagagggccctgaggcccggggccccagcctgggggaggacaccaaggaggccgacctgcctgagcccagcgagaagcagcctgctgctgccccccggggcaagcctgtgtcccgggtgccccagctgaaggccaggatggtgtccaagagcaaggatggcaccggcagtgatgacaagaaggccaagaccagcaccaggagcagcgccaagaccctgaagaaccggccctgcctgagccccaagcaccccaccccaggcagcagtgaccccctcatccagcccagcagccctgctgtgtgcccagagccccccagcagccccaagtatgtgtcctctgtgaccagcaggacaggcagcagcggggccaaggagatgaagctgaagggagcagatggcaagaccaagatcgccacccccaggggggccgcccctcctggccagaagggccaggccaatgccacccgcatcccagccaagaccccaccagcccccaagaccccacccagcagcgccaccaagcaggtgcagaggaggcctcctcctgctggccccaggtctgagcggggggagccccccaagagcggggacaggagcggctacagcagccctggcagccctggcaccccaggcagccgcagcaggacccccagcctgcccaccccacccacccgggagcccaagaaggtggccgtggtgaggaccccacccaagagccccagcagcgccaagagccggctgcagacagcccctgtgcccatgccagacctgaagaatgtgaagagcaagattggcagcacagagaacctgaagcaccagcccggcggcggcaaggtgcagatcatcaacaagaagctggacctgagcaatgtgcagagcaaatgtggcagcaaggacaacatcaagcacgtgcctgggggcggctctgtgcagatcgtgtacaagcctgtggacctgagcaaggtgaccagcaaatgtggcagcctgggcaacatccaccacaagccaggcggcggccaggtggaggtgaagtctgagaagctggacttcaaggacagagtgcagagcaagattggcagcctggacaacatcacccacgtgcctgggggcggcaacaagaagattgagacccacaagctgaccttcagagaaaatgccaaggccaagacagaccatggagctgagatcgtgtacaagagccctgtggtgtctggggacaccagccccaggcacctgagcaatgtgagcagcacaggcagcattgacatggtggacagcccccagctggccaccctggctgatgaggtgtctgccagcctggccaagcagggcctgtag

SEQ ID NO: 159777 - DNA, 951 bp, synthetic construct
  misc_feature 1..951: note = Description of Artificial Sequence: Synthetic coding sequence
  source 1..951: mol_type = other DNA
atgctgcgggccctgcagcagaggaagcgggaggccggcatcggggacacccccagcctggaggatgaggccgccggccacgtgacccaggccaggatggtgtccaagagcaaggatggcactggaagtgatgacaagaaggccaagggagcagatggcaagaccaagatcgccaccccaagaggagctgcccctcctggccagaagggccaggccaatgccacccgcatcccagccaagaccccaccagcccccaagaccccacccagcagtggagagccccccaagagcggggacagaagtggctacagcagccctggcagccctggcaccccaggcagccgcagcaggacccccagcctgcccaccccacccacccgggagcccaagaaggtggccgtggtgaggaccccacccaagagccccagcagcgccaagagccggctgcagacagcccctgtgcccatgccagacctgaagaatgtgaagagcaagattggcagcacagagaacctgaagcaccagcccggcggcggcaaggtgcagatcgtgtacaagcctgtggacctgagcaaggtgaccagcaaatgtggcagcctgggcaacatccaccacaagccaggcggcggccaggtggaggtgaagtctgagaagctggacttcaaggacagagtgcagagcaagattggcagcctggacaacatcacccacgtgcctgggggcggcaacaagaagattgagacccacaagctgaccttcagagaaaatgccaaggccaagacagaccatggagctgagatcgtgtacaagagccctgtggtgtctggggacaccagccccaggcacctgagcaatgtgagcagcacaggcagcattgacatggtggacagcccccagctggccaccctggctgatgaggtgtctgccagcctggccaagcagggcctgtag

SEQ ID NO: 159778 - DNA, 1326 bp, synthetic construct
  misc_feature 1..1326: note = Description of Artificial Sequence: Synthetic coding sequence
  source 1..1326: mol_type = other DNA
atggccgagccccggcaggagtttgaggtgatggaggaccatgctggcacctacggcctgggggacaggaaggaccagggcggctacaccatgcaccaggaccaggagggggacacagatgctggcctgaaggagagccccctgcagacccccacagaagatggcagcgaggagcccggcagcgagaccagtgatgccaagagcacccccacagcagaagatgtgacagcccccctggtggatgaaggagcccctgggaagcaggccgccgcccagccccacacagagatccctgagggcaccacagctgaggaggccggcatcggggacacccccagcctggaggatgaggccgccggccacgtgacccaggccaggatggtgtccaagagcaaggatggcactggaagtgatgacaagaaggccaagggagcagatggcaagaccaagatcgccaccccaagaggagctgcccctcctggccagaagggccaggccaatgccacccgcatcccagccaagaccccaccagcccccaagaccccacccagcagtggagagccccccaagagcggggacagaagtggctacagcagccctggcagccctggcaccccaggcagccgcagcaggacccccagcctgcccaccccacccacccgggagcccaagaaggtggccgtggtgaggaccccacccaagagccccagcagcgccaagagccggctgcagacagcccctgtgcccatgccagacctgaagaatgtgaagagcaagattggcagcacagagaacctgaagcaccagcccggcggcggcaaggtgcagatcatcaacaagaagctggacctgagcaatgtgcagagcaaatgtggcagcaaggacaacatcaagcacgtgcctgggggcggctctgtgcagatcgtgtacaagcctgtggacctgagcaaggtgaccagcaaatgtggcagcctgggcaacatccaccacaagccaggcggcggccaggtggaggtgaagtctgagaagctggacttcaaggacagagtgcagagcaagattggcagcctggacaacatcacccacgtgcctgggggcggcaacaagaagattgagacccacaagctgaccttccgggagaatgccaaggccaagacagaccacggggctgagatcgtgtacaagagccctgtggtgtctggggacaccagccccaggcacctgagcaatgtgagcagcacaggcagcattgacatggtggacagcccccagctggccaccctggctgatgaggtgtctgccagcctggccaagcagggcctgtag

SEQ ID NO: 159779 - DNA, 1080 bp, synthetic construct
  misc_feature 1..1080: note = Description of Artificial Sequence: Synthetic coding sequence
  source 1..1080: mol_type = other DNA
atggccgagccccggcaggagtttgaggtgatggaggaccatgctggcacctacggcctgggggacaggaaggaccagggcggctacaccatgcaccaggaccaggagggggacacagatgctggcctgaaggagagccccctgcagacccccacagaagatggcagcgaggagcccggcagcgagaccagtgatgccaagagcacccccacagctgaggccaggatggtgtccaagagcaaggatggcaccggcagtgatgacaagaaggccaagggagcagatggcaagaccaagatcgccacccccaggggggccgcccctcctggccagaagggccaggccaatgccacccgcatcccagccaagaccccaccagcccccaagaccccacccagcagcggggagccccccaagagcggggacaggagcggctacagcagccctggcagccctggcaccccaggcagccgcagcaggacccccagcctgcccaccccacccacccgggagcccaagaaggtggccgtggtgaggaccccacccaagagccccagcagcgccaagagccggctgcagacagcccctgtgcccatgccagacctgaagaatgtgaagagcaagattggcagcacagagaacctgaagcaccagcccggcggcggcaaggtgcagatcgtgtacaagcctgtggacctgagcaaggtgaccagcaaatgtggcagcctgggcaacatccaccacaagccaggcggcggccaggtggaggtgaagtctgagaagctggacttcaaggacagagtgcagagcaagattggcagcctggacaacatcacccacgtgcctgggggcggcaacaagaagattgagacccacaagctgaccttccgggagaatgccaaggccaagacagaccacggggctgagatcgtgtacaagagccctgtggtgtctggggacaccagccccaggcacctgagcaatgtgagcagcacaggcagcattgacatggtggacagcccccagctggccaccctggctgatgaggtgtctgccagcctggccaagcagggcctgtag

SEQ ID NO: 159780 - DNA, 2331 bp, synthetic construct; identical to SEQ ID NO: 159776
  misc_feature 1..2331: note = Description of Artificial Sequence: Synthetic coding sequence
  source 1..2331: mol_type = other DNA

SEQ ID NO: 159781 - DNA, 1239 bp, synthetic construct; identical to SEQ ID NO: 159775
  misc_feature 1..1239: note = Description of Artificial Sequence: Synthetic coding sequence
  source 1..1239: mol_type = other DNA

SEQ ID NO: 159782 - DNA, 795 bp, synthetic construct
  misc_feature 1..795: note = Description of Artificial Sequence: Synthetic coding sequence
  source 1..795: mol_type = other DNA
acccgggaggccgagggcgcagatggcaagaccaagatcgccacccccaagggccaggccaatgccacccgcatcccagccaagaccccaccagcccccaagaccccacccagcagtggagagccccccaagagcggggacagaagtggctacagcagccctggcagccctggcaccccaggcagccgcagcaggacccccagcctgcccaccccacccacccgggagcccaagaaggtggccgtggtgaggaccccacccaagagccccagcagcgccaagagccggctgcagacagcccctgtgcccatgccagacctgaagaatgtgaagagcaagattggcagcacagagaacctgaagcaccagcccggcggcggcaaggtgcagatcgtgtacaagcctgtggacctgagcaaggtgaccagcaaatgtggcagcctgggcaacatccaccacaagccaggcggcggccaggtggaggtgaagtctgagaagctggacttcaaggacagagtgcagagcaagattggcagcctggacaacatcacccacgtgcctgggggcggcaacaagaagattgagacccacaagctgaccttcagagaaaatgccaaggccaagacagaccatggagctgagatcgtgtacaagagccctgtggtgtctggggacaccagccccaggcacctgagcaatgtgagcagcacaggcagcattgacatggtggacagcccccagctggccaccctggctgatgaggtgtctgccagcctggccaagcagggcctgtag

SEQ ID NO: 159783 - DNA, 1059 bp, synthetic construct
  misc_feature 1..1059: note = Description of Artificial Sequence: Synthetic coding sequence
  source 1..1059: mol_type = other DNA
atggccgagccccggcaggagtttgaggtgatggaggaccatgctggcacctacggcctgggggacaggaaggaccagggcggctacaccatgcaccaggaccaggagggggacacagatgctggcctgaaggccgaggaggccggcatcggggacacccccagcctggaggatgaggccgccggccacgtgacccaggccaggatggtgtccaagagcaaggatggcactggaagtgatgacaagaaggccaagggagcagatggcaagaccaagatcgccaccccaagaggagctgcccctcctggccagaagggccaggccaatgccacccgcatcccagccaagaccccaccagcccccaagaccccacccagcagtggagagccccccaagagcggggacagaagtggctacagcagccctggcagccctggcaccccaggcagccgcagcaggacccccagcctgcccaccccacccacccgggagcccaagaaggtggccgtggtgaggaccccacccaagagccccagcagcgccaagagccggctgcagacagcccctgtgcccatgccagacctgaagaatgtgaagagcaagattggcagcacagagaacctgaagcaccagcccggcggcggcaaggtgcagatcgtgtacaagcctgtggacctgagcaaggtgaccagcaaatgtggcagcctgggcaacatccaccacaagccaggcggcggccaggtggaggtgaagtctgagaagctggacttcaaggacagagtgcagagcaagattggcagcctggacaacatcacccacgtgcctgggggcggcaacaagaagattgagacccacaagctgaccttcagagaaaatgccaaggccaagacagaccatggagctgagatcgtgtacaagagccctgtggtgtctggggacaccagccccaggcacctgagcaatgtgagcagcacaggcagcattgacatggtggacagcccccagctggccaccctggctgatgaggtgtctgccagcctggccaagcagggcctgtag

SEQ ID NO: 159784 - DNA, 1233 bp, synthetic construct
  misc_feature 1..1233: note = Description of Artificial Sequence: Synthetic coding sequence
  source 1..1233: mol_type = other DNA
atggccgagccccggcaggagtttgaggtgatggaggaccatgctggcacctacggcctgggggacaggaaggaccagggcggctacaccatgcaccaggaccaggagggggacacagatgctggcctgaaggagagccccctgcagacccccacagaagatggcagcgaggagcccggcagcgagaccagtgatgccaagagcacccccacagcagaagatgtgacagcccccctggtggatgaaggagcccctgggaagcaggccgccgcccagccccacacagagatccctgagggcaccacagctgaggaggccggcatcggggacacccccagcctggaggatgaggccgccggccacgtgacccaggccaggatggtgtccaagagcaaggatggcactggaagtgatgacaagaaggccaagggagcagatggcaagaccaagatcgccaccccaagaggagctgcccctcctggccagaagggccaggccaatgccacccgcatcccagccaagaccccaccagcccccaagaccccacccagcagtggagagccccccaagagcggggacagaagtggctacagcagccctggcagccctggcaccccaggcagccgcagcaggacccccagcctgcccaccccacccacccgggagcccaagaaggtggccgtggtgaggaccccacccaagagccccagcagcgccaagagccggctgcagacagcccctgtgcccatgccagacctgaagaatgtgaagagcaagattggcagcacagagaacctgaagcaccagcccggcggcggcaaggtgcagatcgtgtacaagcctgtggacctgagcaaggtgaccagcaaatgtggcagcctgggcaacatccaccacaagccaggcggcggccaggtggaggtgaagtctgagaagctggacttcaaggacagagtgcagagcaagattggcagcctggacaacatcacccacgtgcctgggggcggcaacaagaagattgagacccacaagctgaccttcagagaaaatgccaaggccaagacagaccatggagctgagatcgtgtacaagagccctgtggtgtctggggacaccagccccaggcacctgagcaatgtgagcagcacaggcagcattgacatggtggacagcccccagctggccaccctggctgatgaggtgtctgccagcctggccaagcagggcctgtag

SEQ ID NO: 159785 - DNA, 807 bp, synthetic construct
  misc_feature 1..807: note = Description of Artificial Sequence: Synthetic coding sequence
  source 1..807: mol_type = other DNA
atggctgtgaatgtgtacagcacctctgtgaccagtgacaacctgagcagacatgacatgctggcctggatcaatgaaagcctgcagctgaacctgaccaagattgagcagctgtgcagcggggccgcctactgccagttcatggacatgctgtttcctggcagcatcgccctgaagaaggtgaagttccaggccaagctggagcacgagtacatccagaacttcaagatcctgcaggccggcttcaagaggatgggcgtggacaagatcatccctgtggacaagctggtgaagggcaagttccaggacaactttgaatttgtgcagtggttcaagaagttctttgatgccaactatgatggcaaggactatgaccctgtggccgcccggcagggccaggagacagctgtggcccccagcctggtggccccagccctgaacaagcccaagaagcccctgaccagcagcagcgctgccccccagaggcccatcagcacccagaggacagctgctgcccccaaggccggccctggggtggtgaggaagaaccctggggtgggcaatggagatgatgaagctgctgagctgatgcagcaggtgaatgtgctgaagctgactgtggaggacctggagaaggagcgggacttctactttgggaagctgaggaacatcgagctgatctgccaggagaatgaaggagaaaatgaccctgtgctgcagagaattgtggacatcctgtatgccacagatgagggctttgtgatcccagatgaaggaggcccccaggaggagcaggaggagtactag

SEQ ID NO: 159786 - DNA, 984 bp, synthetic construct
  misc_feature 1..984: note = Description of Artificial Sequence: Synthetic coding sequence
  source 1..984: mol_type = other DNA
atgcctggccccacccagaccctgagccccaatggagagaacaacaatgacatcatccaggacaacaacggcaccatcatccccttcaggaagcacacagtgcggggggagaggagctacagctggggcatggctgtgaatgtgtacagcaccagcatcacccaggagaccatgagcagacatgacatcatcgcctgggtgaatgacatcgtgtccctgaactacaccaaggtggagcagctgtgcagcggggccgcctactgccagttcatggacatgctgtttcctggctgcatcagcctgaagaaggtgaagttccaggccaagctggagcacgagtacatccacaacttcaagctgctgcaggccagcttcaagaggatgaatgtggacaaggtgattcctgtggagaagctggtgaagggccgcttccaggacaacctggacttcatccagtggttcaagaagttctatgatgccaactatgatggcaaggagtatgaccctgtggaggcccggcagggccaggatgccatccccccaccagaccccggggagcagatcttcaacctgcccaagaagagccaccacgccaacagccccacagctggagctgccaagagcagccctgctgccaagccaggcagcacccccagccggcccagcagcgccaagagggccagcagcagcggcagcgccagcaagagtgacaaggacctggagacccaggtgatccagctgaatgagcaggtgcacagcctgaagctggccctggagggcgtggagaaggagcgggacttctactttgggaagctgcgggagattgagctgctgtgccaggagcacggccaggagaatgatgacctggtgcagaggctgatggacatcctgtatgccagcgaggagcacgagggccacacagaggagcctgaggccgaggagcaggcccacgagcagcagcccccccagcaggaggagtactag

SEQ ID NO: 159787 - DNA, 855 bp, synthetic construct
  misc_feature 1..855: note = Description of Artificial Sequence: Synthetic coding sequence
  source 1..855: mol_type = other DNA
atggctgtgaatgtgtacagcaccagcatcacccaggagaccatgagcagacatgacatcatcgcctgggtgaatgacatcgtgtccctgaactacaccaaggtggagcagctgtgcagcggggccgcctactgccagttcatggacatgctgtttcctggctgcatcagcctgaagaaggtgaagttccaggccaagctggagcacgagtacatccacaacttcaagctgctgcaggccagcttcaagaggatgaatgtggacaaggtgattcctgtggagaagctggtgaagggccgcttccaggacaacctggacttcatccagtggttcaagaagttctatgatgccaactatgatggcaaggagtatgaccctgtggaggcccggcagggccaggatgccatccccccaccagaccctggagagcagatcttcaacctgcccaagaagagccaccacgccaacagccccacagctggggccgccaagagcagccctgctgccaagccaggcagcacccccagccggcccagcagcgccaagagggccagcagcagcggcagcgccagcaagagtgacaaggacctggagacccaggtgatccagctgaatgagcaggtgcacagcctgaagctggccctggagggcgtggagaaggagcgggacttctactttgggaagctgcgggagattgagctgctgtgccaggagcacggccaggagaatgatgacctggtgcagaggctgatggacatcctgtatgccagcgaggagcacgagggccacacagaggagcctgaggccgaggagcaggcccacgagcagcagcccccccagcaggaggagtactag

SEQ ID NO: 159788 - DNA, 948 bp, synthetic construct
  misc_feature 1..948: note = Description of Artificial Sequence: Synthetic coding sequence
  source 1..948: mol_type = other DNA
atgaagcagaacagagaccagaagtgccctgtgtcccagaggaacagcagcttccagcagcccggcaggaagccaggctgcagctcctggggcatggctgtgaatgtgtacagcaccagcatcacccaggagaccatgagcagacatgacatcatcgcctgggtgaatgacatcgtgtccctgaactacaccaaggtggagcagctgtgcagcggggccgcctactgccagttcatggacatgctgtttcctggctgcatcagcctgaagaaggtgaagttccaggccaagctggagcacgagtacatccacaacttcaagctgctgcaggccagcttcaagaggatgaatgtggacaaggtgattcctgtggagaagctggtgaagggccgcttccaggacaacctggacttcatccagtggttcaagaagttctatgatgccaactatgatggcaaggagtatgaccctgtggaggcccggcagggccaggatgccatccccccaccagaccccggggagcagatcttcaacctgcccaagaagagccaccacgccaacagccccacagctggagctgccaagagcagccctgctgccaagccaggcagcacccccagccggcccagcagcgccaagagggccagcagcagcggcagcgccagcaagagtgacaaggacctggagacccaggtgatccagctgaatgagcaggtgcacagcctgaagctggccctggagggcgtggagaaggagcgggacttctactttgggaagctgcgggagattgagctgctgtgccaggagcacggccaggagaatgatgacctggtgcagaggctgatggacatcctgtatgccagcgaggagcacgagggccacacagaggagcctgaggccgaggagcaggcccacgagcagcagcccccccagcaggaggagtactag

SEQ ID NO: 159789 - DNA, 825 bp, synthetic construct
  misc_feature 1..825: note = Description of Artificial Sequence: Synthetic coding sequence
  source 1..825: mol_type = other DNA
atggcccggaccaccaccaccagcagccgcatcatcaccggccccagcttcctgagcggcagcacccagtgtgccggctctgtgcccaccggggccgcctactgccagttcatggacatgctgtttcctggctgcatcagcctgaagaaggtgaagttccaggccaagctggagcacgagtacatccacaacttcaagctgctgcaggccagcttcaagaggatgaatgtggacaaggtgattcctgtggagaagctggtgaagggccgcttccaggacaacctggacttcatccagtggttcaagaagttctatgatgccaactatgatggcaaggagtatgaccctgtggaggcccggcagggccaggatgccatccccccaccagaccctggagagcagatcttcaacctgcccaagaagagccaccacgccaacagccccacagctggggccgccaagagcagccctgctgccaagccaggcagcacccccagccggcccagcagcgccaagagggccagcagcagcggcagcgccagcaagagtgacaaggacctggagacccaggtgatccagctgaatgagcaggtgcacagcctgaagctggccctggagggcgtggagaaggagcgggacttctactttgggaagctgcgggagattgagctgctgtgccaggagcacggccaggagaatgatgacctggtgcagaggctgatggacatcctgtatgccagcgaggagcacgagggccacacagaggagcctgaggccgaggagcaggcccacgagcagcagcccccccagcaggaggagtactag

SEQ ID NO: 159790 - DNA, 1005 bp, synthetic construct; identical to SEQ ID NO: 158659
  misc_feature 1..1005: note = Description of Artificial Sequence: Synthetic coding sequence
  source 1..1005: mol_type = other DNA

SEQ ID NO: 159791 - DNA, 801 bp, synthetic construct
  misc_feature 1..801: note = Description of Artificial Sequence: Synthetic coding sequence
  source 1..801: mol_type = other DNA
atggctgtgaatgtgtacagcacctctgtgaccagcgagaacctgagcagacatgacatgctggcctgggtgaatgacagcctgcacctgaactacaccaagattgagcagctgtgcagcggggccgcctactgccagttcatggacatgctgtttcctggctgtgtgcacctgaggaaggtgaagttccaggccaagctggagcacgagtacatccacaacttcaaggtgctgcaggccgccttcaagaagatgggcgtggacaagatcatccctgtggagaagctggtgaagggcaagttccaggacaactttgagttcatccagtggttcaagaagttctttgatgccaactatgatggcaaggactacaaccccctgctggcccggcagggccaggatgtggcccccccacccaaccctgtgccccagaggaccagccccaccggccccaagaacatgcagaccagcggccgcctgagcaatgtggccccaccctgcatcctgaggaagaaccccccatctgccagaaatggaggccatgaaacagatgcccagatcctggagctgaaccagcagctggtggacctgaagctgactgtggatggcctggagaaggagcgggacttctacttcagcaagctgcgggacatcgagctgatctgccaggagcatgaaagtgagaacagccctgtgatcagcggcatcatcggcatcctgtatgccacagaggagggctttgcccccccagaagatgatgaaattgaggagcaccagcaggaggaccaggatgagtactag

SEQ ID NO: 159792 - DNA, 801 bp, synthetic construct; identical to SEQ ID NO: 159791
  misc_feature 1..801: note = Description of Artificial Sequence: Synthetic coding sequence
  source 1..801: mol_type = other DNA

SEQ ID NO: 159793 - DNA, 657 bp, synthetic construct
  misc_feature 1..657: note = Description of Artificial Sequence: Synthetic coding sequence
  source 1..657: mol_type = other DNA
atggctgtgaatgtgtacagcacctctgtgaccagcgagaacctgagcagacatgacatgctggcctgggtgaatgacagcctgcacctgaactacaccaagattgagcagctgtgcagcggggccgcctactgccagttcatggacatgctgtttcctggctgtgtgcacctgaggaaggtgaagttccaggccaagctggagcacgagtacatccacaacttcaaggtgctgcaggccgccttcaagaagatgggcgtggacaagatcatccctgtggagaagctggtgaagggcaagttccaggacaactttgagttcatccagtggttcaagaagttctttgatgccaactatgatggcaaggactacaaccccctgctggcccggcagggccaggatgtggcccccccacccaaccctggggaccagatcttcaacaagagcaagaagctgattggaacagctgtgccccagaggaccagccccaccggccccaagaacatgcagaccagcggccgcctgagcaatgtggccccaccctgcatcctgaggaagaacccccccagcgccagaaatggaggccacgagacagatgcccagatcctggagctgaaccagcagctggtggacctgaagctgactgtggatggatag

SEQ ID NO: 159794 - DNA, 2004 bp, synthetic construct
  misc_feature 1..2004: note = Description of Artificial Sequence: Synthetic coding sequence
  source 1..2004: mol_type = other DNA
atggagaccctggagagcgagctgacctgccccatctgcctggagctgtttgaggaccccctgctgctgccctgtgcccacagcctgtgcttcaactgtgcccaccgcatcctggtgagccactgtgccaccaatgaatctgtggagagcatcacagccttccagtgccccacctgcagacatgtgatcaccctgagccagaggggcctggatggcctgaagagaaatgtgaccctgcagaacatcatcgaccgcttccagaaggcctctgtgtctggccccaacagccccagcgagacccggcgggagcgggcctttgatgccaacaccatgaccagcgctgagaaggtgctgtgccagttctgtgaccaggaccctgcccaggatgctgtgaagacctgtgtgacctgtgaggtgtcctactgtgatgagtgcctgaaggccacccaccccaacaagaagcccttcaccggccacaggctcatcgagcccatcccagacagccacatccggggcctgatgtgcctggagcatgaagatgagaaggtgaacatgtactgtgtgacagatgaccagctgatctgtgccctgtgcaagctggtgggccgccaccgggaccaccaggtggccgccctgtctgaaagatatgacaagctgaagcagaacctggagagcaacctgaccaacctgatcaagaggaacacagagctggagaccctgctggccaagctgatccagacctgccagcacgtggaggtgaatgccagccggcaggaggccaagctgacagaagaatgtgacctgctgattgagatcatccagcagaggcggcagatcatcggcaccaagatcaaggagggcaaggtgatgaggctgaggaagctggcccagcagatcgccaactgcaagcagtgcatcgagaggtctgccagcctcatcagccaggccgagcacagcctgaaggaaaatgaccacgcccgcttcctgcagacagccaagaacatcacagagcgggtgtccatggccacagccagcagccaggtgctgatccctgagatcaacctgaatgacacctttgacacctttgccctggacttcagccgggagaagaagctgctggagtgcctggactacctgacagcccccaacccccccaccatccgggaggagctgtgcacagccagctatgacaccatcaccgtgcactggaccagtgatgatgagttctctgtggtgtcctatgagctgcagtacaccatcttcaccggccaggccaacgtggtgtccctgtgcaacagcgctgacagctggatgattgtgcccaacatcaagcagaaccactacacagtgcacggcctgcagagcggcaccaagtacatcttcatggtgaaggccatcaaccaggccggcagccgcagcagcgagcccgggaagctgaagaccaacagccagcccttcaagctggaccccaagagcgcccacaggaagctgaaggtgtcccatgacaacctgactgtggagagagatgagagcagcagcaagaagagccacaccccagagcgcttcaccagccagggcagctatggagtggccggaaatgtgttcatcgacagcggccgccactactgggaggtggtgatcagcggcagcacctggtacgccatcggcctggcctacaagagcgcccccaagcatgagtggattggcaagaacagcgcctcctgggccctgtgccgctgcaacaacaactgggtggtgcgccacaacagcaaggagatccccattgaaccagccccccacctgcggcgggtgggcatcctgctggactatgacaatggcagcatcgccttctatgatgccctgaacagcatccacctgtacacctttgatgtggcctttgcccagcctgtgtgccccaccttcaccgtgtggaacaagtgcctgaccatcatcaccggcctgcccatcccagaccacctggactgcacagagcagctgccctag

SEQ ID NO: 159795 - DNA, 2004 bp, synthetic construct; identical to SEQ ID NO: 159794
  misc_feature 1..2004: note = Description of Artificial Sequence: Synthetic coding sequence
  source 1..2004: mol_type = other DNA

SEQ ID NO: 159796 - DNA, 2004 bp, synthetic construct; identical to SEQ ID NO: 159794
  misc_feature 1..2004: note = Description of Artificial Sequence: Synthetic coding sequence
  source 1..2004: mol_type = other DNA

SEQ ID NO: 159797 - DNA, 1659 bp, synthetic construct
  misc_feature 1..1659: note = Description of Artificial Sequence: Synthetic coding sequence
  source 1..1659: mol_type = other DNA
atggagaccctggagagcgagctgacctgccccatctgcctggagctgtttgaggaccccctgctgctgccctgtgcccacagcctgtgcttcaactgtgcccaccgcatcctggtgagccactgtgccaccaatgaatctgtggagagcatcacagccttccagtgccccacctgcagacatgtgatcaccctgagccagaggggcctggatggcctgaagagaaatgtgaccctgcagaacatcatcgaccgcttccagaaggcctctgtgtctggccccaacagccccagcgagacccggcgggagcgggcctttgatgccaacaccatgaccagcgctgagaaggtgctgtgccagttctgtgaccaggaccctgcccaggatgctgtgaagacctgtgtgacctgtgaggtgtcctactgtgatgagtgcctgaaggccacccaccccaacaagaagcccttcaccggccacaggctcatcgagcccatcccagacagccacatccggggcctgatgtgcctggagcatgaagatgagaaggtgaacatgtactgtgtgacagatgaccagctgatctgtgccctgtgcaagctggtgggccgccaccgggaccaccaggtggccgccctgtctgaaagatatgacaagctgaagcagaacctggagagcaacctgaccaacctgatcaagaggaacacagagctggagaccctgctggccaagctgatccagacctgccagcacgtggaggtgaatgccagccggcaggaggccaagctgacagaagaatgtgacctgctgattgagatcatccagcagaggcggcagatcatcggcaccaagatcaaggagggcaaggtgatgaggctgaggaagctggcccagcagatcgccaactgcaagcagtgcatcgagaggtctgccagcctcatcagccaggccgagcacagcctgaaggaaaatgaccacgcccgcttcctgcagacagccaagaacatcacagagcgggtgtccatggccacagccagcagccaggtgctgatccctgagatcaacctgaatgacacctttgacacctttgccctggacttcagccgggagaagaagctgctggagtgcctggactacctgacagcccccaacccccccaccatccgggaggagctgtgcacagccagctatgacaccatcaccgtgcactggaccagtgatgatgagttctctgtggtgtcctatgagctgcagtacaccatcttcaccggccaggccaacgtggtgtccctgtgcaacagcgctgacagctggatgattgtgcccaacatcaagcagaaccactacacagtgcacggcctgcagagcggcaccaagtacatcttcatggtgaaggccatcaaccaggccggcagccgcagcagcgagcccgggaagctgaagaccaacagccagcccttcaagctggaccccaagagcgcccacaggaagctgaaggtgtcccatgacaacctgactgtggagagagatgagagcagcagcaagaagagccacaccccagagcgcttcaccagccagggcagctatggagtggccggaaatgtgttcatcgacagcggccgccactactgggaggtggtgatcagcggcagcacctggtag

SEQ ID NO: 159798 - DNA, 2004 bp, synthetic construct; identical to SEQ ID NO: 159794
  misc_feature 1..2004: note = Description of Artificial Sequence: Synthetic coding sequence
  source 1..2004: mol_type = other DNA

SEQ ID NO: 159799 - DNA, 2004 bp, synthetic construct; identical to SEQ ID NO: 159794
  misc_feature 1..2004: note = Description of Artificial Sequence: Synthetic coding sequence
  source 1..2004: mol_type = other DNA

SEQ ID NO: 159800 - DNA, 1452 bp, synthetic construct
  misc_feature 1..1452: note = Description of Artificial Sequence: Synthetic coding sequence
  source 1..1452: mol_type = other DNA
atggagaccctggagagcgagctgacctgccccatctgcctggagctgtttgaggaccccctgctgctgccctgtgcccacagcctgtgcttcaactgtgcccaccgcatcctggtgagccactgtgccaccaatgaatctgtggagagcatcacagccttccagtgccccacctgcagacatgtgatcaccctgagccagaggggcctggatggcctgaagagaaatgtgaccctgcagaacatcatcgaccgcttccagaaggcctctgtgtctggccccaacagccccagcgagacccggcgggagcgggcctttgatgccaacaccatgaccagcgctgagaaggtgctgtgccagttctgtgaccaggaccctgcccaggatgctgtgaagacctgtgtgacctgtgaggtgtcctactgtgatgagtgcctgaaggccacccaccccaacaagaagcccttcaccggccacaggctcatcgagcccatcccagacagccacatccggggcctgatgtgcctggagcatgaagatgagaaggtgaacatgtactgtgtgacagatgaccagctgatctgtgccctgtgcaagctggtgggccgccaccgggaccaccaggtggccgccctgtctgaaagatatgacaagctgaagcagaacctggagagcaacctgaccaacctgatcaagaggaacacagagctggagaccctgctggccaagctgatccagacctgccagcacgtggaggtgaatgccagccggcaggaggccaagctgacagaagaatgtgacctgctgattgagatcatccagcagaggcggcagatcatcggcaccaagatcaaggagggcaaggtgatgaggctgaggaagctggcccagcagatcgccaactgcaagcagtgcatcgagaggtctgccagcctcatcagccaggccgagcacagcctgaaggaaaatgaccacgcccgcttcctgcagacagccaagaacatcacagagcgggtgtccatggccacagccagcagccaggtgctgatccctgagatcaacctgaatgacacctttgacacctttgccctggacttcagccgggagaagaagctgctggagtgcctggactacctgacagcccccaacccccccaccatccgggaggagctgtgcacagccagctatgacaccatcaccgtgcactggaccagtgatgatgagttctctgtggtgtcctatgagctgcagtacaccatcttcaccggccaggccaacgtggtgtccctgtgcaacagcgctgacagctggatgattgtgcccaacatcaagcagaaccactacacagtgcacggcctgcagagcggcaccaagtacatcttcatggtgaaggccatcaaccaggccggcagccgcagcagcgagcccgggaagctgaagaccaacagctag

SEQ ID NO: 159801 - DNA, 594 bp, synthetic construct
  misc_feature 1..594: note = Description of Artificial Sequence: Synthetic coding sequence
  source 1..594: mol_type = other DNA
atggagaccctggagagcgagctgacctgccccatctgcctggagctgtttgaggaccccctgctgctgccctgtgcccacagcctgtgcttcaactgtgcccaccgcatcctggtgagccactgtgccaccaatgaatctgtggagagcatcacagccttccagtgccccacctgcagacatgtgatcaccctgagccagaggggcctggatggcctgaagagaaatgtgaccctgcagaacatcatcgaccgcttccagaaggcctctgtgtctggccccaacagccccagcgagacccggcgggagcgggcctttgatgccaacaccatgaccagcgctgagaaggtgctgtgccagttctgtgaccaggaccctgcccaggatgctgtgaagacctgtgtgacctgtgaggtgtcctactgtgatgagtgcctgaaggccacccaccccaacaagaagcccttcaccggccacaggctcatcgagcccatcccagacagccacatccggggcctgatgtgcctggagcatgaagatgagaaggtgaacatgtactgtgtgacagatgaccagctgatctgtgccctgtag

SEQ ID NO: 159802 - DNA, 2004 bp, synthetic construct; identical to SEQ ID NO: 159794
  misc_feature 1..2004: note = Description of Artificial Sequence: Synthetic coding sequence
  source 1..2004: mol_type = other DNA

SEQ ID NO: 159803 - DNA, 1854 bp, synthetic construct
  misc_feature 1..1854: note = Description of Artificial Sequence: Synthetic coding sequence
  source 1..1854: mol_type = other DNA
atggagaccctggagagcgagctgacctgccccatctgcctggagctgtttgaggaccccctgctgctgccctgtgcccacagcctgtgcttcaactgtgcccaccgcatcctggtgagccactgtgccaccaatgaatctgtggagagcatcacagccttccagtgccccacctgcagacatgtgatcaccctgagccagaggggcctggatggcctgaagagaaatgtgaccctgcagaacatcatcgaccgcttccagaaggcctctgtgtctggccccaacagccccagcgagaccagcgctgagaaggtgctgtgccagttctgtgaccaggaccctgcccaggatgctgtgaagacctgtgtgacctgtgaggtgtcctactgtgatgagtgcctgaaggccacccaccccaacaagaagcccttcaccggccacaggctcatcgagcccatcccagacagccacatccggggcctgatgtgcctggagcatgaagatgagaagcagaacctggagagcaacctgaccaacctgatcaagaggaacacagagctggagaccctgctggccaagctgatccagacctgccagcacgtggaggtgaatgccagccggcaggaggccaagctgacagaagaatgtgacctgctgattgagatcatccagcagaggcggcagatcatcggcaccaagatcaaggagggcaaggtgatgaggctgaggaagctggcccagcagatcgccaactgcaagcagtgcatcgagaggtctgccagcctcatcagccaggccgagcacagcctgaaggaaaatgaccacgcccgcttcctgcagacagccaagaacatcacagagcgggtgtccatggccacagccagcagccaggtgctgatccctgagatcaacctgaatgacacctttgacacctttgccctggacttcagccgggagaagaagctgctggagtgcctggactacctgacagcccccaacccccccaccatccgggaggagctgtgcacagccagctatgacaccatcaccgtgcactggaccagtgatgatgagttctctgtggtgtcctatgagctgcagtacaccatcttcaccggccaggccaacgtggtgtccctgtgcaacagcgctgacagctggatgattgtgcccaacatcaagcagaaccactacacagtgcacggcctgcagagcggcaccaagtacatcttcatggtgaaggccatcaaccaggccggcagccgcagcagcgagcccgggaagctgaagaccaacagccagcccttcaagctggaccccaagagcgcccacaggaagctgaaggtgtcccatgacaacctgactgtggagagagatgagagcagcagcaagaagagccacaccccagagcgcttcaccagccagggcagctatggagtggccggaaatgtgttcatcgacagcggccgccactactgggaggtggtgatcagcggcagcacctggtacgccatcggcctggcctacaagagcgcccccaagcatgagtggattggcaagaacagcgcctcctgggccctgtgccgctgcaacaacaactgggtggtgcgccacaacagcaaggagatccccattgaaccagccccccacctgcggcgggtgggcatcctgctggactatgacaatggcagcatcgccttctatgatgccctgaacagcatccacctgtacacctttgatgtggcctttgcccagcctgtgtgccccaccttcaccgtgtggaacaagtgcctgaccatcatcaccggcctgcccatcccagaccacctggactgcacagagcagctgccctag

SEQ ID NO: 159804 - DNA, 2208 bp, synthetic construct
  misc_feature 1..2208: note = Description of Artificial Sequence: Synthetic coding sequence
  source 1..2208: mol_type = other DNA
atgggagagagccctgcctctgtggtgctgaatgccagcggcggcctcttcagcctgaagatggagaccctggagagcgagctgacctgccccatctgcctggagctgtttgaggaccccctgctgctgccctgtgcccacagcctgtgcttcagctgtgcccaccgcatcctggtgagcagctgcagcagcggggagagcattgagcccatcacagccttccagtgccccacctgccgctacgtgatcagcctgaaccaccggggcctggatggcctgaagagaaatgtgaccctgcagaacatcatcgaccgcttccagaaggcctctgtgtctggccccaacagccccagcgagagcagaagagagaggacctaccggcccaccacagccatgagcagcgagagaattgcctgccagttctgtgagcaggaccccccaagagatgctgtgaagacctgcatcacctgtgaggtgtcctactgtgaccgctgcctgcgggccacccaccccaacaagaagcccttcaccagccaccggctggtggagcctgtgcctgacacccacctgcggggcatcacctgcctggaccatgaaaatgagaaggtgaacatgtactgtgtgtctgatgaccagctgatctgtgccctgtgcaagctggtgggccgccaccgggaccaccaggtggccagcctgaatgacagatttgagaagctgaagcagaccctggagatgaacctgaccaacctggtgaagagaaattctgagctggagaaccagatggccaagctgatccagatctgccagcaggtggaggtgaacacagccatgcatgaggccaagctgatggaggagtgtgatgagctggtggagatcatccagcagaggaagcagatgattgctgtgaagatcaaggagaccaaggtgatgaagctgaggaagctggcccagcaggtggccaactgccggcagtgcctggagaggagcacagtgctgatcaaccaggccgagcacatcctgaaggaaaatgaccaggcccgcttcctgcagagcgccaagaacattgctgagcgggtggccatggccacagccagcagccaggtgctgatcccagacatcaacttcaatgatgcctttgagaactttgccctggacttcagccgggagaagaagctgctggagggcctggactacctgacagcccccaacccccccagcatccgggaggagctgtgcacagccagccatgacaccatcaccgtgcactggatcagtgatgatgagttcagcatcagcagctatgagctgcagtacaccatcttcaccggccaggccaacttcatcagcaagtcctggtgctcctggggcctgtggccagagatcaggaagtgcaaggaggccgtgtcctgcagccggctggccggggccccccggggcctgtacaacagcgtggacagctggatgattgtgcccaacatcaagcagaaccactacacagtgcacggcctgcagagcggcacccgctacatcttcatcgtgaaggccatcaaccaggccggcagcaggaacagcgagcccacccggctgaagaccaacagccagcccttcaagctggaccccaagatgacccacaagaagctgaagatcagcaatgatggcctgcagatggagaaggatgagagcagcctgaagaagagccacaccccagagcgcttctctggaacaggctgctacggggctgctggcaacatcttcatcgacagcggctgccactactgggaggtggtgatgggcagcagcacctggtacgccatcggcatcgcctacaagagcgcccccaagaatgagtggattggcaagaatgccagctcctgggtgttcagccgctgcaacagcaactttgtggtgcgccacaacaacaaggagatgctggtggatgtgcccccccacctgaagaggctgggcgtgctgctggactatgacaacaacatgctgtccttctatgaccctgccaacagcctgcacctgcacacctttgatgtgaccttcatcctgcctgtgtgccccaccttcaccatctggaacaagagcctgatgatcctgagcggcctgcctgccccagacttcatcgactacccagagcggcaggagtgcaactgccggccccaggagagcccctacgtgtctggcatgaagacctgccactag

SEQ ID NO: 159805 - DNA, 2118 bp, synthetic construct
  misc_feature 1..2118: note = Description of Artificial Sequence: Synthetic coding sequence
  source 1..2118: mol_type = other DNA
atgggagagagccctgcctctgtggtgctgaatgccagcggcggcctcttcagcctgaagatggagaccctggagagcgagctgacctgccccatctgcctggagctgtttgaggaccccctgctgctgccctgtgcccacagcctgtgcttcagctgtgcccaccgcatcctggtgagcagctgcagcagcggggagagcattgagcccatcacagccttccagtgccccacctgccgctacgtgatcagcctgaaccaccggggcctggatggcctgaagagaaatgtgaccctgcagaacatcatcgaccgcttccagaaggcctctgtgtctggccccaacagccccagcgagagcagaagagagaggacctaccggcccaccacagccatgagcagcgagagaattgcctgccagttctgtgagcaggaccccccaagagatgctgtgaagacctgcatcacctgtgaggtgtcctactgtgaccgctgcctgcgggccacccaccccaacaagaagcccttcaccagccaccggctggtggagcctgtgcctgacacccacctgcggggcatcacctgcctggaccatgaaaatgagaaggtgaacatgtactgtgtgtctgatgaccagctgatctgtgccctgtgcaagctggtgggccgccaccgggaccaccaggtggccagcctgaatgacagatttgagaagctgaagcagaccctggagatgaacctgaccaacctggtgaagagaaattctgagctggagaaccagatggccaagctgatccagatctgccagcaggtggaggtgaacacagccatgcatgaggccaagctgatggaggagtgtgatgagctggtggagatcatccagcagaggaagcagatgattgctgtgaagatcaaggagaccaaggtgatgaagctgaggaagctggcccagcaggtggccaactgccggcagtgcctggagaggagcacagtgctgatcaaccaggccgagcacatcctgaaggaaaatgaccaggcccgcttcctgcagagcgccaagaacattgctgagcgggtggccatggccacagccagcagccaggtgctgatcccagacatcaacttcaatgatgcctttgagaactttgccctggacttcagccgggagaagaagctgctggagggcctggactacctgacagcccccaacccccccagcatccgggaggagctgtgcacagccagccatgacaccatcaccgtgcactggatcagtgatgatgagttcagcatcagcagctatgagctgcagtacaccatcttcaccggccaggccaacttcatcagcctgtacaacagcgtggacagctggatgattgtgcccaacatcaagcagaaccactacacagtgcacggcctgcagagcggcacccgctacatcttcatcgtgaaggccatcaaccaggccggcagcaggaacagcgagcccacccggctgaagaccaacagccagcccttcaagctggaccccaagatgacccacaagaagctgaagatcagcaatgatggcctgcagatggagaaggatgagagcagcctgaagaagagccacaccccagagcgcttctctggaacaggctgctacggggctgctggcaacatcttcatcgacagcggctgccactactgggaggtggtgatgggcagcagcacctggtacgccatcggcatcgcctacaagagcgcccccaagaatgagtggattggcaagaatgccagctcctgggtgttcagccgctgcaacagcaactttgtggtgcgccacaacaacaaggagatgctggtggatgtgcccccccacctgaagaggctgggcgtgctgctggactatgacaacaacatgctgtccttctatgaccctgccaacagcctgcacctgcacacctttgatgtgaccttcatcctgcctgtgtgccccaccttcaccatctggaacaagagcctgatgatcctgagcggcctgcctgccccagacttcatcgactacccagagcggcaggagtgcaactgccggccccaggagagcccctacgtgtctggcatgaagacctgccactag

SEQ ID NO: 159806 - DNA, 660 bp, synthetic construct
  misc_feature 1..660: note = Description of Artificial Sequence: Synthetic coding sequence
  source 1..660: mol_type = other DNA
atggagaccctggagagcgagctgacctgccccatctgcctggagctgtttgaggaccccctgctgctgccctgtgcccacagcctgtgcttcagctgtgcccaccgcatcctggtgagcagctgcagcagcggggagagcattgagcccatcacagccttccagtgccccacctgccgctacgtgatcagcctgaaccaccggggcctggatggcctgaagagaaatgtgaccctgcagaacatcatcgaccgcttccagaaggcctctgtgtctggccccaacagccccagcgagagcagaagagagaggacctaccggcccaccacagccatgagcagcgagagaattgcctgccagttctgtgagcaggaccccccaagagatgctgtgaagacctgcatcacctgtgaggtgtcctactgtgaccgctgcctgcgggccacccaccccaacaagaagcccttcaccagccaccggctggtggagcctgtgcctgacacccacctgcggggcatcacctgcctggaccatgaaaatgagaaggtgaacatgtactgtgtgtctgatgaccagctgatctgtgccctgtgcaagctggtgggccgccaccgggaccaccaggtggccagcctgaatgacagatttgagaagctgtag

SEQ ID NO: 159807 - DNA, 1407 bp, synthetic construct
  misc_feature 1..1407: note = Description of Artificial Sequence: Synthetic coding sequence
  source 1..1407: mol_type = other DNA
atggagccccagcctggaggagcccggagctgccggcggggggcccctgggggcgcctgtgagctgggccctgctgctgaggccgcccccatgagcctggccatccacagcaccaccggcaccaggtatgacctggccgtgcccccagatgagaccgtggagggcctgaggaagaggctgagccagaggctgaaggtgcccaaggagcggctggccctgctgcacaaggacacccggctgagcagcggcaagctgcaggagtttggagtgggagatggcagcaagctgaccctggtgcccaccgtggaggccggcctgatgagccaggccagcaggcctgagcagagcgtgatgcaggccctggagagcctgacagagacccaggtgtctgacttcctgagcggccgcagccccctgaccctggccctgcgggtgggggaccacatgatgtttgtgcagctgcagctggccgcccagcacgcccccctgcagcacagacatgtgctggccgctgctgctgctgctgctgctgcccggggggaccccagcatcgccagccctgtgagcagcccctgcaggcctgtgtcctctgctgcccgggtgccccctgtgcccaccagccccagccctgccagccccagccccatcacagctggcagcttccgcagccatgctgccagcaccacctgcccagagcagatggactgcagccccacagccagcagcagcgccagccctggggccagcaccaccagcacccctggggccagccctgcccccaggagcaggaagccaggagctgtgattgagagctttgtgaaccacgcccctggggtcttcagcggcaccttcagcggcaccctgcaccccaactgccaggacagcagcggccggccccggcgggacatcggcaccatcctgcagatcctgaatgacctgctgagcgccaccaggcactaccagggcatgccacccagcctggcccagctgcgctgccacgcccagtgcagccctgccagccctgccccagacctggcccccaggaccaccagctgtgagaagctgacagctgcccccagcgccagcctgctgcagggccagagccagatccgcatgtgcaagcccccaggggaccggctgcggcagacagagaacagagccacccgctgcaaggtggagcggctgcagctgctgctgcagcagaagaggctgcggaggaaggccaggagagatgcccggggcccctaccactggagccccagcaggaaggccggccgcagtgacagcagcagcagcggcggcggcggcagccccagcgaggccagcggcctgggcctggactttgaagattctgtgtggaagccagaggtgaacccagacatcaagtcagaatttgtggtggcctag

SEQ ID NO: 159808 - DNA, 771 bp, synthetic construct
  misc_feature 1..771: note = Description of Artificial Sequence: Synthetic coding sequence
  source 1..771: mol_type = other DNA
atgggagagcccagccgggaggagtacaagatccagagctttgatgctgagacccagcagctgctgaagacagccctgaaggtggcctgctttgaaacagaagatggagagtacagcgtgtgccagaggagctacagcaactgcagccggctgatgcccagccgctgcaacacccagtacagagatcctggagctgtggacctggagaaggtggccaacgtgattgtggaccacagcctgcaggactgtgtgttcagcaaggaggccggccgcatgtgctacgccatcatccaggccgagagcaagcaggccggccagagcgtcttccggcggggcctgctgaaccggctgcagcaggagtaccaggcccgggagcagctgcgggcccggagcctgcagggctgggtgtgctacgtgaccttcatctgcaacatctttgactacctgcgggtgaacaacatgcccatgatggccctggtgaaccctgtgtatgactgcctcttccggctggcccagcctgacagcctgagcaaggaggaggaggtggactgcctggtgctgcagctgcaccgggtgggggagcagctggagaagatgaatggccagaggatggatgagctgtttgtgctgatcagagatggcttcctgctgcccaccggcctgagcagcctggcccagctgctgctgctggagatcatcgagttccgggccgccggctggaagaccaccccagctgcccacaagtactactacagcgaggtgtctgactag

SEQ ID NO: 159809 - DNA, 669 bp, synthetic construct
  misc_feature 1..669: note = Description of Artificial Sequence: Synthetic coding sequence
  source 1..669: mol_type = other DNA
atgggagagcccagccgggaggagtacaagatccagagctttgatgctgagacccagcagctgctgaagacagccctgaaggaccctggagctgtggacctggagaaggtggccaacgtgattgtggaccacagcctgcaggactgtgtgttcagcaaggaggccggccgcatgtgctacgccatcatccaggccgagagcaagcaggccggccagagcgtcttccggcggggcctgctgaaccggctgcagcaggagtaccaggcccgggagcagctgcgggcccggagcctgcagggctgggtgtgctacgtgaccttcatctgcaacatctttgactacctgcgggtgaacaacatgcccatgatggccctggtgaaccctgtgtatgactgcctcttccggctggcccagcctgacagcctgagcaaggaggaggaggtggactgcctggtgctgcagctgcaccgggtgggggagcagctggagaagatgaatggccagaggatggatgagctgtttgtgctgatcagagatggcttcctgctgcccaccggcctgagcagcctggcccagctgctgctgctggagatcatcgagttccgggccgccggctggaagaccaccccagctgcccacaagtactactacagcgaggtgtctgactag

SEQ ID NO: 159810 - DNA, 792 bp, synthetic construct
  misc_feature 1..792: note = Description of Artificial Sequence: Synthetic coding sequence
  source 1..792: mol_type = other DNA
atgggagagcccagccgggaggagtacaagatccagagctttgatgctgagacccagcagctgctgaagacagccctgaaggcccccagcctggagtgcaccgtggcctgctttgaaacagaagatggagagtacagcgtgtgccagaggagctacagcaactgcagccggctgatgcccagccgctgcaacacccagtacagagaccccggggctgtggacctggagaaggtggccaacgtcatcgtggaccacagcctgcaggactgtgtgttcagcaaggaggccggccgcatgtgctacgccatcatccaggccgagagcaagcaggccggccagagcgtcttcagaagaggcctgctgaaccggctgcagcaggagtaccaggcccgggagcagctgcgggcccggagcctgcagggctgggtgtgctacgtgaccttcatctgcaacatctttgactacctgcgggtgaacaacatgcccatgatggccctggtgaaccctgtgtatgactgcctcttccggctggcccagcctgacagcctgagcaaggaggaggaggtggactgcctggtgctgcagctgcaccgggtgggggagcagctggagaagatgaatggccagaggatggatgagctgtttgtgctgatcagagatggcttcctgctgcccaccggcctgagcagcctggcccagctgctgctgctggagatcatcgagttccgggctgctggctggaagaccaccccagctgcccacaagtactactacagcgaggtgtctgactag

SEQ ID NO: 159811 - DNA, 1164 bp, synthetic construct
  misc_feature 1..1164: note = Description of Artificial Sequence: Synthetic coding sequence
  source 1..1164: mol_type = other DNA
atgccccggccccggctgctggccgccctgtgtggggccctgctgtgtgcccccagcctgctggtggccctggacatctgcagcaagaacccctgccacaacggcggcctgtgtgaggagatcagccaggaggtgagaggagatgtgttccccagctacacctgcacctgcctgaagggctacgccggcaaccactgtgagaccaagtgtgtggagcccctgggcctggagaatggaaatattgccaacagccagattgctgccagctctgtgcgggtgaccttcctgggcctgcagcactgggtgcctgagctggcccggctgaacagagctggcatggtgaatgcctggacccccagcagcaatgatgacaacccctggatccaggtgaacctgctgcggaggatgtgggtgactggagtggtgacccagggcgccagccggctggccagccatgagtacctgaaggccttcaaggtggcctacagcctgaatggacatgaatttgacttcatccatgatgtgaacaagaagcacaaggagtttgtgggcaactggaacaagaatgctgtgcacgtgaacctgtttgagacccctgtggaggcccagtatgtgcggctgtaccccaccagctgccacacagcctgcaccctgcgctttgagctgctgggctgtgagctgaatggctgtgccaaccccctgggcctgaagaacaacagcatcccagacaagcagatcacagccagcagcagctacaagacctggggcctgcacctgttctcctggaaccccagctatgcccggctggacaagcagggcaacttcaatgcctgggtggccggcagctatggaaatgaccagtggctgcaggtggacctgggcagcagcaaggaggtgacaggcatcatcacccagggcgccaggaactttggatctgtgcagtttgtggccagctacaaggtggcctacagcaatgattctgccaactggacagagtaccaggaccccaggacaggcagcagcaagatcttccctggcaactgggacaaccacagccacaagaagaacctgtttgagacccccatcctggcccgctacgtgcgcatcctgcctgtggcctggcacaaccgcatcgccctgcggctggagctgctgggctgctag

SEQ ID NO: 159812 - DNA, 1140 bp, synthetic construct
  misc_feature 1..1140: note = Description of Artificial Sequence: Synthetic coding sequence
  source 1..1140: mol_type = other DNA
atgtggcccttccctgagggcggcaacaccatccccatcctgcacacagacatctgcagcaagaacccctgccacaacggcggcctgtgtgaggagatcagccaggaggtgagaggagatgtgttccccagctacacctgcacctgcctgaagggctacgccggcaaccactgtgagaccaagtgtgtggagcccctgggcctggagaatggaaatattgccaacagccagattgctgccagctctgtgcgggtgaccttcctgggcctgcagcactgggtgcctgagctggcccggctgaacagagctggcatggtgaatgcctggacccccagcagcaatgatgacaacccctggatccaggtgaacctgctgcggaggatgtgggtgactggagtggtgacccagggcgccagccggctggccagccatgagtacctgaaggccttcaaggtggcctacagcctgaatggacatgaatttgacttcatccatgatgtgaacaagaagcacaaggagtttgtgggcaactggaacaagaatgctgtgcacgtgaacctgtttgagacccctgtggaggcccagtatgtgcggctgtaccccaccagctgccacacagcctgcaccctgcgctttgagctgctgggctgtgagctgaatggctgtgccaaccccctgggcctgaagaacaacagcatcccagacaagcagatcacagccagcagcagctacaagacctggggcctgcacctgttctcctggaaccccagctatgcccggctggacaagcagggcaacttcaatgcctgggtggccggcagctatggaaatgaccagtggctgcaggtggacctgggcagcagcaaggaggtgacaggcatcatcacccagggcgccaggaactttggatctgtgcagtttgtggccagctacaaggtggcctacagcaatgattctgccaactggacagagtaccaggaccccaggacaggcagcagcaagatcttccctggcaactgggacaaccacagccacaagaagaacctgtttgagacccccatcctggcccgctacgtgcgcatcctgcctgtggcctggcacaaccgcatcgccctgcggctggagctgctgggctgctag

SEQ ID NO: 159813 - DNA, 1008 bp, synthetic construct
  misc_feature 1..1008: note = Description of Artificial Sequence: Synthetic coding sequence
  source 1..1008: mol_type = other DNA
atgccccggccccggctgctggccgccctgtgtggggccctgctgtgtgcccccagcctgctggtggccctggacatctgcagcaagaacccctgccacaacggcggcctgtgtgaggagatcagccaggaggtgagaggagatgtgttccccagctacacctgcacctgcctgaagggctacgccggcaaccactgtgagaccaagtgtgtggagcccctgggcctggagaatggaaatattgccaacagccagattgctgccagctctgtgcgggtgaccttcctgggcctgcagcactgggtgcctgagctggcccggctgaacagagctggcatggtgaatgcctggacccccagcagcaatgatgacaacccctggatccaggtgaacctgctgcggaggatgtgggtgactggagtggtgacccagggcgccagccggctggccagccatgagtacctgaaggccttcaaggtggcctacagcctgaatggacatgaatttgacttcatccatgatgtgaacaagaagcacaaggagtttgtgggcaactggaacaagaatgctgtgcacgtgaacctgtttgagacccctgtggaggcccagtatgtgcggctgtaccccaccagctgccacacagcctgcaccctgcgctttgagctgctgggctgtgagctgaatggctgtgccaaccccctgggcctgaagaacaacagcatcccagacaagcagatcacagccagcagcagctacaagacctggggcctgcacctgttctcctggaaccccagctatgcccggctggacaagcagggcaacttcaatgcctgggtggccggcagctatggaaatgaccagtggctgcagatcttccctggcaactgggacaaccacagccacaagaagaacctgtttgagacccccatcctggcccgctacgtgcgcatcctgcctgtggcctggcacaaccgcatcgccctgcggctggagctgctgggctgctag

SEQ ID NO: 159814 - DNA, 1929 bp, synthetic construct
  misc_feature 1..1929: note = Description of Artificial Sequence: Synthetic coding sequence
  source 1..1929: mol_type = other DNA
atgccctgtggggaggactggctgagccaccccctgggcatcgtgcagggcttctttgcccagaatggagtgaacccagactgggagaagaaggtgattgagtacttcaaggagaagctgaaggagaacaatgcccccaagtgggtgcccagcctgaatgaggtgcccctgcactacctgaagcccaacagctttgtgaagttccgctgcatgatccaggacatgtttgatcctgagttctacatgggcgtgtatgaaacagtgaaccagaacaccaaggcccacgtgctgcactttgggaagtacagagatgtggctgaatgtggcccccagcaggagctggacctgaacagccccaggaacaccaccctggagcggcagaccttctactgtgtgcctgtgcctggagagagcacctgggtgaaggaggcctacgtgaatgccaaccaggcccgggtgagccccagcaccagctacacccccagccgccacaagaggagctatgaagatgatgatgacatggacctgcagcccaacaagcagaaggaccagcacgccggggcccggcaggccggctctgtgggcggcctgcagtggtgtggggagcccaagaggctggagacagaggccagcacaggccagcagctgaacagcctgaacctgagcagcccctttgacctgaacttccccctgcccggggagaagggccctgcctgcctggtgaaggtgtatgaggactgggactgcttcaaggtgaatgacatcctggagctgtatggcatcctgtctgtggaccctgtgctgagcatcctgaacaatgatgaaagagatgccagcgccctgctggaccccatggagtgcacagacacagctgaggagcagagggtgcacagccccccagccagcctggtgccccgcatccacgtgatcctggcccagaagctgcagcacatcaaccccctgctgcctgcctgcctgaacaaggaggagagcaagacctgcaagtttgtgtcctccttcatgtctgagctgagccctgtgcgggcagagctgctgggcttcctgacccacgccctgctgggggacagcctggccgctgagtacctgatcctgcacctgatcagcacagtgtacaccaggagagatgtgctgcccctgggcaagttcaccgtgaacctgagcggctgccccaggaacagcaccttcacagagcacctgtaccgcatcatccagcacctggtgcctgccagcttccggctgcagatgaccatcgagaacatgaaccacctgaagttcatcccccacaaggactacacagccaaccggctggtgtctggcctgctgcagctgcccagcaacaccagcctggtgattgatgagaccctgctggagcagggccagctggacaccccaggagtgcacaacgtgacagccctgagcaacctgatcacctggcagaaggtggactatgacttctcctaccaccagatggagttcccctgcaacatcaacgtgttcatcaccagcgagggccgcagcctgctgcctgctgactgccagatccacctgcagccccagctgatcccccccaacatggaggagtacatgaacagcctgctgtctgctgtgctgcccagcgtgctgaacaagttccgcatctacctgaccctgctgcgcttcctggagtacagcatcagtgatgagatcaccaaggctgtggaggatgactttgtggagatgaggaagaatgacccccagagcatcacagcagatgacctgcaccagctgctggtggtggcccgctgcctgagcctgtctgctggccagaccaccctgagccgggagcgctggctgcgggccaagcagctggagagcctgcggaggacccggctgcagcagcagaagtgtgtgaatggaaatgagctgtag

SEQ ID NO: 159815 - DNA, 1923 bp, synthetic construct
  misc_feature 1..1923: note = Description of Artificial Sequence: Synthetic coding sequence
  source 1..1923: mol_type = other DNA
atgccctgtggggaggactggctgagccaccccctgggcatcgtgcagggcttctttgcccagaatggagtgaacccagactgggagaagaaggtgattgagtacttcaaggagaagctgaaggagaacaatgcccccaagtgggtgcccagcctgaatgaggtgcccctgcactacctgaagcccaacagctttgtgaagttccgctgcatgatccaggacatgtttgatcctgagttctacatgggcgtgtatgaaacagtgaaccagaacaccaaggcccacgtgctgcactttgggaagtacagagatgtggctgaatgtggcccccagcaggagctggacctgaacagccccaggaacaccaccctggagcggcagaccttctactgtgtgcctgtgcctggagagagcacctgggtgaaggaggcctacgtgaatgccaaccaggcccgggtgagccccagcaccagctacacccccagccgccacaagaggagctatgaagatgatgatgacatggacctgcagcccaacaagcagaaggaccagcacgccggggcccggcaggccggctctgtgggcggcctgcagtggtgtggggagcccaagaggctggagacagaggccagcacaggccagcagctgaacagcctgaacctgagcagcccctttgacctgaacttccccctgcccggggagaagggccctgcctgcctggtgaaggtgtatgaggactgggactgcttcaaggtgaatgacatcctggagctgtatggcatcctgtctgtggaccctgtgctgagcatcctgaacaatgatgaaagagatgccagcgccctgctggaccccatggagtgcacagacacagctgaggagcagagggtgcacagccccccagccagcctggtgccccgcatccacgtgatcctggcccagaagctgcagcacatcaaccccctgctgcctgcctgcctgaacaaggaggagagcaagacctttgtgtcctccttcatgtctgagctgagccctgtgcgggcagagctgctgggcttcctgacccacgccctgctgggggacagcctggccgctgagtacctgatcctgcacctgatcagcacagtgtacaccaggagagatgtgctgcccctgggcaagttcaccgtgaacctgagcggctgccccaggaacagcaccttcacagagcacctgtaccgcatcatccagcacctggtgcctgccagcttccggctgcagatgaccatcgagaacatgaaccacctgaagttcatcccccacaaggactacacagccaaccggctggtgtctggcctgctgcagctgcccagcaacaccagcctggtgattgatgagaccctgctggagcagggccagctggacaccccaggagtgcacaacgtgacagccctgagcaacctgatcacctggcagaaggtggactatgacttctcctaccaccagatggagttcccctgcaacatcaacgtgttcatcaccagcgagggccgcagcctgctgcctgctgactgccagatccacctgcagccccagctgatcccccccaacatggaggagtacatgaacagcctgctgtctgctgtgctgcccagcgtgctgaacaagttccgcatctacctgaccctgctgcgcttcctggagtacagcatcagtgatgagatcaccaaggctgtggaggatgactttgtggagatgaggaagaatgacccccagagcatcacagcagatgacctgcaccagctgctggtggtggcccgctgcctgagcctgtctgctggccagaccaccctgagccgggagcgctggctgcgggccaagcagctggagagcctgcggaggacccggctgcagcagcagaagtgtgtgaatggaaatgagctgtag

SEQ ID NO: 159816 - DNA, 2628 bp, synthetic construct
  misc_feature 1..2628: note = Description of Artificial Sequence: Synthetic coding sequence
  source 1..2628: mol_type = other DNA
atggatgaggaggaggacaacctgagcctgctgacagccctgctggaggagaatgaaagtgccctggactgcaacagcgaggagaacaacttcctgaccagagaaaatggagagccagatgcctttgatgagctgtttgatgctgatggagatggagagagctacacagaggaggctgatgatggagagaccggggagaccagagatgagaaggagaacctggccaccctgtttggagacatggaggacctgacagatgaggaggaggtgcctgccagccagagcacagaaaatagagtgctgcctgccccagccccccggcgggagaagaccaatgaggagctgcaggaggagctgaggaacctgcaggagcagatgaaggccctgcaggagcagctgaaggtgaccaccatcaagcagacagccagccctgcccggctgcagaagagccctgtggagaagagcccccggccccccctgaaggagaggagagtgcagaggatccaggagagcacctgcttctctgctgagctggatgtgcctgccctgcccaggaccaagagggtggcccggacccccaaggccagccccccagaccccaagagcagcagcagcaggatgaccagcgcccccagccagcccctgcagaccatcagcaggaacaagcccagcggcatcacccggggccagatcgtgggcaccccaggcagcagcggggagaccacccagcccatctgtgtggaggccttcagcggcctgcggctgcggcggccccgggtgagcagcacagagatgaacaagaagatgacaggcaggaagctgatccggctgagccagatcaaggagaagatggcccgggagaagctggaggagattgactgggtgacctttggagtcatcctgaagaaggtgaccccccagagcgtgaacagcggcaagaccttcagcatctggaagctgaatgacctgcgggacctgacccagtgtgtgtccctcttcctgtttggagaggtgcacaaggccctgtggaagacagagcagggcaccgtggtgggcatcctgaatgccaaccccatgaagcccaaggatggcagcgaggaggtgtgcctgagcattgaccacccccagaaggtgctgatcatgggagaggccctggacctgggcacctgcaaggccaagaagaagaatggagagccctgcacccagacagtgaacctgcgggactgtgagtactgccagtaccacgtgcaggcccagtacaagaagctgagcgccaagagagctgacctgcagagcaccttcagcggcggccgcatccccaagaagtttgcccggcggggcaccagcctgaaggagcggctgtgccaggacggcttctactatggaggagtgagcagcgccagctatgctgccagcattgctgctgctgtggcccccaagaagaagatccagaccaccctgagcaacctggtggtgaagggcaccaacctgatcatccaggagacccggcagaagctgggcatcccccagaagagcctgagctgcagcgaggagttcaaggagctgatggacctgcccacctgtggggccaggaacctgaagcagcacctggccaaggccacagccagcggcatcatgggcagccccaagccagccatcaagagcatcagcgccagcgccctgctgaagcagcagaagcagaggatgctggagatgagaagaaggaagtctgaggagatccagaagcgcttcctgcagagcagcagcgaggtggagagccctgctgtgcccagcagcagccggcagcccccagcccagccccccaggacaggcagcgagttcccccggctggagggcgccccagccaccatgacccccaagctgggccggggcgtgctggagggagatgatgtgctcttctatgatgagagccccccaccccggcccaagctgagcgccctggccgaggccaagaagctggccgccatcaccaagctgcgggccaagggccaggtgctgaccaagaccaaccccaacagcatcaagaagaagcagaaggacccccaggacatcctggaggtgaaggagcgggtggagaagaacaccatgttcagcagccaggctgaagatgagctggagcccgccaggaagaagagaagagagcagctggcctacctggagagcgaggagttccagaagatcctgaaggccaagagcaagcacacaggcatcctgaaggaggccgaggccgagatgcaggagcgctactttgagcccctggtgaagaaggagcagatggaggagaagatgaggaacatccgggaggtgaagtgccgggtggtgacctgcaagacctgtgcctacacccacttcaagctgctggagacctgtgtgtctgagcagcacgagtaccactggcatgatggagtgaagcgcttcttcaagtgcccctgtggcaacagaagcatcagcctggaccggctgcccaacaagcactgcagcaactgtggcctgtacaagtgggagagagatggcatgctgaaggagaagacaggccccaagattggaggagagaccctgctgcccagaggagaggagcacgccaagttcctgaacagcctgaagtag

SEQ ID NO: 159817 - DNA, 2568 bp, synthetic construct
  misc_feature 1..2568: note = Description of Artificial Sequence: Synthetic coding sequence
  source 1..2568: mol_type = other DNA
atggatgaggaggaggacaacctgagcctgctgacagccctgctggaggagaatgaaagtgccctggactgcaacagcgaggagaacaacttcctgaccagagaaaatggagagccagatgcctttgatgagctgtttgatgctgatggagatggagagagctacacagaggaggctgatgatggagagaccggggagaccagagatgagaaggagaacctggccaccctgtttggagacatggaggacctgacagatgaggaggaggtgcctgccagccagagcacagaaaatagagtgctgcctgccccagccccccggcgggagaagaccaatgaggagctgcaggaggagctgaggaacctgcaggagcagatgaaggccctgcaggagcagctgaaggtgaccaccatcaagcagacagccagccctgcccggctgcagaagagccctgagaagagccccaggcctcccctgaaggagcggcgggtgcagaggatccaggagagcacctgcttctctgctgagctggatgtgcctgccctgcccaggaccaagagggtggcccggacccccaaggccagccccccagaccccaagagcagcagcagcaggatgaccagcgcccccagccagcccctgcagaccatcagcaggaacaagcccagcggcatcacccggggccagatcgtgggcaccccaggcagcagtggagagaccacccagcccatctgtgtggaggccttcagcggcctgcggctgcggcggccccgggtgagcagcacagagatgaacaagaagatgactggaaggaagctgatccggctgagccagatcaaggagaagatggcccgggagaagctggaggagattgactgggtgaccttcggggtcatcctgaagaaggtgaccccccagagcgtgaacagcggcaagaccttcagcatctggaagctgaatgacctgcgggacctgacccagtgtgtgtccctcttcctgtttggagaggtgcacaaggccctgtggaagacagagcagggcaccgtggtgggcatcctgaatgccaaccccatgaagcccaaggatggcagcgaggaggtgtgcctgagcattgaccacccccagaaggtgctgatcatgggagaggccctggacctgggcacctgcaaggccaagaagaagaatggagagccctgcacccagacagtgaacctgcgggactgtgagtactgccagtaccacgtgcaggcccagtacaagaagctgagcgccaagagagctgacctgcagagcaccttcagcggcggccgcatccccaagaagtttgcccggcggggcaccagcctgaaggagcggctgtgccaggacggcttctactacggcggcgtgtcctctgccagctatgctgccagcattgctgctgctgtggcccccaagaagaagatccagaccaccctgagcaacctggtggtgaagggcaccaacctgatcatccaggagacccggcagaagctgggcatcccccagaagagcctgagctgcagcgaggagttcaaggagctgatggacctgcccacctgtggggccaggaacctgaagcagcacctggccaaggccacagccagcggcatcatgggcagccccaagccagccatcaagagcatcagcgccagcgccctgctgaagcagcagaagcagaggatgctggagatgagaagaaggaagtctgaggagatccagaagcgcttcctgcagagcagcagcgaggtggagagccctgctgtgcccagcagcagccggcagcccccagcccagccccccaggactggaagtgagttcccccggctggagggcgccccagccaccatgacccccaagctgggccggggcgtgctggagggagatgatgtgctcttctatgatgagagccccccaccccggcccaagctgagcgccctggccgaggccaagaagctggccgccatcaccaagctgcgggccaagggccaggtgctgaccaagaccaaccccaacagcatcaagaagaagcagaaggacccccaggacatcctggaggtgaaggagcgggtggagaagaacaccatgttcagcagccaggccgaggatgagctggagcccgccaggaagaagaggcgggagcagctggcctacctggagagcgaggagttccagaagatcctgaaggccaagagcaagcacacaggcatcctgaaggaggccgaggccgagatgcaggagcgctactttgagcccctggtgaagaaggagcagatggaggagaagatgaggaacatccgggaggtgaagtgccgggtggtgacctgcaagacctgtgcctacacccacttcaagctgctggagacctgtgtgtctgagcagcacgagtaccactggcatgatggagtgaagcgcttcttcaagtgcccctgtggcaacagaagcatcagcctggaccggctgcccaacaagcactgcagcaactgtggcctgtacaagtgggagagagatggcatgctgaaggtgtgccacctgcggaccaacttctag

SEQ ID NO: 159818 - DNA, 2625 bp, synthetic construct
  misc_feature 1..2625: note = Description of Artificial Sequence: Synthetic coding sequence
  source 1..2625: mol_type = other DNA
atggatgaggaggaggacaacctgagcctgctgacagccctgctggaggagaatgaaagtgccctggactgcaacagcgaggagaacaacttcctgaccagagaaaatggagagccagatgcctttgatgagctgtttgatgctgatggagatggagagagctacacagaggaggctgatgatggagagaccggggagaccagagatgagaaggagaacctggccaccctgtttggagacatggaggacctgacagatgaggaggaggtgcctgccagccagagcacagaaaatagagtgctgcctgccccagccccccggcgggagaagaccaatgaggagctgcaggaggagctgaggaacctgcaggagcagatgaaggccctgcaggagcagctgaaggtgaccaccatcaagcagacagccagccctgcccggctgcagaagagccctgagaagagccccaggcctcccctgaaggagcggcgggtgcagaggatccaggagagcacctgcttctctgctgagctggatgtgcctgccctgcccaggaccaagagggtggcccggacccccaaggccagccccccagaccccaagagcagcagcagcaggatgaccagcgcccccagccagcccctgcagaccatcagcaggaacaagcccagcggcatcacccggggccagatcgtgggcaccccaggcagcagtggagagaccacccagcccatctgtgtggaggccttcagcggcctgcggctgcggcggccccgggtgagcagcacagagatgaacaagaagatgactggaaggaagctgatccggctgagccagatcaaggagaagatggcccgggagaagctggaggagattgactgggtgaccttcggggtcatcctgaagaaggtgaccccccagagcgtgaacagcggcaagaccttcagcatctggaagctgaatgacctgcgggacctgacccagtgtgtgtccctcttcctgtttggagaggtgcacaaggccctgtggaagacagagcagggcaccgtggtgggcatcctgaatgccaaccccatgaagcccaaggatggcagcgaggaggtgtgcctgagcattgaccacccccagaaggtgctgatcatgggagaggccctggacctgggcacctgcaaggccaagaagaagaatggagagccctgcacccagacagtgaacctgcgggactgtgagtactgccagtaccacgtgcaggcccagtacaagaagctgagcgccaagagagctgacctgcagagcaccttcagcggcggccgcatccccaagaagtttgcccggcggggcaccagcctgaaggagcggctgtgccaggacggcttctactacggcggcgtgtcctctgccagctatgctgccagcattgctgctgctgtggcccccaagaagaagatccagaccaccctgagcaacctggtggtgaagggcaccaacctgatcatccaggagacccggcagaagctgggcatcccccagaagagcctgagctgcagcgaggagttcaaggagctgatggacctgcccacctgtggggccaggaacctgaagcagcacctggccaaggccacagccagcggcatcatgggcagccccaagccagccatcaagagcatcagcgccagcgccctgctgaagcagcagaagcagaggatgctggagatgagaagaaggaagtctgaggagatccagaagcgcttcctgcagagcagcagcgaggtggagagccctgctgtgcccagcagcagccggcagcccccagcccagccccccaggactggaagtgagttcccccggctggagggcgccccagccaccatgacccccaagctgggccggggcgtgctggagggagatgatgtgctcttctatgatgagagccccccaccccggcccaagctgagcgccctggccgaggccaagaagctggccgccatcaccaagctgcgggccaagggccaggtgctgaccaagaccaaccccaacagcatcaagaagaagcagaaggacccccaggacatcctggaggtgaaggagcgggtggagaagaacaccatgttcagcagccaggccgaggatgagctggagcccgccaggaagaagaggcgggagcagctggcctacctggagagcgaggagttccagaagatcctgaaggccaagagcaagcacacaggcatcctgaaggaggccgaggccgagatgcaggagcgctactttgagcccctggtgaagaaggagcagatggaggagaagatgaggaacatccgggaggtgaagtgccgggtggtgacctgcaagacctgtgcctacacccacttcaagctgctggagacctgtgtgtctgagcagcacgagtaccactggcatgatggagtgaagcgcttcttcaagtgcccctgtggcaacagaagcatcagcctggaccggctgcccaacaagcactgcagcaactgtggcctgtacaagtgggagagagatggcatgctgaaggagaagacaggccccaagattggaggagagaccctgctgcccagaggagaggagcacgccaagttcctgaacagcctgaagtag

SEQ ID NO: 159819 - DNA, 2628 bp, synthetic construct; identical to SEQ ID NO: 159816
  misc_feature 1..2628: note = Description of Artificial Sequence: Synthetic coding sequence
  source 1..2628: mol_type = other DNA

SEQ ID NO: 159820 - DNA, 2466 bp, synthetic construct
  misc_feature 1..2466: note = Description of Artificial Sequence: Synthetic coding sequence
  source 1..2466: mol_type = other DNA
atggacctggccgctgctgctgagcctggagctggcagccagcacctggaggtgagagatgaggtggccgagaagtgccagaagctgttcctggacttcctggaggagttccagagcagtgatggagagatcaagtacctgcagctggccgaggagctgatccggcctgagaggaacaccctggtggtgtcctttgtggacctggagcagttcaaccagcagctgagcaccaccatccaggaggagttctacagagtgtacccctacctgtgccgggccctgaagacctttgtgaaggacaggaaggagatccccctggccaaggacttctacgtggccttccaggacctgcccaccaggcacaagatccgggagctgaccagcagcagaattggcctgctgacccgcatcagcggccaggtggtgaggacccaccctgtgcaccctgagctggtgtctggcaccttcctgtgcctggactgccagaccgtcatcagagatgtggagcagcagttcaagtacacccagcccaacatctgcagaaatcctgtgtgtgccaacagaagacgcttcctgctggacaccaacaagagcagatttgtggacttccagaaggtgcgcatccaggagacccaggccgagctgccccggggcagcatccccaggagcctggaggtgatcctgcgggcagaggccgtggagagcgcccaggccggggacaagtgtgacttcaccggcaccctgattgtggtgcctgatgtgtccaagctgagcacccctggggcccgggcagagaccaacagccgggtgtctggagtggatggctatgaaacagagggcatccggggcctgcgggccctgggcgtgcgggacctgagctaccgcctggtgttcctggcctgctgcgtggcccccaccaaccccaggtttggaggcaaggagctgagagatgaggagcagacagctgagagcatcaagaaccagatgacagtgaaggagtgggagaaggtgtttgagatgagccaggacaagaacctgtaccacaacctgtgcaccagcctcttccccaccatccatggaaatgatgaggtgaagaggggcgtgctgctgatgctgtttggaggagtgcccaagaccaccggggagggcaccagcctgcggggggacatcaacgtgtgcatcgtgggggaccccagcacagccaagagccagttcctgaagcacgtggaggagttcagccccagggctgtgtacaccagcggcaaggccagcagcgctgctggcctgacagctgctgtggtgagagatgaggagagccatgaatttgtgattgaggccggggccctgatgctggccgacaacggggtgtgctgcattgatgaatttgacaagatggatgtgcgggaccaggtggccatccacgaggccatggagcagcagaccatcagcatcaccaaggccggcgtgaaggccaccctgaatgcccggaccagcatcctggccgccgccaaccccatcagcggccactatgacaggagcaagagcctgaagcagaacatcaacctgagcgcccccatcatgagcagatttgacctcttcttcatcctggtggatgaatgtaatgaggtgacagattatgccatcgcccggcgcatcgtggacctgcacagcagaattgaggagagcattgacagagtgtacagcctggatgacatccgccgctacctgctgtttgcccggcagttcaagcccaagatcagcaaggagagcgaggacttcatcgtggagcagtacaagcacctgcggcagagagatggcagcggcgtgaccaagagctcctggaggatcaccgtgcggcagctggagagcatgatccggctgtctgaggccatggccaggatgcactgctgtgatgaggtgcagcccaagcacgtgaaggaggccttccggctgctgaacaagagcatcatccgggtggagaccccagatgtgaacctggaccaggaggaggagatccagatggaggtggatgaaggagctgggggcatcaatggacatgctgacagccctgcccctgtgaatggcatcaatggctacaatgaagacatcaaccaggagagcgcccccaaggccagcctgcggctgggcttcagcgagtactgccgcatcagcaacctgattgtgctgcacctgaggaaggtggaggaggaggaggatgaaagtgccctgaagaggtctgagctggtgaactggtacctgaaggagattgagagcgagattgacagcgaggaggagctgatcaacaagaagaggatcatcgagaaggtgatccaccggctgacccactatgaccacgtgctgattgagctgacccaggccggcctgaagggcagcacagagggcagcgagagctatgaggaggacccctacctggtggtgaaccccaactacctgctggaggactag

SEQ ID NO: 159821 - DNA, 2160 bp, synthetic construct
  misc_feature 1..2160: note = Description of Artificial Sequence: Synthetic coding sequence
  source 1..2160: mol_type = other DNA
atggccctgaaggactatgccctggagaaggagaaggtgaagaagttcctgcaggagttctaccaggatgatgagctgggcaagaagcagttcaagtatggcaaccagctggtgcggctggcccaccgggagcaggtggccctgtatgtggacctggatgatgtggctgaagatgatcctgagctggtggacagcatctgtgaaaatgccaggagatatgccaagctgtttgctgatgctgtgcaggagctgctgccccagtacaaggagcgggaggtggtgaacaaggatgtgctggatgtgtacatcgagcaccggctgatgatggagcagaggagccgggaccccggcatggtgcgcagcccccagaaccagtacccagctgagctgatgagaagatttgagctgtacttccagggccccagcagcaacaagcccagggtcatccgggaggtgcgggctgacagcgtgggcaagctggtgacagtgcggggcatcgtgaccagggtgtctgaggtgaagcccaagatggtggtggccacctacacctgtgaccagtgtggggctgagacctaccagcccatccagagccccaccttcatgcccctcatcatgtgccccagccaggagtgccagaccaacagaagtggcggccgcctgtacctgcagacccggggcagccgcttcatcaagttccaggagatgaagatgcaggagcacagcgaccaggtgcctgtgggcaacatccccaggagcatcaccgtgctggtggagggggagaacacccgcatcgcccagcccggggaccacgtgtctgtgacaggcatcttcctgcccatcctgaggacaggcttccggcaggtggtgcagggcctgctgtctgagacctacctggaggcccacagaattgtgaagatgaacaagtcagaagatgatgagagcggggccggggagctgacccgggaggagctgcggcagattgctgaggaggacttctatgagaagctggccgccagcatcgcccctgagatctacggccatgaagatgtgaagaaggccctgctgctgctgctggtgggcggcgtggaccagagcccccggggcatgaagatccggggcaacatcaacatctgcctgatgggagaccccggggtggccaagagccagctgctgagctacatcgaccggctggcccccaggagccagtacaccaccggccggggcagcagcggcgtgggcctgacagctgctgtgctgcgggacagcgtgtctggagagctgaccctggagggcggggccctggtgctggccgaccagggcgtgtgctgcattgatgaatttgacaagatggccgaggccgacagaacagccatccacgaggtgatggagcagcagaccatcagcatcgccaaggccggcatcctgaccaccctgaatgcccgctgcagcatcctggccgccgccaacccagcctacggccgctacaacccccggcgcagcctggagcagaacatccagctgcctgctgccctgctgagcagatttgacctgctgtggctgatccaggacagaccagaccgggacaatgacctgcggctggcccagcacatcacctacgtgcaccagcacagccggcagccccccagccagtttgagcccctggacatgaagctgatgaggcgctacatcgccatgtgccgggagaagcagcccatggtgcctgagagcctggccgactacatcacagctgcctacgtggagatgagaagagaggcctgggccagcaaggatgccacctacaccagcgcccggaccctgctggccatcctgcggctgagcacagccctggcccggctgaggatggtggatgtggtggagaaggaggatgtgaatgaggccatccggctgatggagatgagcaaggacagcctgctgggggacaagggccagacagcccggacccagaggcctgcagatgtgatctttgccaccgtgcgggagctggtgtctgggggccgctctgtgcgcttcagcgaggccgagcagagatgtgtgtcccggggcttcaccccagcccagttccaggccgccctggatgaatatgaggagctgaatgtgtggcaggtgaatgccagcaggacccgcatcacctttgtgtag

SEQ ID NO: 159822 - DNA, 1170 bp, synthetic construct
  misc_feature 1..1170: note = Description of Artificial Sequence: Synthetic coding sequence
  source 1..1170: mol_type = other DNA
atggccctgaaggactatgccctggagaaggagaaggtgaagaagttcctgcaggagttctaccaggatgatgagctgggcaagaagcagttcaagtatggcaaccagctggtgcggctggcccaccgggagcaggtggccctgtatgtggacctggatgatgtggctgaagatgatcctgagctggtggacagcatctgtgaaaatgccaggagatatgccaagctgtttgctgatgctgtgcaggagctgctgccccagtacaaggagcgggaggtggtgaacaaggatgtgctggatgtgtacatcgagcaccggctgatgatggagcagaggagccgggaccccggcatggtgcgcagcccccagaaccagtacccagctgagctgatgagaagatttgagctgtacttccagggccccagcagcaacaagcccagggtcatccgggaggtgcgggctgacagcgtgggcaagctggtgacagtgcggggcatcgtgaccagggtgtctgaggtgaagcccaagatggtggtggccacctacacctgtgaccagtgtggggctgagacctaccagcccatccagagccccaccttcatgcccctcatcatgtgccccagccaggagtgccagaccaacagaagtggcggccgcctgtacctgcagacccggggcagccgcttcatcaagttccaggagatgaagatgcaggagcacagcgaccaggtgcctgtgggcaacatccccaggagcatcaccgtgctggtggagggggagaacacccgcatcgcccagcccggggaccacgtgtctgtgacaggcatcttcctgcccatcctgaggacaggcttccggcaggtggtgcagggcctgctgtctgagacctacctggaggcccacagaattgtgaagatgaacaagtcagaagatgatgagagcggggccggggagctgacccgggaggagctgcggcagattgctgatgtgatctttgccaccgtgcgggagctggtgtctgggggccgctctgtgcgcttcagcgaggccgagcagagatgtgtgtcccggggcttcaccccagcccagttccaggccgccctggatgaatatgaggagctgaatgtgtggcaggtgaatgccagcaggacccgcatcacctttgtgtag

SEQ ID NO: 159823 - DNA, 1632 bp, synthetic construct
  misc_feature 1..1632: note = Description of Artificial Sequence: Synthetic coding sequence
  source 1..1632: mol_type = other DNA
atggtggtggccacctacacctgtgaccagtgtggggctgagacctaccagcccatccagagccccaccttcatgcccctcatcatgtgccccagccaggagtgccagaccaacagaagtggcggccgcctgtacctgcagacccggggcagccgcttcatcaagttccaggagatgaagatgcaggagcacagcgaccaggtgcctgtgggcaacatccccaggagcatcaccgtgctggtggagggggagaacacccgcatcgcccagcccggggaccacgtgtctgtgacaggcatcttcctgcccatcctgaggacaggcttccggcaggtggtgcagggcctgctgtctgagacctacctggaggcccacagaattgtgaagatgaacaagtcagaagatgatgagagcggggccggggagctgacccgggaggagctgcggcagattgctgaggaggacttctatgagaagctggccgccagcatcgcccctgagatctacggccatgaagatgtgaagaaggccctgctgctgctgctggtgggcggcgtggaccagagcccccggggcatgaagatccggggcaacatcaacatctgcctgatgggagaccccggggtggccaagagccagctgctgagctacatcgaccggctggcccccaggagccagtacaccaccggccggggcagcagcggcgtgggcctgacagctgctgtgctgcgggacagcgtgtctggagagctgaccctggagggcggggccctggtgctggccgaccagggcgtgtgctgcattgatgaatttgacaagatggccgaggccgacagaacagccatccacgaggtgatggagcagcagaccatcagcatcgccaaggccggcatcctgaccaccctgaatgcccgctgcagcatcctggccgccgccaacccagcctacggccgctacaacccccggcgcagcctggagcagaacatccagctgcctgctgccctgctgagcagatttgacctgctgtggctgatccaggacagaccagaccgggacaatgacctgcggctggcccagcacatcacctacgtgcaccagcacagccggcagccccccagccagtttgagcccctggacatgaagctgatgaggcgctacatcgccatgtgccgggagaagcagcccatggtgcctgagagcctggccgactacatcacagctgcctacgtggagatgagaagagaggcctgggccagcaaggatgccacctacaccagcgcccggaccctgctggccatcctgcggctgagcacagccctggcccggctgaggatggtggatgtggtggagaaggaggatgtgaatgaggccatccggctgatggagatgagcaaggacagcctgctgggggacaagggccagacagcccggacccagaggcctgcagatgtgatctttgccaccgtgcgggagctggtgtctgggggccgctctgtgcgcttcagcgaggccgagcagagatgtgtgtcccggggcttcaccccagcccagttccaggccgccctggatgaatatgaggagctgaatgtgtggcaggtgaatgccagcaggacccgcatcacctttgtgtag

SEQ ID NO: 159824 - DNA, 1839 bp, synthetic construct
  misc_feature 1..1839: note = Description of Artificial Sequence: Synthetic coding sequence
  source 1..1839: mol_type = other DNA
atgatggagcagaggagccgggaccccggcatggtgcgcagcccccagaaccagtacccagctgagctgatgagaagatttgagctgtacttccagggccccagcagcaacaagcccagggtcatccgggaggtgcgggctgacagcgtgggcaagctggtgacagtgcggggcatcgtgaccagggtgtctgaggtgaagcccaagatggtggtggccacctacacctgtgaccagtgtggggctgagacctaccagcccatccagagccccaccttcatgcccctcatcatgtgccccagccaggagtgccagaccaacagaagtggcggccgcctgtacctgcagacccggggcagccgcttcatcaagttccaggagatgaagatgcaggagcacagcgaccaggtgcctgtgggcaacatccccaggagcatcaccgtgctggtggagggggagaacaccagaattgcccagcccggggaccacgtgtctgtgacaggcatcttcctgcccatcctgaggacaggcttccggcaggtggtgcagggcctgctgtctgagacctacctggaggcccaccgcatcgtgaagatgaacaagtcagaagatgatgaaagtggagctggggagctgacccgggaggagctgcggcagattgctgaggaggacttctatgagaagctggccgccagcatcgcccctgagatctacggccatgaagatgtgaagaaggccctgctgctgctgctggtgggcggcgtggaccagagcccccggggcatgaagatccggggcaacatcaacatctgcctgatgggagaccccggggtggccaagagccagctgctgagctacatcgaccggctggcccccaggagccagtacaccaccggccggggcagcagtggagtgggcctgacagctgctgtgctgcgggacagcgtgtctggagagctgaccctggagggcggggccctggtgctggccgaccagggcgtgtgctgcattgatgaatttgacaagatggccgaggccgacagaacagccatccacgaggtgatggagcagcagaccatcagcatcgccaaggccggcatcctgaccaccctgaatgcccgctgcagcatcctggccgccgccaacccagcctacggccgctacaaccccaggaggagcctggagcagaacatccagctgcctgctgccctgctgagcagatttgacctgctgtggctgatccaggacagaccagaccgggacaatgacctgcggctggcccagcacatcacctacgtgcaccagcacagccggcagccccccagccagtttgagcccctggacatgaagctgatgaggcgctacatcgccatgtgccgggagaagcagcccatggtgcctgagagcctggccgactacatcacagctgcctacgtggagatgaggcgggaggcctgggccagcaaggatgccacctacaccagcgcccggaccctgctggccatcctgcggctgagcacagccctggcccggctgaggatggtggatgtggtggagaaggaggatgtgaatgaggccatccggctgatggagatgagcaaggacagcctgctgggggacaagggccagacagcccggacccagaggcctgcagatgtgatctttgccaccgtgcgggagctggtgtctgggggccgctctgtgcgcttcagcgaggccgagcagagatgtgtgtcccggggcttcaccccagcccagttccaggccgccctggatgaatatgaggagctgaatgtgtggcaggtgaatgccagcaggacccgcatcacctttgtgtag

SEQ ID NO: 159825 - DNA, 1971 bp, synthetic construct
  misc_feature 1..1971: note = Description of Artificial Sequence: Synthetic coding sequence
  source 1..1971: mol_type = other DNA
atgacccccagctggtggacccagtttgtgaggatgcctggggccaccaggagcagcctgctgatgccctactacaaggagcgggaggtggtgaacaaggatgtgctggatgtgtacatcgagcaccggctgatgatggagcagaggagccgggaccccggcatggtgcgcagcccccagaaccagtacccagctgagctgatgagaagatttgagctgtacttccagggccccagcagcaacaagcccagggtcatccgggaggtgcgggctgacagcgtgggcaagctggtgacagtgcggggcatcgtgaccagggtgtctgaggtgaagcccaagatggtggtggccacctacacctgtgaccagtgtggggctgagacctaccagcccatccagagccccaccttcatgcccctcatcatgtgccccagccaggagtgccagaccaacagaagtggcggccgcctgtacctgcagacccggggcagccgcttcatcaagttccaggagatgaagatgcaggagcacagcgaccaggtgcctgtgggcaacatccccaggagcatcaccgtgctggtggagggggagaacaccagaattgcccagcccggggaccacgtgtctgtgacaggcatcttcctgcccatcctgaggacaggcttccggcaggtggtgcagggcctgctgtctgagacctacctggaggcccaccgcatcgtgaagatgaacaagtcagaagatgatgaaagtggagctggggagctgacccgggaggagctgcggcagattgctgaggaggacttctatgagaagctggccgccagcatcgcccctgagatctacggccatgaagatgtgaagaaggccctgctgctgctgctggtgggcggcgtggaccagagcccccggggcatgaagatccggggcaacatcaacatctgcctgatgggagaccccggggtggccaagagccagctgctgagctacatcgaccggctggcccccaggagccagtacaccaccggccggggcagcagtggagtgggcctgacagctgctgtgctgcgggacagcgtgtctggagagctgaccctggagggcggggccctggtgctggccgaccagggcgtgtgctgcattgatgaatttgacaagatggccgaggccgacagaacagccatccacgaggtgatggagcagcagaccatcagcatcgccaaggccggcatcctgaccaccctgaatgcccgctgcagcatcctggccgccgccaacccagcctacggccgctacaaccccaggaggagcctggagcagaacatccagctgcctgctgccctgctgagcagatttgacctgctgtggctgatccaggacagaccagaccgggacaatgacctgcggctggcccagcacatcacctacgtgcaccagcacagccggcagccccccagccagtttgagcccctggacatgaagctgatgaggcgctacatcgccatgtgccgggagaagcagcccatggtgcctgagagcctggccgactacatcacagctgcctacgtggagatgaggcgggaggcctgggccagcaaggatgccacctacaccagcgcccggaccctgctggccatcctgcggctgagcacagccctggcccggctgaggatggtggatgtggtggagaaggaggatgtgaatgaggccatccggctgatggagatgagcaaggacagcctgctgggggacaagggccagacagcccggacccagaggcctgcagatgtgatctttgccaccgtgcgggagctggtgtctgggggccgctctgtgcgcttcagcgaggccgagcagagatgtgtgtcccggggcttcaccccagcccagttccaggccgccctggatgaatatgaggagctgaatgtgtggcaggtgaatgccagcaggacccgcatcacctttgtgtag

SEQ ID NO: 159826 - DNA, 2475 bp, synthetic construct
  misc_feature 1..2475: note = Description of Artificial Sequence: Synthetic coding sequence
  source 1..2475: mol_type = other DNA
atgaatggagagtaccggggccggggcttcggccggggccgcttccagagctggaagaggggccggggcggcggcaacttcagcggcaagtggagggagcgggagcacaggccagacctgagcaagaccaccgggaagaggaccagcgagcagaccccccagttcctgctgagcaccaagaccccccagagcatgcagagcaccctggaccgcttcatcccctacaagggctggaagctgtacttcagcgaggtgtacagcgacagcagccccctgattgagaagatccaggcctttgagaagttcttcaccaggcacatcgacctgtatgacaaggatgaaattgaaaggaagggcagcatcctggtggacttcaaggagctgacagaaggaggagaggtgaccaacctgatcccagacatcgccacagagctgagagatgcccctgagaagaccctggcctgcatgggcctggccatccaccaggtgctgaccaaggacctggagagacatgctgctgagctgcaggcccaggagggcctgagcaatgatggagagaccatggtgaatgtgccccacatccacgcccgggtgtacaactatgagcccctgacccagctgaagaatgtgcgggccaactactacggcaagtacatcgccctgcggggcaccgtggtgcgggtgagcaacatcaagcccctgtgcaccaagatggccttcctgtgtgccgcctgtggggagatccagagcttccccctgcctgatggcaagtacagcctgcccaccaagtgccctgtgcctgtgtgccggggccgctccttcaccgccctgcggagcagccccctgactgtgaccatggactggcagagcatcaagatccaggagctgatgtctgatgaccagcgggaggccggccgcatccccaggaccattgaatgtgagctggtgcatgacctggtggacagctgtgtgcctggggacacagtgaccatcaccggcatcgtgaaggtgtccaatgctgaggaggccaacagcatcagcaacagcaagggccagaagaccaagagcagtgaagatggctgcaagcacggcatgctgatggagttcagcctgaaggacctgtatgccatccaggagatccaggccgaggagaacctcttcaagctgattgtgaacagcctgtgccctgtgatctttggacatgagctggtgaaggccggcctggccctggccctgtttggaggcagccagaagtatgcagatgacaagaaccgcatccccatccggggggacccccacatcctggtggtgggggaccccggcctgggcaagagccagatgctgcaggccgcctgcaatgtggccccccggggcgtgtatgtgtgtggcaacaccaccaccaccagcggcctgactgtgaccctgagcaaggacagcagcagcggggactttgccctggaggccggggccctggtgctgggggaccagggcatctgtggcattgatgaatttgacaagatgggcaaccagcaccaggccctgctggaggccatggagcagcagagcatcagcctggccaaggccggcgtggtgtgcagcctgcctgcccggaccagcatcatcgctgctgccaaccctgtgggcggccactacaacaaggccaagacagtgtctgagaacctgaagatgggcagcgccctgctgagcagatttgacctggtgttcatcctgctggacaccccaaatgagcaccacgaccacctgctgtctgagcacgtgattgccatccgggccggcaagcagaggaccatcagcagcgccaccgtggccaggatgaacagccaggacagcaacacctctgtgctggaggtggtgtctgagaagcccctgtctgagcggctgaaggtggtgcctggagagaccatcgaccccatcccccaccagctgctgaggaagtacatcggctacgcccggcagtatgtgtacccccggctgagcacagaagctgcccgggtgctgcaggacttctacctggagctgaggaagcagagccagaggctgaacagcagccccatcaccacccggcagctggagagcctcatccggctgacagaggcccgggcccggctggagctgcgggaggaggccaccaaggaggatgctgaggacatcgtggagatcatgaagtacagcatgctgggcacctacagtgatgaatttggaaacctggactttgagaggagccagcacggcagcggcatgagcaacagaagcacagccaagcgcttcatcagcgccctgaacaacgtggccgagaggacctacaacaacatcttccagttccaccagctgcggcagatcgccaaggagctgaacatccaggtggccgactttgagaacttcatcggcagcctgaatgaccagggctacctgctgaagaagggccccaaggtgtaccagctgcagaccatgtag

SEQ ID NO: 159827 - DNA, 2382 bp, synthetic construct
  misc_feature 1..2382: note = Description of Artificial Sequence: Synthetic coding sequence
  source 1..2382: mol_type = other DNA
atgaatggagagtaccggggccggggcttcggccggggccgcttccagagctggaagaggggccggggcggcggcaacttcagcggcaagtggagggagcgggagcacaggccagacctgagcaagaccaccgggaagaggaccagcgagcagaccccccagttcctgctgagcaccaagaccccccagagcatgcagagcaccctggaccgcttcatcccctacaagggctggaagctgtacttcagcgaggtgtacagcgacagcagccccctgattgagaagatccaggcctttgagaagttcttcaccaggcacatcgacctgtatgacaaggatgaaattgaaaggaagggcagcatcctggtggacttcaaggagctgacagaaggaggagaggtgaccaacctgatcccagacatcgccacagagctgagagatgcccctgagaagaccctggcctgcatgggcctggccatccaccaggtgctgaccaaggacctggagagacatgctgctgagctgcaggcccaggagggcctgagcaatgatggagagaccatggtgaatgtgccccacatccacgcccgggtgtacaactatgagcccctgacccagctgaagaatgtgcgggccaactactacggcaagtacatcgccctgcggggcaccgtggtgcgggtgagcaacatcaagcccctgtgcaccaagatggccttcctgtgtgccgcctgtggggagatccagagcttccccctgcctgatggcaagtacagcctgcccaccaagtgccctgtgcctgtgtgccggggccgctccttcaccgccctgcggagcagccccctgactgtgaccatggactggcagagcatcaagatccaggagctgatgtctgatgaccagcgggaggccggccgcatccccaggaccattgaatgtgagctggtgcatgacctggtggacagctgtgtgcctggggacacagtgaccatcaccggcatcgtgaaggtgtccaatgctgaggagggcagcaggaacaagaatgacaagtgcatgttcctgctgtacatcgaggccaacagcatcagcaacagcaagggccagaagaccaagagcagtgaagatggctgcaagcacggcatgctgatggagttcagcctgaaggacctgtatgccatccaggagatccaggccgaggagaacctcttcaagctgattgtgaacagcctgtgccctgtgatctttggacatgaagctgcctgcaatgtggccccccggggcgtgtatgtgtgtggcaacaccaccaccaccagcggcctgactgtgaccctgagcaaggacagcagcagcggggactttgccctggaggccggggccctggtgctgggggaccagggcatctgtggcattgatgaatttgacaagatgggcaaccagcaccaggccctgctggaggccatggagcagcagagcatcagcctggccaaggccggcgtggtgtgcagcctgcctgcccggaccagcatcatcgccgccgccaaccctgtgggcggccactacaacaaggccaagacagtgtctgagaacctgaagatgggcagcgccctgctgagcagatttgacctggtgttcatcctgctggacaccccaaatgagcaccacgaccacctgctgtctgaacatgtgattgccatccgggccggcaagcagaggaccatcagcagcgccaccgtggccaggatgaacagccaggacagcaacacctctgtgctggaggtggtgtctgagaagcccctgtctgagcggctgaaggtggtgcctggagagaccatcgaccccatcccccaccagctgctgaggaagtacatcggctacgcccggcagtatgtgtacccccggctgagcacagaggccgcccgggtgctgcaggacttctacctggagctgaggaagcagagccagaggctgaacagcagccccatcaccacccggcagctggagagcctcatccggctgacagaggcccgggcccggctggagctgcgggaggaggccaccaaggaggatgctgaagatattgtggagatcatgaagtacagcatgctgggcacctacagtgatgaatttggaaacctggactttgagaggagccagcacggcagcggcatgagcaacagaagcacagccaagcgcttcatcagcgccctgaacaacgtggccgagaggacctacaacaacatcttccagttccaccagctgcggcagatcgccaaggagctgaacatccaggtggccgactttgagaacttcatcggcagcctgaatgaccagggctacctgctgaagaagggccccaaggtgtaccagctgcagaccatgtag

SEQ ID NO: 159828 - DNA, 2643 bp, synthetic construct
  misc_feature 1..2643: note = Description of Artificial Sequence: Synthetic coding sequence
  source 1..2643: mol_type = other DNA
atgaatggagagtaccggggccggggcttcggccggggccgcttccagagctggaagaggggccggggcggcggcaacttcagcggcaagtggagggagcgggagcacaggccagacctgagcaagaccaccgggaagaggaccagcgagcagaccccccagttcctgctgagcaccaagaccccccagagcatgcagagcaccctggaccgcttcatcccctacaagggctggaagctgtacttcagcgaggtgtacagcgacagcagccccctgattgagaagatccaggcctttgagaagttcttcaccaggcacatcgacctgtatgacaaggatgaaattgaaaggaagggcagcatcctggtggacttcaaggagctgacagaaggaggagaggtgaccaacctgatcccagacatcgccacagagctgagagatgcccctgagaagaccctggcctgcatgggcctggccatccaccaggtgctgaccaaggacctggagagacatgctgctgagctgcaggcccaggagggcctgagcaatgatggagagaccatggtgaatgtgccccacatccacgcccgggtgtacaactatgagcccctgacccagctgaagaatgtgcgggccaactactacggcaagtacatcgccctgcggggcaccgtggtgcgggtgagcaacatcaagcccctgtgcaccaagatggccttcctgtgtgccgcctgtggggagatccagagcttccccctgcctgatggcaagtacagcctgcccaccaagtgccctgtgcctgtgtgccggggccgctccttcaccgccctgcggagcagccccctgactgtgaccatggactggcagagcatcaagatccaggagctgatgtctgatgaccagcgggaggccggccgcatccccaggaccattgaatgtgagctggtgcatgacctggtggacagctgtgtgcctggggacacagtgaccatcaccggcatcgtgaaggtgtccaatgctgaggagggcagcaggaacaagaatgacaagtgcatgttcctgctgtacatcgaggccaacagcatcagcaacagcaagggccagaagaccaagagcagtgaagatggctgcaagcacggcatgctgatggagttcagcctgaaggacctgtatgccatccaggagatccaggccgaggagaacctcttcaagctgattgtgaagtggagcctggccctgagcccccggctggagtacagcggggccatcagcgcccactgcaacctgcacctgcccagcagcaacagcagccccaccagcgcctgccgggtggccggcaccaccggcatgaggcaccagacccagctgctgctgctggtgaaggccggcctggccctggccctgtttggaggcagccagaagtatgcagatgacaagaaccgcatccccatccggggggacccccacatcctggtggtgggggaccccggcctgggcaagagccagatgctgcaggccgcctgcaatgtggccccccggggcgtgtatgtgtgtggcaacaccaccaccaccagcggcctgactgtgaccctgagcaaggacagcagcagcggggactttgccctggaggccggggccctggtgctgggggaccagggcatctgtggcattgatgaatttgacaagatgggcaaccagcaccaggccctgctggaggccatggagcagcagagcatcagcctggccaaggccggcgtggtgtgcagcctgcctgcccggaccagcatcatcgctgctgccaaccctgtgggcggccactacaacaaggccaagacagtgtctgagaacctgaagatgggcagcgccctgctgagcagatttgacctggtgttcatcctgctggacaccccaaatgagcaccacgaccacctgctgtctgagcacgtgattgccatccgggccggcaagcagaggaccatcagcagcgccaccgtggccaggatgaacagccaggacagcaacacctctgtgctggaggtggtgtctgagaagcccctgtctgagcggctgaaggtggtgcctggagagaccatcgaccccatcccccaccagctgctgaggaagtacatcggctacgcccggcagtatgtgtacccccggctgagcacagaagctgcccgggtgctgcaggacttctacctggagctgaggaagcagagccagaggctgaacagcagccccatcaccacccggcagctggagagcctcatccggctgacagaggcccgggcccggctggagctgcgggaggaggccaccaaggaggatgctgaggacatcgtggagatcatgaagtacagcatgctgggcacctacagtgatgaatttggaaacctggactttgagaggagccagcacggcagcggcatgagcaacagaagcacagccaagcgcttcatcagcgccctgaacaacgtggccgagaggacctacaacaacatcttccagttccaccagctgcggcagatcgccaaggagctgaacatccaggtggccgactttgagaacttcatcggcagcctgaatgaccagggctacctgctgaagaagggccccaaggtgtaccagctgcagaccatgtag

SEQ ID NO: 159829 - DNA, 2523 bp, synthetic construct
  misc_feature 1..2523: note = Description of Artificial Sequence: Synthetic coding sequence
  source 1..2523: mol_type = other DNA
atgaatggagagtaccggggccggggcttcggccggggccgcttccagagctggaagaggggccggggcggcggcaacttcagcggcaagtggagggagcgggagcacaggccagacctgagcaagaccaccgggaagaggaccagcgagcagaccccccagttcctgctgagcaccaagaccccccagagcatgcagagcaccctggaccgcttcatcccctacaagggctggaagctgtacttcagcgaggtgtacagcgacagcagccccctgattgagaagatccaggcctttgagaagttcttcaccaggcacatcgacctgtatgacaaggatgaaattgaaaggaagggcagcatcctggtggacttcaaggagctgacagaaggaggagaggtgaccaacctgatcccagacatcgccacagagctgagagatgcccctgagaagaccctggcctgcatgggcctggccatccaccaggtgctgaccaaggacctggagagacatgctgctgagctgcaggcccaggagggcctgagcaatgatggagagaccatggtgaatgtgccccacatccacgcccgggtgtacaactatgagcccctgacccagctgaagaatgtgcgggccaactactacggcaagtacatcgccctgcggggcaccgtggtgcgggtgagcaacatcaagcccctgtgcaccaagatggccttcctgtgtgccgcctgtggggagatccagagcttccccctgcctgatggcaagtacagcctgcccaccaagtgccctgtgcctgtgtgccggggccgctccttcaccgccctgcggagcagccccctgactgtgaccatggactggcagagcatcaagatccaggagctgatgtctgatgaccagcgggaggccggccgcatccccaggaccattgaatgtgagctggtgcatgacctggtggacagctgtgtgcctggggacacagtgaccatcaccggcatcgtgaaggtgtccaatgctgaggagggcagcaggaacaagaatgacaagtgcatgttcctgctgtacatcgaggccaacagcatcagcaacagcaagggccagaagaccaagagcagtgaagatggctgcaagcacggcatgctgatggagttcagcctgaaggacctgtatgccatccaggagatccaggccgaggagaacctcttcaagctgattgtgaacagcctgtgccctgtgatctttggacatgagctggtgaaggccggcctggccctggccctgtttggaggcagccagaagtatgcagatgacaagaaccgcatccccatccggggggacccccacatcctggtggtgggggaccccggcctgggcaagagccagatgctgcaggccgcctgcaatgtggccccccggggcgtgtatgtgtgtggcaacaccaccaccaccagcggcctgactgtgaccctgagcaaggacagcagcagcggggactttgccctggaggccggggccctggtgctgggggaccagggcatctgtggcattgatgaatttgacaagatgggcaaccagcaccaggccctgctggaggccatggagcagcagagcatcagcctggccaaggccggcgtggtgtgcagcctgcctgcccggaccagcatcatcgctgctgccaaccctgtgggcggccactacaacaaggccaagacagtgtctgagaacctgaagatgggcagcgccctgctgagcagatttgacctggtgttcatcctgctggacaccccaaatgagcaccacgaccacctgctgtctgagcacgtgattgccatccgggccggcaagcagaggaccatcagcagcgccaccgtggccaggatgaacagccaggacagcaacacctctgtgctggaggtggtgtctgagaagcccctgtctgagcggctgaaggtggtgcctggagagaccatcgaccccatcccccaccagctgctgaggaagtacatcggctacgcccggcagtatgtgtacccccggctgagcacagaagctgcccgggtgctgcaggacttctacctggagctgaggaagcagagccagaggctgaacagcagccccatcaccacccggcagctggagagcctcatccggctgacagaggcccgggcccggctggagctgcgggaggaggccaccaaggaggatgctgaggacatcgtggagatcatgaagtacagcatgctgggcacctacagtgatgaatttggaaacctggactttgagaggagccagcacggcagcggcatgagcaacagaagcacagccaagcgcttcatcagcgccctgaacaacgtggccgagaggacctacaacaacatcttccagttccaccagctgcggcagatcgccaaggagctgaacatccaggtggccgactttgagaacttcatcggcagcctgaatgaccagggctacctgctgaagaagggccccaaggtgtaccagctgcagaccatgtag

SEQ ID NO: 159830 - DNA, 612 bp, synthetic construct
  misc_feature 1..612: note = Description of Artificial Sequence: Synthetic coding sequence
  source 1..612: mol_type = other DNA
atgaatggagagtaccggggccggggcttcggccggggccgcttccagagctggaagaggggccggggcggcggcaacttcagcggcaagtggagggagcgggagcacaggccagacctgagcaagaccaccgggaagaggaccagcgagcagaccccccagttcctgctgagcaccaagaccccccagagcatgcagagcaccctggaccgcttcatcccctacaagggctggaagctgtacttcagcgaggtgtacagcgacagcagccccctgattgagaagatccaggcctttgagaagttcttcaccaggcacatcgacctgtatgacaaggatgaaattgaaaggaagggcagcatcctggtggacttcaaggagctgacagaaggaggagaggtgaccaacctgatcccagacatcgccacagagctgagagatgcccctgagaagaccctggcctgcatgggcctggccatccaccaggtgctgaccaaggacctggagagacatgctgctgagctgcaggcccaggagggcctgagcaatgatggagagaccatggtgaatgtgccccacatccacttcctgaagaagaagaagaagatctag

SEQ ID NO: 159831 - DNA, 1329 bp, synthetic construct
  misc_feature 1..1329: note = Description of Artificial Sequence: Synthetic coding sequence
  source 1..1329: mol_type = other DNA
atggagaactggagcaaggacatcacccacagctacctggagcaggagaccaccggcatcaacaagagcacccagccagatgagcagctgaccatgaacagcgagaagtccatgcacaggaagagcacagagctggtgaatgagatcacctgtgagaacacagagtggccaggccagaggagcaccaacttccagatcatcagcagctacccagatgatgaatctgtgtactgcaccacagagaagtacaacgtgatggagcaccgccacaatgacatgcactatgagtgcatgaccccctgccaggtgaccagtgacagcgacaaggagaagaccatcgccttcctgctgaaggagctggacatcctgcggaccagcaacaagaagctgcagcagaagctggccaaggaggacaaggagcagaggaagctgaagttcaagctggagctgcaggagaaggagacagaggccaagattgctgagaagacagctgccctggtggaggaggtgtactttgcccagaaggagagagatgaggccgtgatgagccggctgcagctggccatcgaggagagagatgaggccatcgcccgggccaagcacatggagatgagcctgaaggtgctggagaacatcaaccctgaggagaatgacatgaccctgcaggagctgctgaaccgcatcaacaatgctgacacaggaattgccatccagaagaatggagccatcatcgtggaccgcatctacaagaccaaggagtgcaagatgaggatcacagctgaggagatgtctgccctgattgaggagagagatgctgccctgagcaagtgcaagaggctggagcaggagctgcaccacgtgaaggagcagaaccagaccagcgccaacaacatgaggcacctgacagctgagaacaaccaggagcgggccctgaaggccaagctgctgtccatgcagcaggcccgggagacagctgtgcagcagtacaagaagctggaggaggagatccagaccctgcgggtgtactacagcctgcacaagagcctgagccaggaggagaacctgaaggaccagttcaactacaccctgagcacctatgaggaggccctgaagaaccgggagaacatcgtgtccatcacccagcagcagaatgaggagctggccacccagctgcagcaggccctgacagagcgggccaacatggagctgcagctgcagcacgcccgggaggccagccaggtggccaatgagaaggtgcagaagctggagcggctggtggatgtgctgaggaagaaggtgggcaccggcaccatgaggacagtcatctag

SEQ ID NO: 159832 - DNA, 1329 bp, synthetic construct; identical to SEQ ID NO: 159831
  misc_feature 1..1329: note = Description of Artificial Sequence: Synthetic coding sequence
  source 1..1329: mol_type = other DNA

SEQ ID NO: 159833 - DNA, 786 bp, synthetic construct
  misc_feature 1..786: note = Description of Artificial Sequence: Synthetic coding sequence
  source 1..786: mol_type = other DNA
atgagccggctgcagctggccatcgaggagagagatgaggccatcgcccgggccaagcacatggagatgagcctgaaggtgctggagaacatcaacccagaagaaaatgacatgaccctgcaggagctgctgaaccgcatcaacaatgctgacaccggcatcgccatccagaagaatggagccatcatcgtggaccgcatctacaagaccaaggagtgcaagatgaggatcacagctgaggagatgtctgccctgattgaggagagagatgctgccctgagcaagtgcaagaggctggagcaggagctgcaccacgtgaaggagcagaaccagaccagcgccaacaacatgaggcacctgacagctgagaacaaccaggagcgggccctgaaggccaagctgctgtccatgcagcaggcccgggagacagctgtgcagcagtacaagaagctggaggaggagatccagaccctgcgggtgtactacagcctgcacaagagcctgagccaggaggagaacctgaaggaccagttcaactacaccctgagcacctatgaggaggccctgaagaacagagaaaatattgtgtccatcacccagcagcagaatgaggagctggccacccagctgcagcaggccctgacagagcgggccaacatggagctgcagctgcagcacgcccgggaggccagccaggtggccaatgagaaggtgcagaagctggagcggctggtggatgtgctgaggaagaaggtgggcaccggcaccatgaggacagtcatctag

SEQ ID NO: 159834 - DNA, 1329 bp, synthetic construct; identical to SEQ ID NO: 159831
  misc_feature 1..1329: note = Description of Artificial Sequence: Synthetic coding sequence
  source 1..1329: mol_type = other DNA

SEQ ID NO: 159835 - DNA, 1275 bp, synthetic construct
  misc_feature 1..1275: note = Description of Artificial Sequence: Synthetic coding sequence
  source 1..1275: mol_type = other DNA
atgaacagcgagaagtccatgcacaggaagagcacagagctggtgaatgagatcacctgtgaaaatacagagtggccaggccagaggagcaccaacttccagatcatcagcagctacccagatgatgagagcgtgtactgcaccacagagaagtacaacgtgatggagcaccgccacaatgacatgcactatgagtgcatgaccccctgccaggtgaccagtgacagcgacaaggagaagaccatcgccttcctgctgaaggagctggacatcctgcggaccagcaacaagaagctgcagcagaagctggccaaggaggacaaggagcagaggaagctgaagttcaagctggagctgcaggagaaggagacagaggccaagattgctgagaagacagctgccctggtggaggaggtgtactttgcccagaaggagagagatgaagctgtgatgagccggctgcagctggccatcgaggagagagatgaggccatcgcccgggccaagcacatggagatgagcctgaaggtgctggagaacatcaacccagaagaaaatgacatgaccctgcaggagctgctgaaccgcatcaacaatgctgacaccggcatcgccatccagaagaatggagccatcatcgtggaccgcatctacaagaccaaggagtgcaagatgaggatcacagctgaggagatgtctgccctgattgaggagagagatgctgccctgagcaagtgcaagaggctggagcaggagctgcaccacgtgaaggagcagaaccagaccagcgccaacaacatgaggcacctgacagctgagaacaaccaggagcgggccctgaaggccaagctgctgtccatgcagcaggcccgggagacagctgtgcagcagtacaagaagctggaggaggagatccagaccctgcgggtgtactacagcctgcacaagagcctgagccaggaggagaacctgaaggaccagttcaactacaccctgagcacctatgaggaggccctgaagaacagagaaaatattgtgtccatcacccagcagcagaatgaggagctggccacccagctgcagcaggccctgacagagcgggccaacatggagctgcagctgcagcacgcccgggaggccagccaggtggccaatgagaaggtgcagaagagccagatccagatctacttcatccccaacaagaaggatgagcgggagaagttcctgatggacaagaggaggaagatcgtggcccacagcaagcagaacagctag

SEQ ID NO: 159836 - DNA, 315 bp, synthetic construct
  misc_feature 1..315: note = Description of Artificial Sequence: Synthetic coding sequence
  source 1..315: mol_type = other DNA
atggagaactggagcaaggacatcacccacagctacctggagcaggagaccaccggcatcaacaagagcacccagccagatgagcagctgaccatgaacagcgagaagtccatgcacaggaagagcacagagctggtgaatgagatcacctgtgagaacacagagtggccaggccagaggagcaccaacttccagatcatcagcagctacccagatgatgaatctgtgtactgcaccacagagaagtacaacgtgatggagcaccgccacaatgacatgcactatgagtgcatgaccccctgccaggtgacctag

SEQ ID NO: 159837 - DNA, 387 bp, synthetic construct
  misc_feature 1..387: note = Description of Artificial Sequence: Synthetic coding sequence
  source 1..387: mol_type = other DNA
atggagaactggagcaaggacatcacccacagctacctggagcaggagaccaccggcatcaacaagagcacccagccagatgagcagctgaccatgaacagcgagaagtccatgcacaggaagagcacagagctggtgaatgagatcacctgtgagaacacagagtggccaggccagaggagcaccaacttccagatcatcagcagctacccagatgatgaatctgtgtactgcaccacagagaagtacaacgtgatggagcaccgccacaatgacatgcactatgagtgcatgaccccctgccaggtgaccagtgacagcgacaaggagaagaccatcgccttcctgctgaaggagctggacatcctgcggaccagcaacaagtag

SEQ ID NO: 159838 - DNA, 3912 bp, synthetic construct
  misc_feature 1..3912: note = Description of Artificial Sequence: Synthetic coding sequence
  source 1..3912: mol_type = other DNA
atgggagaccctgccccagcccggagcctggatgacatcgacctgagcgccctgcgggaccctgctggcatctttgagctggtggaggtggtgggcaatggcacctacggccaggtgtacaagggccgccacgtgaagacaggccagctggccgccatcaaggtgatggatgtgacagaagatgaggaggaggagatcaagcaggagatcaacatgctgaagaagtacagccaccacaggaacatcgccacctactacggggccttcatcaagaagagccccccaggaaatgatgaccagctgtggctggtgatggagttctgtggggccggctctgtgacagacctggtgaagaacaccaagggaaatgccctgaaggaggactgcatcgcctacatctgccgggagatcctgcggggcctggcccacctgcacgcccacaaggtgatccaccgggacatcaagggccagaatgtgctgctgacagaaaatgctgaggtgaagctggtggactttggagtgtctgcccagctggacagaacagtgggcagaagaaacaccttcatcggcaccccctactggatggcccctgaggtgattgcctgtgatgagaacccagatgccacctatgactacagaagtgacatctggagcctgggcatcacagccatcgagatggccgagggcgccccacccctgtgtgacatgcaccccatgagggccctcttcctgatccccagaaatcctccaccccggctgaagagcaagaagtggagcaagaagttcatcgacttcatcgacacctgcctgatcaagacctacctgagccggcccccaacagagcagctgctgaagttccccttcatccgggaccagcccacagagcggcaggtgcgcatccagctgaaggaccacatcgacaggagcaggaagaagagaggagagaaggaggagacagaatatgagtacagcggcagcgaggaggaggatgacagccatggagaggagggggagcccagcagcatcatgaatgtgcctggagagagcaccctgcggcgggagttcctgcggctgcagcaggagaacaagagcaacagcgaggccctgaagcagcagcagcagctgcagcagcagcagcagagggaccctgaggcccacatcaagcacctgctgcaccagaggcagaggcgcatcgaggagcagaaggaggagcggcggcgggtggaggagcagcagaggcgggagcgggagcagaggaagctgcaggagaaggagcagcagaggcggctggaggacatgcaggccctgcggcgggaggaggagcggcggcaggccgagcgggagcaggagtacaagaggaagcagctggaggagcagaggcagagcgagcggctgcagaggcagctgcagcaggagcacgcctacctgaagagcctgcagcagcagcagcagcagcagcagctgcagaagcagcagcagcagcagctgctgcccggggacaggaagcccctgtaccactacggccggggcatgaacccagctgacaagccagcctgggcccgggaggtggaggagaggaccaggatgaacaagcagcagaacagccccctggccaagagcaagccaggcagcactggacctgagccccccatcccccaggccagccctggccccccaggccccctgagccagaccccacccatgcagaggcctgtggagccccaggagggcccccacaagagcctggtggcccaccgggtgcccctgaagccctatgctgcccctgtgcccaggagccagagcctgcaggaccagcccaccaggaacctggccgccttccctgccagccatgaccctgaccctgccatcccagcccccacagccaccccatctgcccggggagctgtgatccggcagaacagcgaccccaccagcgagggccctggccccagccccaaccccccagcctgggtgcggccagacaatgaggccccacccaaggtgccccagaggaccagcagcatcgccacagccctgaacaccagcggggccggcggcagcaggcctgcccaggccgtgcgggccagcaacccagacctgcggcggagtgaccccggctgggagaggagtgacagcgtgctgcctgccagccacggccacctgccccaggccggcagcctggagaggaacagagtgggcgtgagcagcaagccagacagcagccctgtgctgagccctggcaacaaggccaagccagatgaccacaggagcaggcctggccggcctgccagctacaagagggccatcggagaagattttgtgctgctgaaggagaggaccctggatgaggcccccaggcctcccaagaaggccatggactacagcagcagcagcgaggaggtggagagcagtgaagatgatgaggaggagggggagggcggccctgctgagggcagccgggacaccccaggcggccgcagtgatggagacacagattctgtgtccaccatggtggtgcatgatgtggaggagatcaccggcacccagcccccctacggcggcggcaccatggtggtgcagaggaccccagaggaggagaggaacctgctgcacgccgacagcaatggctacaccaacctgcctgatgtggtgcagcccagccacagccccacagagaacagcaagggccagagcccccccagcaaggatggcagcggggactaccagagccggggcctggtgaaggcccctgggaagagcagcttcaccatgtttgtggacctgggcatctaccagcccggcggcagcggggacagcatccccatcacagccctggtgggcggggagggcacccggctggaccagctgcagtatgatgtgaggaagggctctgtggtgaatgtgaaccccaccaacacccgggcccacagcgagaccccagagatcaggaagtacaagaagcgcttcaacagcgagatcctgtgtgccgccctgtggggcgtgaacctgctggtgggcacagaaaatggcctgatgctgctggacagaagtggccagggcaaggtgtatggcctcatcggcagaagacgcttccagcagatggatgtgctggagggcctgaacctgctgatcaccatcagcggcaagaggaacaagctgcgggtgtactacctgtcctggctgaggaacaagatcctgcacaatgaccctgaggtggagaagaagcagggctggaccaccgtgggggacatggagggctgcggccactacagagtggtgaagtatgagcgcatcaagttcctggtgattgccctgaagagctctgtggaggtgtatgcctgggcccccaagccctaccacaagttcatggccttcaagagctttgctgacctgccccaccggcccctgctggtggacctgactgtggaggagggccagaggctgaaggtgatctacggcagcagcgctggcttccacgctgtggatgtggacagcggcaacagctatgacatctacatccctgtgcacatccagagccagatcaccccccacgccatcatcttcctgcccaacacagatggcatggagatgctgctgtgctatgaagatgaaggagtgtatgtgaacacctacggccgcatcatcaaggatgtggtgctgcagtggggcgagatgcccacctctgtggcctacatctgcagcaaccagatcatgggctggggcgagaaggccatcgagatccgctctgtggagaccggccacctggatggagtcttcatgcacaagagggcccagaggctgaagttcctgtgtgaaagaaatgacaaggtgttctttgcctctgtgcgcagcggcggcagcagccaggtgtacttcatgaccctgaacagaaactgcatcatgaactggtag

SEQ ID NO: 159839 - DNA, 3999 bp, synthetic construct
  misc_feature 1..3999: note = Description of Artificial Sequence: Synthetic coding sequence
  source 1..3999: mol_type = other DNA
atgggagaccctgccccagcccggagcctggatgacatcgacctgagcgccctgcgggaccctgctggcatctttgagctggtggaggtggtgggcaatggcacctacggccaggtgtacaagggccgccacgtgaagacaggccagctggccgccatcaaggtgatggatgtgacagaagatgaggaggaggagatcaagcaggagatcaacatgctgaagaagtacagccaccacaggaacatcgccacctactacggggccttcatcaagaagagccccccaggaaatgatgaccagctgtggctggtgatggagttctgtggggccggctctgtgacagacctggtgaagaacaccaagggaaatgccctgaaggaggactgcatcgcctacatctgccgggagatcctgcggggcctggcccacctgcacgcccacaaggtgatccaccgggacatcaagggccagaatgtgctgctgacagaaaatgctgaggtgaagctggtggactttggagtgtctgcccagctggacagaacagtgggcagaagaaacaccttcatcggcaccccctactggatggcccctgaggtgattgcctgtgatgagaacccagatgccacctatgactacagaagtgacatctggagcctgggcatcacagccatcgagatggccgagggcgccccacccctgtgtgacatgcaccccatgagggccctcttcctgatccccagaaatcctccaccccggctgaagagcaagaagtggagcaagaagttcatcgacttcatcgacacctgcctgatcaagacctacctgagccggcccccaacagagcagctgctgaagttccccttcatccgggaccagcccacagagcggcaggtgcgcatccagctgaaggaccacatcgacaggagcaggaagaagagaggagagaaggaggagacagaatatgagtacagcggcagcgaggaggaggatgacagccatggagaggagggggagcccagcagcatcatgaatgtgcctggagagagcaccctgcggcgggagttcctgcggctgcagcaggagaacaagagcaacagcgaggccctgaagcagcagcagcagctgcagcagcagcagcagagggaccctgaggcccacatcaagcacctgctgcaccagaggcagaggcgcatcgaggagcagaaggaggagcggcggcgggtggaggagcagcagaggcgggagcgggagcagaggaagctgcaggagaaggagcagcagaggcggctggaggacatgcaggccctgcggcgggaggaggagcggcggcaggccgagcgggagcaggagtacaagaggaagcagctggaggagcagaggcagagcgagcggctgcagaggcagctgcagcaggagcacgcctacctgaagagcctgcagcagcagcagcagcagcagcagctgcagaagcagcagcagcagcagctgctgcccggggacaggaagcccctgtaccactacggccggggcatgaacccagctgacaagccagcctgggcccgggaggtggaggagaggaccaggatgaacaagcagcagaacagccccctggccaagagcaagccaggcagcactggacctgagccccccatcccccaggccagccctggccccccaggccccctgagccagaccccacccatgcagaggcctgtggagccccaggagggcccccacaagagcctggtggcccaccgggtgcccctgaagccctatgctgcccctgtgcccaggagccagagcctgcaggaccagcccaccaggaacctggccgccttccctgccagccatgaccctgaccctgccatcccagcccccacagccaccccatctgcccggggagctgtgatccggcagaacagcgaccccaccagcgagggccctggccccagccccaaccccccagcctgggtgcggccagacaatgaggccccacccaaggtgccccagaggaccagcagcatcgccacagccctgaacaccagcggggccggcggcagcaggcctgcccaggccgtgcgggcccggcccaggagcaacagcgcctggcagatctacctgcagaggagagctgagcggggcacccccaagcccccaggccccccagcccagcccccaggccccccaaatgccagcagcaacccagacctgcggcggagtgaccccggctgggagaggagtgacagcgtgctgcctgccagccacggccacctgccccaggccggcagcctggagaggaacagagtgggcgtgagcagcaagccagacagcagccctgtgctgagccctggcaacaaggccaagccagatgaccacaggagccggcccggccggcctgctgactttgtgctgctgaaggagaggaccctggatgaggccccccggccccccaagaaggccatggactacagcagcagcagcgaggaggtggagagcagtgaagatgatgaggaggagggggagggcggccctgctgagggcagccgggacacccctgggggccgcagtgatggagacacagacagcgtgtccaccatggtggtgcatgatgtggaggagatcaccggcacccagcccccctatggaggcggcaccatggtggtgcagaggaccccagaggaggagaggaacctgctgcatgctgacagcaatggctacaccaacctgcctgatgtggtgcagcccagccacagccccacagagaacagcaagggccagagcccccccagcaaggatggcagcggggactaccagagccggggcctggtgaaggcccctgggaagagcagcttcaccatgtttgtggacctgggcatctaccagcccggcggcagcggggacagcatccccatcacagccctggtgggcggggagggcacccggctggaccagctgcagtatgatgtgaggaaaggatctgtggtgaatgtgaaccccaccaacacccgggcccacagcgagaccccagagatcaggaagtacaagaagcgcttcaacagcgagatcctgtgtgccgccctgtggggcgtgaacctgctggtgggcacagaaaatggcctgatgctgctggacaggagcggccagggcaaggtgtatggcctgattggaagaagacgcttccagcagatggatgtgctggagggcctgaacctgctgatcaccatcagcggcaagaggaacaagctgcgggtgtactacctgtcctggctgaggaacaagatcctgcacaatgaccctgaggtggagaagaagcagggctggaccaccgtgggggacatggagggctgcggccactacagagtggtgaagtatgaaagaatcaagttcctggtgattgccctgaagagctctgtggaggtgtatgcctgggcccccaagccctaccacaagttcatggccttcaagagctttgctgacctgccccaccggcccctgctggtggacctgactgtggaggagggccagaggctgaaggtgatctacggcagcagcgctggcttccacgctgtggatgtggacagcggcaacagctatgacatctacatccctgtgcacatccagagccagatcacccctcatgccatcatcttcctgcccaacacagatggcatggagatgctgctgtgctatgaagatgagggcgtgtatgtgaacacctacggccgcatcatcaaggatgtggtgctgcagtggggcgagatgcccacctctgtggcctacatctgcagcaaccagatcatgggctggggcgagaaggccatcgagatccgctctgtggagaccggccacctggatggagtcttcatgcacaagagggcccagaggctgaagttcctgtgtgaaagaaatgacaaggtgttctttgcctctgtgcgcagcggcggcagcagccaggtgtacttcatgaccctgaacagaaactgcatcatgaactggtag

SEQ ID NO: 159840 - DNA, 3939 bp, synthetic construct
  misc_feature 1..3939: note = Description of Artificial Sequence: Synthetic coding sequence
  source 1..3939: mol_type = other DNA
atgggagaccctgccccagcccggagcctggatgacatcgacctgagcgccctgcgggaccctgctggcatctttgagctggtggaggtggtgggcaatggcacctacggccaggtgtacaagggccgccacgtgaagacaggccagctggccgccatcaaggtgatggatgtgacagaagatgaggaggaggagatcaagcaggagatcaacatgctgaagaagtacagccaccacaggaacatcgccacctactacggggccttcatcaagaagagccccccaggaaatgatgaccagctgtggctggtgatggagttctgtggggccggctctgtgacagacctggtgaagaacaccaagggaaatgccctgaaggaggactgcatcgcctacatctgccgggagatcctgcggggcctggcccacctgcacgcccacaaggtgatccaccgggacatcaagggccagaatgtgctgctgacagaaaatgctgaggtgaagctggtggactttggagtgtctgcccagctggacagaacagtgggcagaagaaacaccttcatcggcaccccctactggatggcccctgaggtgattgcctgtgatgagaacccagatgccacctatgactacagaagtgacatctggagcctgggcatcacagccatcgagatggccgagggcgccccacccctgtgtgacatgcaccccatgagggccctcttcctgatccccagaaatcctccaccccggctgaagagcaagaagtggagcaagaagttcatcgacttcatcgacacctgcctgatcaagacctacctgagccggcccccaacagagcagctgctgaagttccccttcatccgggaccagcccacagagcggcaggtgcgcatccagctgaaggaccacatcgacaggagcaggaagaagagaggagagaaggaggagacagaatatgagtacagcggcagcgaggaggaggatgacagccatggagaggagggggagcccagcagcatcatgaatgtgcctggagagagcaccctgcggcgggagttcctgcggctgcagcaggagaacaagagcaacagcgaggccctgaagcagcagcagcagctgcagcagcagcagcagagggaccctgaggcccacatcaagcacctgctgcaccagaggcagaggcgcatcgaggagcagaaggaggagcggcggcgggtggaggagcagcagaggcgggagcgggagcagaggaagctgcaggagaaggagcagcagaggcggctggaggacatgcaggccctgcggcgggaggaggagcggcggcaggccgagcgggagcaggagtacaagaggaagcagctggaggagcagaggcagagcgagcggctgcagaggcagctgcagcaggagcacgcctacctgaagagcctgcagcagcagcagcagcagcagcagctgcagaagcagcagcagcagcagctgctgcccggggacaggaagcccctgtaccactacggccggggcatgaacccagctgacaagccagcctgggcccgggaggtggaggagaggaccaggatgaacaagcagcagaacagccccctggccaagagcaagccaggcagcactggacctgagccccccatcccccaggccagccctggccccccaggccccctgagccagaccccacccatgcagaggcctgtggagccccaggagggcccccacaagagcctgcaggaccagcccaccaggaacctggccgccttccctgccagccatgaccctgaccctgccatcccagcccccacagccaccccatctgcccggggagctgtgatccggcagaacagcgaccccaccagcgagggccctggccccagccccaaccccccagcctgggtgcggccagacaatgaggccccacccaaggtgccccagaggaccagcagcatcgccacagccctgaacaccagcggggccggcggcagcaggcctgcccaggccgtgcgggcccggcccaggagcaacagcgcctggcagatctacctgcagaggagagctgagcggggcacccccaagcccccaggccccccagcccagcccccaggccccccaaatgccagcagcaacccagacctgcggcggagtgaccccggctgggagaggagtgacagcgtgctgcctgccagccacggccacctgccccaggccggcagcctggagaggaacagagtgggcgtgagcagcaagccagacagcagccctgtgctgagccctggcaacaaggccaagccagatgaccacaggagccggcccggccggcctgctgactttgtgctgctgaaggagaggaccctggatgaggccccccggccccccaagaaggccatggactacagcagcagcagcgaggaggtggagagcagtgaagatgatgaggaggagggggagggcggccctgctgagggcagccgggacacccctgggggccgcagtgatggagacacagacagcgtgtccaccatggtggtgcatgatgtggaggagatcaccggcacccagcccccctatggaggcggcaccatggtggtgcagaggaccccagaggaggagaggaacctgctgcatgctgacagcaatggctacaccaacctgcctgatgtggtgcagcccagccacagccccacagagaacagcaagggccagagcccccccagcaaggatggcagcggggactaccagagccggggcctggtgaaggcccctgggaagagcagcttcaccatgtttgtggacctgggcatctaccagcccggcggcagcggggacagcatccccatcacagccctggtgggcggggagggcacccggctggaccagctgcagtatgatgtgaggaaaggatctgtggtgaatgtgaaccccaccaacacccgggcccacagcgagaccccagagatcaggaagtacaagaagcgcttcaacagcgagatcctgtgtgccgccctgtggggcgtgaacctgctggtgggcacagaaaatggcctgatgctgctggacaggagcggccagggcaaggtgtatggcctgattggaagaagacgcttccagcagatggatgtgctggagggcctgaacctgctgatcaccatcagcggcaagaggaacaagctgcgggtgtactacctgtcctggctgaggaacaagatcctgcacaatgaccctgaggtggagaagaagcagggctggaccaccgtgggggacatggagggctgcggccactacagagtggtgaagtatgaaagaatcaagttcctggtgattgccctgaagagctctgtggaggtgtatgcctgggcccccaagccctaccacaagttcatggccttcaagagctttgctgacctgccccaccggcccctgctggtggacctgactgtggaggagggccagaggctgaaggtgatctacggcagcagcgctggcttccacgctgtggatgtggacagcggcaacagctatgacatctacatccctgtgcacatccagagccagatcacccctcatgccatcatcttcctgcccaacacagatggcatggagatgctgctgtgctatgaagatgagggcgtgtatgtgaacacctacggccgcatcatcaaggatgtggtgctgcagtggggcgagatgcccacctctgtggcctacatctgcagcaaccagatcatgggctggggcgagaaggccatcgagatccgctctgtggagaccggccacctggatggagtcttcatgcacaagagggcccagaggctgaagttcctgtgtgaaagaaatgacaaggtgttctttgcctctgtgcgcagcggcggcagcagccaggtgtacttcatgaccctgaacagaaactgcatcatgaactggtag

SEQ ID NO: 159841 - DNA, 879 bp, synthetic construct
  misc_feature 1..879: note = Description of Artificial Sequence: Synthetic coding sequence
  source 1..879: mol_type = other DNA
atgctgctggacaggagcggccagggcaaggtgtatggcctgattggaagaagacgcttccagcagatggatgtgctggagggcctgaacctgctgatcaccatcagcggcaagaggaacaagctgcgggtgtactacctgtcctggctgaggaacaagatcctgcacaatgaccctgaggtggagaagaagcagggctggaccaccgtgggggacatggagggctgcggccactacagagtggtgaagtatgaaagaatcaagttcctggtgattgccctgaagagctctgtggaggtgtatgcctgggcccccaagccctaccacaagttcatggccttcaagagctttgctgacctgccccaccggcccctgctggtggacctgactgtggaggagggccagaggctgaaggtgatctacggcagcagcgctggcttccacgctgtggatgtggacagcggcaacagctatgacatctacatccctgtgcacatccagagccagatcacccctcatgccatcatcttcctgcccaacacagatggcatggagatgctgctgtgctatgaagatgagggcgtgtatgtgaacacctacggccgcatcatcaaggatgtggtgctgcagtggggcgagatgcccacctctgtggcctacatctgcagcaaccagatcatgggctggggcgagaaggccatcgagatccgctctgtggagaccggccacctggatggagtcttcatgcacaagagggcccagaggctgaagttcctgtgtgaaagaaatgacaaggtgttctttgcctctgtgcgcagcggcggcagcagccaggtgtacttcatgaccctgaacagaaactgcatcatgaactggtag

SEQ ID NO: 159842 - DNA, 336 bp, synthetic construct
  misc_feature 1..336: note = Description of Artificial Sequence: Synthetic coding sequence
  source 1..336: mol_type = other DNA
atgggagaccctgccccagcccggagcctggatgacatcgacctgagcgccctgcgggccctgtggttccagttcttctaccacagcggcagcagcctggagagccctggcatgctgaatggccccttccagcacaggaacagccgcatcatgacccacaggtctgctgagaagaccctgctgggcagcctgagcctgtggcgctggagcgccatggagcccacagaccgctgcaccagggtgggcatgagcagaagaggctcctggctgcccagccgctcctggatgagcaggaggaccaggaggaagaggagcaacagaagaagcacctgctag

SEQ ID NO: 159843 - DNA, 1014 bp, synthetic construct
  misc_feature 1..1014: note = Description of Artificial Sequence: Synthetic coding sequence
  source 1..1014: mol_type = other DNA
atgggcgccgccggcagcagcgccctggccaggtttgtgctgctggcccagagccggcccggctggctgggcgtggccgccctgggcctgacagctgtggccctgggcgctgtggcctggaggcgggcctggcccaccaggagaagaaggctgctgcagcaggtgggcaccgtggcccagctgtggatctaccctgtgaagagctgcaagggcgtgcctgtgtctgaggccgagtgcacagccatgggcctgcggagcggcaacctgcgggaccgcttctggctggtgatcaaccaggagggcaacatggtgacagcccggcaggagccccggctggtgctgatcagcctgacctgtgatggagacaccctgaccctgtctgctgcctacaccaaggacctgctgctgcccatcaagacccccaccaccaatgctgtgcacaagtgccgggtgcacggcctggagattgagggccgggactgtggggaggccacagcccagtggatcaccagcttcctgaagagccagccctaccgcctggtgcactttgagccccacatgaggccccggcggccccaccagattgctgacctcttccggcccaaggaccagatcgcctacagcgacaccagccccttcctgatcctgtctgaggccagcctggccgacctgaacagccggctggagaagaaggtgaaggccaccaacttccggcccaacatcgtcatcagcggctgtgatgtgtatgcagaagattcctgggatgagctgctgattggagatgtggagctgaagagggtgatggcctgcagccgctgcatcctgaccaccgtggaccctgacaccggggtgatgagcaggaaggagcccctggagaccctgaagagctaccggcagtgtgaccccagcgagaggaagctgtatggcaagagccccctgtttggccagtactttgtgctggagaaccctggcaccatcaaggtgggggaccctgtgtacctgctgggccagtag

SEQ ID NO: 159844 - DNA, 774 bp, synthetic construct
  misc_feature 1..774: note = Description of Artificial Sequence: Synthetic coding sequence
  source 1..774: mol_type = other DNA
atgggcgccagcagcagcagcgccctggcccggctgggcctgcctgcccggccctggccccgctggctgggcgtggccgccctgggcctggccgctgtggccctgggcaccgtggcctggaggcgggcctggcccaggagaagaagaaggctgcagcaggtgggcaccgtggccaagctgtggatctaccctgtgaagagctgcaagggcgtgcctgtgtctgaggctgaatgtacagccatgggcctgcggagcggcaacctgcgggaccgcttctggctggtgatcaaggaggatggccacatggtgacagcccggcaggagccccggctggtgctgatcagcatcatctatgagaacaactgcctgatcttccgggccccagacatggaccagctggtgctgcccagcaagcagcccagcagcaacaagctgcacaactgccgcatcttcggcctggacatcaagggccgggactgtggaaatgaggccgccaagtggttcaccaacttcctgaagacagaggcctaccgcctggtgcagtttgagaccaacatgaagggccgcaccagcaggaagctgctgcccaccctggaccagaacttccaggtggcctacccagactactgccccctgctgatcatgacagatgccagcctggtggacctgaacaccaggatggagaagaagatgaagatggagaacttccggcccaacatcgtggtgacaggctgtgatgcctttgaggaggccagcgccacccggcgggactag

SEQ ID NO: 159845 - DNA, 1008 bp, synthetic construct
  misc_feature 1..1008: note = Description of Artificial Sequence: Synthetic coding sequence
  source 1..1008: mol_type = other DNA
atgggcgccagcagcagcagcgccctggcccggctgggcctgcctgcccggccctggccccgctggctgggcgtggccgccctgggcctggccgctgtggccctgggcaccgtggcctggaggcgggcctggcccaggagaagaagaaggctgcagcaggtgggcaccgtggccaagctgtggatctaccctgtgaagagctgcaagggcgtgcctgtgtctgaggctgaatgtacagccatgggcctgcggagcggcaacctgcgggaccgcttctggctggtgatcaaggaggatggccacatggtgacagcccggcaggagccccggctggtgctgatcagcatcatctatgagaacaactgcctgatcttccgggccccagacatggaccagctggtgctgcccagcaagcagcccagcagcaacaagctgcacaactgccgcatcttcggcctggacatcaagggccgggactgtggaaatgaggccgccaagtggttcaccaacttcctgaagacagaggcctaccgcctggtgcagtttgagaccaacatgaagggccgcaccagcaggaagctgctgcccaccctggaccagaacttccaggtggcctacccagactactgccccctgctgatcatgacagatgccagcctggtggacctgaacaccaggatggagaagaagatgaagatggagaacttccggcccaacatcgtggtgacaggctgtgatgcctttgaggaggacacctgggatgagctgctgattggctctgtggaggtgaagaaggtgatggcctgcccccgctgcatcctgaccaccgtggaccctgacacaggagtcatcgacaggaagcagcccctggacaccctgaagagctaccgcctgtgtgaccccagcgagcgggagctgtacaagctgagccccctgtttggcatctactacagcgtggagaagattggcagcctgcgggtgggggaccctgtgtacaggatggtgtag

SEQ ID NO: 159846 - DNA, 519 bp, synthetic construct
  misc_feature 1..519: note = Description of Artificial Sequence: Synthetic coding sequence
  source 1..519: mol_type = other DNA
ggccacatggtgacagcccggcaggagccccggctggtgctgatcagcatcatctatgagaacaactgcctgatcttccgggccccagacatggaccagctggtgctgcccagcaagcagcccagcagcaacaagctgcacaactgccgcatcttcggcctggacatcaagggccgggactgtggaaatgaagctgccaagtggttcaccaacttcctgaagacagaggcctaccgcctggtgcagtttgagaccaacatgaagggccgcaccagcaggaagctgctgcccaccctggaccagaacttccaggtggcctacccagactactgccccctgctgatcatgacagatgccagcctggtggacctgaacaccaggatggagaagaagatgaagatggagaacttccggcccaacatcgtggtgacaggctgtgatgcctttgaggaggacacctgggatgagctgctgattggctctgtggaggtgaagaaggtgatggcctgccccaggtag

SEQ ID NO: 159847 - DNA, 447 bp, synthetic construct
  misc_feature 1..447: note = Description of Artificial Sequence: Synthetic coding sequence
  source 1..447: mol_type = other DNA
atgccctttgctgaggacaagacctacaagtacatctgcaggaacttcagcaacttctgcaatgtggatgtggtggagatcctgccctacctgccctgcctgacagcccgggaccaggaccggctgcgggccacctgcaccctgagcggcaacagagacaccctgtggcacctgttcaacaccctgcagctgcccacctgggccggggaggagaccccaggcggccagagcagcggccggggcctggacttcagcagcctgaccagcggggctgtgtggctgtggcagatgtctgacttctggagctgcttcagcacctggacagtgtccatctggctgatcctgcactgggtgctgctgcggctgaacctgcaggtgtttgccaagtgcctggcccagagcaagtggcccctgctgctgcccagcctgagctgccccacctggtag

SEQ ID NO: 159848 - DNA, 375 bp, synthetic construct
  misc_feature 1..375: note = Description of Artificial Sequence: Synthetic coding sequence
  source 1..375: mol_type = other DNA
atgccctttgctgaggacaagacctacaagtacatctgcaggaacttcagcaacttctgcaatgtggatgtggtggagatcctgccctacctgccctgcctgacagcccgggaccaggaccggctgcgggccacctgcaccctgagcggcaacagagacaccctgtggcacctgttcaacaccctgcagaggcggcccggctgggtggagtacttcatcgccgccctgcggggctgtgagctggtggacctggctgatgaggtggcctctgtgtaccagagctaccagccccagttccgggccagccctgcagatgcccagccccagagccaccccaaggagagccgctggtggcccccaggagtgctgctgtag

SEQ ID NO: 159849 - DNA, 1200 bp, synthetic construct
  misc_feature 1..1200: note = Description of Artificial Sequence: Synthetic coding sequence
  source 1..1200: mol_type = other DNA
atgcctgtgcaggagacccaggcccctgagagccctggagagaacagcgagcaggccctgcagaccctgagcccccgggccatccccaggaacccagatggcggccccctggagagcagcagtgacctggccgccctgagccccctgaccagcagcggccaccaggagcaggacacagagctgggcagcacccacacagctggggccaccagcagcctgacccccagccggggccctgtgagccccagcgtgtccttccagcccctggcccggagcaccccccgggccagccggctgcccggccccactggatctgtggtgtccacaggcaccagcttcagcagcagcagccctggcctggccagcgctggagctgctgagggcaagcagggcgctgagagtgaccaggccgagcccatcatctgcagcagcggggctgaggccccagccaacagcctgcccagcaaggtgcccaccaccctgatgcctgtgaacacagtggccctgaaggtgcctgccaacccagcctctgtgtccacagtgcccagcaagctgcccaccagcagcaagcccccaggagctgtgcccagcaatgccctgaccaacccagcccccagcaagctgcccatcaacagcaccagggctggcatggtgcccagcaaggtgcccacctccatggtgctgaccaaggtgtctgccagcacagtgcccacagatggcagcagcagaaatgaggagaccccagctgcccccaccccagctggggccactggaggcagcagcgcctggctggacagcagcagtgaaaatagaggcctgggcagcgagctgagcaagccaggagtgctggccagccaggtggacagccccttcagcggctgctttgaggacctggccatcagcgccagcaccagcctgggcatgggcccctgccacggccctgaggagaatgagtacaagtctgagggcaccttcggcatccacgtggccgagaaccccagcatccagctgctggagggcaaccctggccccccagctgaccctgatggcggcccccggccccaggccgacaggaagttccaggagcgggaggtgccctgccaccggcccagccctggggccctgtggctgcaggtggccgtgactggagtgctggtggtgaccctgctggtggtgctgtacagaagaaggctgcactag

SEQ ID NO: 159850 - DNA, 1623 bp, synthetic construct
  misc_feature 1..1623: note = Description of Artificial Sequence: Synthetic coding sequence
  source 1..1623: mol_type = other DNA
atgccctttgctgaggacaagacctacaagtacatctgcaggaacttcagcaacttctgcaatgtggatgtggtggagatcctgccctacctgccctgcctgacagcccgggaccaggaccggctgcgggccacctgcaccctgagcggcaacagagacaccctgtggcacctgttcaacaccctgcagaggcggcccggctgggtggagtacttcatcgccgccctgcggggctgtgagctggtggacctggctgatgaggtggcctctgtgtaccagagctaccagcccaggaccagtgaccggcccccagaccccctggagccccccagcctgcctgctgagaggcctggcccccccaccccagctgctgcccacagcatcccctacaacagctgccgggagaaggagcccagctaccccatgcctgtgcaggagacccaggcccctgagagccctggagaaaattctgagcaggccctgcagaccctgagcccccgggccatccccagaaatccagatggcggccccctggagagcagcagtgacctggccgccctgagccccctgaccagcagcggccaccaggagcaggacacagagctgggcagcacccacacagctggggccaccagcagcctgacccccagccggggccctgtgagccccagcgtgtccttccagcccctggcccggagcaccccccgggccagccggctgcccggccccaccggctctgtggtgtccacaggcaccagcttcagcagcagcagccctggcctggccagcgctggagctgctgagggcaagcagggcgctgagagtgaccaggccgagcccatcatctgcagcagtggagctgaggccccagccaacagcctgcccagcaaggtgcccaccaccctgatgcctgtgaacacagtggccctgaaggtgcctgccaacccagcctctgtgtccacagtgcccagcaagctgcccaccagcagcaagcccccaggagctgtgcccagcaatgccctgaccaacccagcccccagcaagctgcccatcaacagcacccgggccggcatggtgcccagcaaggtgcccacctccatggtgctgaccaaggtgtctgccagcacagtgcccacagatggcagcagcagaaatgaggagaccccagctgcccccaccccagctggggccaccggcggcagcagcgcctggctggacagcagcagcgagaacagaggcctgggcagcgagctgagcaagccaggagtgctggccagccaggtggacagccccttcagcggctgctttgaggacctggccatcagcgccagcaccagcctgggcatgggcccctgccacggcccagaagaaaatgagtacaagtctgagggcaccttcggcatccacgtggccgagaaccccagcatccagctgctggagggcaaccctggccccccagctgaccctgatggcggcccccggccccaggccgacaggaagttccaggagcgggaggtgccctgccaccggcccagccctggggccctgtggctgcaggtggccgtgactggagtgctggtggtgaccctgctggtggtgctgtacagaagaaggctgcactag

SEQ ID NO: 159851 - DNA, 993 bp, synthetic construct
  misc_feature 1..993: note = Description of Artificial Sequence: Synthetic coding sequence
  source 1..993: mol_type = other DNA
atggctgctgctgctggccgcagcctgctgctgctgctgagcagcagaggaggcggcggcggcggggccggcggctgtggggccctgacagctggctgcttccctggcctgggcgtgagccgccaccggcagcagcagcaccacaggacagtgcaccagagaattgcctcctggcagaacctgggcgctgtgtactgcagcacagtggtgcccagtgatgatgtgacagtggtgtaccagaatggcctgcccgtcatctctgtgcggctgcccagcagaagagagcgctgccagttcaccctgaagcccatcagtgacagcgtgggcgtcttcctgcggcagctgcaggaggaggaccggggcatcgacagagtggccatctacagcccagatggagtgcgggtggccgccagcactggaattgacctgctgctgctggatgacttcaagctggtgatcaatgacctgacctaccacgtgcggccccccaagagggtggagatgggcttctgccacgtgggccagaatggatttgagctgctgaccagcagctacctgcctgccagcgccagccagagcgctgagatcatcgctgtgagaattgagatcagcaggaaggccgagaagaggaccaccctggtgctgtggggcggcctggcctacatggccacccagtttggcatcctggcccggctgacctggtgggagtacagctgggacatcatggagcctgtgacctacttcatcacctacggcagcgccatggccatgtatgcctactttgtgatgacccggcaggagtatgtgtacccagaggcccgggaccggcagtacctgctcttcttccacaagggggccaagaagagcagatttgacctggagaagtacaaccagctgaaggatgccatcgcccaggccgagatggacctgaagaggctgcgggaccccctgcaggtgcacctgcccctgcggcagatcggggagaaggactag

SEQ ID NO: 159852 - DNA, 1056 bp, synthetic construct
  misc_feature 1..1056: note = Description of Artificial Sequence: Synthetic coding sequence
  source 1..1056: mol_type = other DNA
atggctgctgctgctggccgcagcctgctgctgctgctgagcagcagaggaggcggcggcggcggggccggcggctgtggggccctgacagctggctgcttccctggcctgggcgtgagccgccaccggcagcagcagcaccacaggacagtgcaccagagaattgcctcctggcagaacctgggcgctgtgtactgcagcacagtggtgcccagtgatgatgtgacagtggtgtaccagaatggcctgcccgtcatctctgtgcggctgcccagcagaagagagcgctgccagttcaccctgaagcccatcagtgacagcgtgggcgtcttcctgcggcagctgcaggaggaggaccggggcatcgacagagtggccatctacagcccagatggagtgcgggtggccgccagcactggaattgacctgctgctgctggatgacttcaagctggtgatcaatgacctgacctaccacgtgcggccccccaagagggacctgctgagccatgaaaatgctgccaccctgaatgatgtgaagaccctggtgcagcagctgtacaccaccctgtgcatcgagcagcaccagctgaacaaggagcgggagctgattgaaaggctggaggacctgaaggagcagctggcccccctggagaaggtgcgcatcgagatcagcaggaaggccgagaagaggaccaccctggtgctgtggggcggcctggcctacatggccacccagtttggcatcctggcccggctgacctggtgggagtacagctgggacatcatggagcctgtgacctacttcatcacctacggcagcgccatggccatgtatgcctactttgtgatgacccggcaggagtatgtgtacccagaggcccgggaccggcagtacctgctcttcttccacaagggggccaagaagagcagatttgacctggagaagtacaaccagctgaaggatgccatcgcccaggccgagatggacctgaagaggctgcgggaccccctgcaggtgcacctgcccctgcggcagattggagagaaggactag

SEQ ID NO: 159853 - DNA, 909 bp, synthetic construct
  misc_feature 1..909: note = Description of Artificial Sequence: Synthetic coding sequence
  source 1..909: mol_type = other DNA
atggtgcaccagagaattgcctcctggcagaacctgggcgctgtgtactgcagcacagtggtgcccagtgatgatgtgacagtggtgtaccagaatggcctgcctgtgatctctgtgcggctgcccagccggcgggagcgctgccagttcaccctgaagcccatcagtgacagcgtgggcgtcttcctgcggcagctgcaggaggaggaccggggcatcgacagagtggccatctacagcccagatggagtgcgggtggccgccagcacaggcatcgacctgctgctgctggatgacttcaagctggtgatcaatgacctgacctaccacgtgcggccccccaagagggacctgctgagccatgaaaatgctgccaccctgaatgatgtgaagaccctggtgcagcagctgtacaccaccctgtgcatcgagcagcaccagctgaacaaggagcgggagctgattgagcggctggaggacctgaaggagcagctggcccccctggagaaggtgagaattgagatcagcaggaaggccgagaagaggaccaccctggtgctgtggggcggcctggcctacatggccacccagtttggcatcctggcccggctgacctggtgggagtacagctgggacatcatggagcctgtgacctacttcatcacctacggcagcgccatggccatgtatgcctactttgtgatgacccggcaggagtatgtgtacccagaggcccgggaccggcagtacctgctcttcttccacaagggggccaagaagagcagatttgacctggagaagtacaaccagctgaaggatgccatcgcccaggccgagatggacctgaagaggctgcgggaccccctgcaggtgcacctgcccctgcggcagatcggggagaaggactag

SEQ ID NO: 159854 - DNA, 912 bp, synthetic construct
  misc_feature 1..912: note = Description of Artificial Sequence: Synthetic coding sequence
  source 1..912: mol_type = other DNA
atggctgatgctgccagccaggtgctgctgggcagcggcctgaccatcctgagccagcccctgatgtatgtgaaggtgctgatccaggtgggctatgagcccctgccccccaccatcggcaggaacatcttcggccggcaggtgtgccagctgcccggcctcttctcctatgcccagcacatcgccagcattgatggaagaagaggcctcttcaccggcctgaccccccggctgtgcagcggcgtgctgggcaccgtggtgcacggcaaggtgctgcagcactaccaggagagtgacaagggggaggagctgggccctggaaatgtgcagaaggaggtgagcagcagctttgaccacgtgatcaaggagaccacccgggagatgattgcccggtctgctgccaccctcatcacccaccccttccacgtgatcaccctgcgctccatggtgcagttcatcggccgggagagcaagtactgcggcctgtgtgacagcatcatcaccatctaccgggaggagggcatcctgggcttctttgctggcctggtgccccggctgctgggggacatcctgagcctgtggctgtgcaacagcctggcctacctggtgaacacctacgccctggacagcggcgtgtccaccatgaatgagatgaagagctacagccaggccgtgacaggcttctttgcctccatgctgacctacccctttgtgctggtgagcaacctgatggctgtgaacaactgtggcctggccggcggctgccccccctacagccccatctacacctcctggattgactgctggtgcatgctgcagaaggagggcaacatgagccggggcaacagcctcttcttcaggaaggtgccctttgggaagacctactgctgtgacctgaagatgctgatctag

SEQ ID NO: 159855 - DNA, 468 bp, synthetic construct
  misc_feature 1..468: note = Description of Artificial Sequence: Synthetic coding sequence
  source 1..468: mol_type = other DNA
atggtgcagttcatcggccgggagagcaagtactgcggcctgtgtgacagcatcatcaccatctaccgggaggagggcatcctgggcttctttgctggcctggtgccccggctgctgggggacatcctgagcctgtggctgtgcaacagcctggcctacctggtgaacacctacgccctggacagcggcgtgtccaccatgaatgagatgaagagctacagccaggccgtgacaggcttctttgcctccatgctgacctacccctttgtgctggtgagcaacctgatggctgtgaacaactgtggcctggccggcggctgccccccctacagccccatctacacctcctggattgactgctggtgcatgctgcagaaggagggcaacatgagccggggcaacagcctcttcttcaggaaggtgccctttgggaagacctactgctgtgacctgaagatgctgatctag

SEQ ID NO: 159856 - DNA, 360 bp, synthetic construct
  misc_feature 1..360: note = Description of Artificial Sequence: Synthetic coding sequence
  source 1..360: mol_type = other DNA
atggtgctgcccctgccctggctgagccgctaccacttcctgcggctgctgctgcccagctggagcctggccccccagggcagccacggctgctgcagccagaaccccaaggcctccatggaggagcagaccagcagcagaggaaatggcaagatgaccagccccccccggggccctggcacccacaggacagctgagctggcccgggcagaggagctgctggagcagcagctggagctgtaccaggccctgctggagggccaggagggcgcctgggaggcccaggccctggtgctgaagatccagaagctgaaggagcagatgagaagacaccaggagagcctgggcggcggggcctag

SEQ ID NO: 159857 - DNA, 360 bp, synthetic construct
  misc_feature 1..360: note = Description of Artificial Sequence: Synthetic coding sequence
  source 1..360: mol_type = other DNA
atggtgctgcccctgccctggctgagccgctaccacttcctgcggctgctgctgcccagctggagcctggccccccagggcagccacggctgctgcagccagaaccccaaggcctccatggaggagcagaccaacagcagaggaaatggcaagatgaccagccccccccggggccctggcacccacaggacagctgagctggcccgggcagaggagctgctggagcagcagctggagctgtaccaggccctgctggagggccaggagggcgcctgggaggcccaggccctggtgctgaagatccagaagctgaaggagcagatgagaagacaccaggagagcctgggcggcggggcctag

SEQ ID NO: 159858 - DNA, 360 bp, synthetic construct; identical to SEQ ID NO: 159857
  misc_feature 1..360: note = Description of Artificial Sequence: Synthetic coding sequence
  source 1..360: mol_type = other DNA

SEQ ID NO: 159859 - DNA, 360 bp, synthetic construct; identical to SEQ ID NO: 159856
  misc_feature 1..360: note = Description of Artificial Sequence: Synthetic coding sequence
  source 1..360: mol_type = other DNA

SEQ ID NO: 159860 - DNA, 360 bp, synthetic construct; identical to SEQ ID NO: 159856
  misc_feature 1..360: note = Description of Artificial Sequence: Synthetic coding sequence
  source 1..360: mol_type = other DNA

SEQ ID NO: 159861 - DNA, 360 bp, synthetic construct
  misc_feature 1..360: note = Description of Artificial Sequence: Synthetic coding sequence
  source 1..360: mol_type = other DNA
atggtgctgcccctgccctggctgagccgctaccacttcctgcggctgctgctgcccagctggagcctggccccccagggcagccacggctgctgcagccagaaccccaaggcctccatggagaagcagaccaacagcagaggaaatggcaagatgaccagccccccccggggccctggcacccacaggacagctgagctggcccgggcagaggagctgctggagcagcagctggagctgtaccaggccctgctggagggccaggagggcgcctgggaggcccaggccctggtgctgaagatccagaagctgaaggagcagatgagaagacaccaggagagcctgggcggcggggcctag

SEQ ID NO: 159862 - DNA, 360 bp, synthetic construct; identical to SEQ ID NO: 159857
  misc_feature 1..360: note = Description of Artificial Sequence: Synthetic coding sequence
  source 1..360: mol_type = other DNA

SEQ ID NO: 159863 - DNA, 360 bp, synthetic construct; identical to SEQ ID NO: 159857
  misc_feature 1..360: note = Description of Artificial Sequence: Synthetic coding sequence
  source 1..360: mol_type = other DNA

SEQ ID NO: 159864 - DNA, 1059 bp, synthetic construct
  misc_feature 1..1059: note = Description of Artificial Sequence: Synthetic coding sequence
  source 1..1059: mol_type = other DNA
atggagagcggcggccggcccagcctgtgccagttcatcctgctgggcaccacctctgtggtgacagctgccctgtacagcgtgtaccggcagaaggcccgggtgtcccaggagctgaagggggccaagaaggtgcacctgggggaggacctgaagagcatcctgtctgaggcccctggaaaatgtgtgccctatgctgtgattgagggcgctgtgcgctctgtgaaggagaccctgaacagccagtttgtggagaactgcaagggcgtcatccagaggctgaccctgcaggagcacaagatggtgtggaacagaaccacccacctgtggaatgactgcagcaagatcatccaccagaggaccaacacagtgccctttgacctggtgccccatgaagatggagtggatgtggccgtgcgggtgctgaagcccctggacagcgtggacctgggcctggagaccgtgtatgagaagttccaccccagcatccagagcttcacagatgtgattggccactacatctctggagagcggcccaagggcatccaggagacagaggagatgctgaaggtgggcgccaccctgactggagtgggggagctggtgctggacaacaacagcgtgcggctgcagccccccaagcagggcatgcagtactacctgagcagccaggactttgacagcctgctgcagaggcaggagagctctgtgcggctgtggaaggtgctggccctggtgtttggatttgccacctgtgccaccctcttcttcatcctgaggaagcagtacctgcagaggcaggagcggctgcggctgaagcagatgcaggaggagttccaggagcacgaggcccagctgctgagccgggccaagccagaagatcgggagagcctgaagagcgcctgtgtggtgtgcctgagcagcttcaagagctgtgtgttcctggagtgtggccacgtgtgcagctgcacagagtgctaccgggccctgcctgagcccaagaagtgccccatctgccggcaggccatcaccagggtcatccccctgtacaacagctag

SEQ ID NO: 159865 - DNA, 2142 bp, synthetic construct
  misc_feature 1..2142: note = Description of Artificial Sequence: Synthetic coding sequence
  source 1..2142: mol_type = other DNA
atgctgtgtgtgggccgcctgggcggcctgggcgcccgggctgctgccctgcccccccggcgggccggccggggcagcctggaggccggcatccgggcccggcgggtgtccacctcctggagccctgtgggcgccgccttcaacgtgaagccccagggcagccggctggacctgtttggagagcggcggggcctgtttggagtgcctgagctgagcgcccctgagggcttccacatcgcccaggagaaggccctgaggaagacagagctgctggtggaccgggcctgcagcaccccacctggcccccagacagtgctgatctttgatgagctgagtgacagcctgtgccgggtggccgacctggccgactttgtgaagatcgcccaccctgagcccgccttccgggaggccgctgaggaggcctgccgcagcatcggcaccatggtggagaagctgaacaccaacgtggacctgtaccagagcctgcagaagctgctggccgacaagaagctggtggacagcctggaccctgagacccggcgggtggccgagctgttcatgtttgattttgagatcagcggcatccacctggacaaggagaagaggaagagagctgtggacctgaatgtgaagatcctggacctgagcagcaccttcctgatgggcaccaacttccccaacaagattgagaagcacctgctgcctgagcacatcagaagaaacttcaccagcgctggggaccacatcatcattgatggcctgcacgccgagagcccagatgacctggtgcgggaggccgcctacaagatcttcctgtacccaaatgccggccagctgaagtgcctggaggagctgctgagcagccgggacctgctggccaagctggtgggctacagcaccttcagccaccgggccctgcagggcaccatcgccaagaaccctgagaccgtgatgcagttcctggagaagctgagtgacaagctgtctgagaggaccctgaaggactttgagatgatccggggcatgaagatgaagctgaacccccagaacagcgaggtgatgccctgggaccccccctactacagcggggtcatccgggcagagcgctacaacatcgagcccagcctgtactgccccttcttcagcctgggcgcctgcatggagggcctgaacatcctgctgaaccggctgctgggcatcagcctgtatgcagagcagcctgccaagggggaggtgtggagcgaagatgtgaggaagctggccgtggtgcatgagagcgagggcctgctgggctacatctactgtgacttcttccagagagctgacaagccccaccaggactgccacttcaccatccggggcggccgcctgaaggaggatggagactaccagctgcctgtggtggtgctgatgctgaacctgcccaggagcagccgcagcagccccaccctgctgacccccagcatgatggagaacctcttccacgagatgggccacgccatgcacagcatgctgggccgcacccgctaccagcacgtgacaggcacccgctgccccacagactttgctgaggtgcccagcatcctgatggagtactttgccaatgactacagagtggtgaaccagtttgcccggcactaccagacaggccagcccctgcccaagaacatggtgtcccggctgtgtgagagcaagaaggtgtgtgccgctgctgacatgcagctgcaggtgttctacgccaccctggaccagatctaccacggcaagcaccccctgaggaacagcaccacagacatcctgaaggagacccaggagaagttctacggcctgccctacgtgcccaacacagcctggcagctgcgcttcagccacctggtgggctacggggcccgctactacagctacctgatgagcagagctgtggcctccatggtgtggaaggagtgcttcctgcaggaccccttcaacagagctgctggggagcgctaccgccgggagatgctggcccacggcggcggccgggagcccatgctgatggtggagggcatgctgcagaagtgccccagcgtggatgactttgtgtctgccctggtgtctgacctggacctggactttgagaccttcctgatggacagcgagtag

SEQ ID NO: 159866 - DNA, 1353 bp, synthetic construct; identical to SEQ ID NO: 148628
  misc_feature 1..1353: note = Description of Artificial Sequence: Synthetic coding sequence
  source 1..1353: mol_type = other DNA

SEQ ID NO: 159867 - DNA, 1170 bp, synthetic construct
  misc_feature 1..1170: note = Description of Artificial Sequence: Synthetic coding sequence
  source 1..1170: mol_type = other DNA
atgagggtgctggtgcggcgctgctggggcccccccctggcccatggagcccggcggggccggcccagcccccagtggagggccctggcccggctgggctgggaggactgccgggacagccgggtgcgggagaagccaccctggagggtgctcttctttggaacagaccagtttgcccgggaggccctgcgggccctgcacgccgcccgggagaacaaggaggaggagctgattgacaagctggaggtggtgaccatgcccagccccagccccaagggcctgcctgtgaagcagtatgctgtgcagagccagctgcctgtgtatgagtggccagatgtgggcagcggggagtatgatgtgggcgtggtggccagctttggccgcctgctgaatgaggccctgatcctgaagttcccctacggcatcctgaatgtgcaccccagctgcctgccccgctggaggggccctgcccctgtgatccacacagtgctgcatggagacacagtgactggagtgaccatcatgcagatccggcccaagagatttgatgtgggccccatcctgaagcaggagaccgtgcctgtgccccccaagagcacagccaaggagctggaggccgtgctgagccggctgggcgccaacatgctgatctctgtgctgaagaacctgcctgagagcctgagcaatggccggcagcagcccatggagggcgccacctacgcccccaagatctctgctggcaccagctgcatcaagtgggaggagcagaccagcgagcagatcttccggctgtaccgggccatcggcaacatcatccccctgcagaccctgtggatggccaacaccatcaagctgctggacctggtggaggtgaacagctctgtgctggccgaccccaagctgaccggccaggccctgatccctggcagcgtcatctaccacaagcagagccagatcctgctggtgtactgcaaggatggctggattggagtgcgctctgtgatgctgaagaagagcctgacagccacagacttctacaacggctacctgcacccctggtaccagaagaacagccaggcccagcccagccagtgccgcttccagaccctgcggctgcccaccaagaagaagcagaagaagacagtggccatgcagcagtgcatcgagtag

SEQ ID NO: 159868 - DNA, 1749 bp, synthetic construct
  misc_feature 1..1749: note = Description of Artificial Sequence: Synthetic coding sequence
  source 1..1749: mol_type = other DNA
atggctgtgcctggggtgggcctgctgacccggctgaacctgtgtgcccggcggaggaccagggtgcagaggcccatcgtgcggctgctgagctgccccggcaccgtggccaaggacctgcggagagatgagcagcccagcggctctgtggagaccggctttgaggacaagatccccaagaggcgcttcagcgagatgcagaatgaaagaagagagcaggcccagaggacagtgctgatccactgcccagagaagatcagcgagaacaagttcctgaagtacctgagccagtttggccccatcaacaaccacttcttctatgagagctttggcctgtatgctgtggtggagttctgccagaaggagagcatcggcagcctgcagaatggcacccacacccccagcacagccatggagacagccatccccttccgcagccgcttcttcaacctgaagctgaagaaccagaccagcgagaggagccgggtgcgcagcagcaaccagctgcccaggagcaacaagcagctgtttgagctgctgtgctacgccgagagcattgatgaccagctgaacaccctgctgaaggagttccagctgacagaggagaacaccaagctgcgctacctgacctgcagcctgattgaggacatggctgctgcctacttcccagactgcatcgtgcggcccttcggcagctctgtgaacaccttcggcaagctgggctgtgacctggacatgttcctggacctggatgagaccaggaacctgagcgcccacaagatcagcggcaacttcctgatggagttccaggtgaagaatgtgcccagcgagagaattgccacccagaagatcctgtctgtgctgggggagtgcctggaccactttggacctggctgtgtgggcgtgcagaagatcctgaatgcccgctgccccctggtgcgcttcagccaccaggccagcggcttccagtgtgacctgaccaccaacaaccgcatcgccctgaccagcagcgagctgctgtacatctatggagccctggacagccgggtgcgggccctggtgttttctgtgcgctgctgggcccgggcccacagcctgaccagcagcatccctggggcctggatcaccaacttcagcctgaccatgatggtgatcttcttcctgcagaggaggagcccccccatcctgcccaccctggacagcctgaagaccctggctgatgctgaagataaatgtgtgattgagggcaacaactgcacctttgtgcgggacctgagccgcatcaagcccagccagaacacagagaccctggagctgctgctgaaggagttctttgagtacttcggcaactttgcctttgacaagaacagcatcaacatccggcagggccgggagcagaacaagccagacagcagccccctgtacatccagaacccctttgagaccagcctgaacatcagcaagaatgtgtcccagagccagctgcagaagtttgtggacctggcccgggagagcgcctggatcctgcagcaggaggacacagaccggcccagcatcagcagcaaccggccctggggcctggtgtccctgctgctgcccagcgcccccaacaggaagagcttcaccaagaagaagagcaacaagtttgccattgaaacagtgaagaacctgctggagagcctgaagggcaacagaacagagaacttcaccaagaccagcggcaagaggaccatcagcacccagacctag

SEQ ID NO: 159869 - DNA, 2139 bp, synthetic construct
  misc_feature 1..2139: note = Description of Artificial Sequence: Synthetic coding sequence
  source 1..2139: mol_type = other DNA
atggcctgggccaagaaggtgggcggccgggccggccagggccgcagcctgagccgctgtgaccccatcatcctggaccctgagtggctgtatggccccccagagggggagggcggccctgagggcgtgggcggggagacccgggccagcatccacccccccctgaggacaggccgccaccaccagaaggtgaaccacaacatccggggccctgagggcagcgccaaggatgctgcccctgggggcggcggccaccaccaggccggccctggccagagaggagatgaagatggagccctgcagcacctgtgtggcggcggcggcggcgtgggcgtgtctgtgggccggggcaccggcacctctgtggccgctgagcaccccagcctgcaggtgaagctgctggagctgcaggagctggtgctgcggctggccggggaccacaatgaaggacatggcaagttcctggccgccgcccagaacccagcagatgatcctgcccctggggccccagccccccaggagctgggcgctgctgacaagcagggcggctttgaggacaagatccccaagaggcgcttcagcgagatgcagaatgaaagaagagagcaggcccagaggacagtgctgatccactgcccagagaagatcagcgagaacaagttcctgaagtacctgagccagtttggccccatcaacaaccacttcttctatgagagctttggcctgtatgctgtggtggagttctgccagaaggagagcatcggcagcctgcagaatggcacccacacccccagcacagccatggagacagccatccccttccgcagccgcttcttcaacctgaagctgaagaaccagaccagcgagaggagccgggtgcgcagcagcaaccagctgcccaggagcaacaagcagctgtttgagctgctgtgctacgccgagagcattgatgaccagctgaacaccctgctgaaggagttccagctgacagaggagaacaccaagctgcgctacctgacctgcagcctgattgaggacatggctgctgcctacttcccagactgcatcgtgcggcccttcggcagctctgtgaacaccttcggcaagctgggctgtgacctggacatgttcctggacctggatgagaccaggaacctgagcgcccacaagatcagcggcaacttcctgatggagttccaggtgaagaatgtgcccagcgagagaattgccacccagaagatcctgtctgtgctgggggagtgcctggaccactttggacctggctgtgtgggcgtgcagaagatcctgaatgcccgctgccccctggtgcgcttcagccaccaggccagcggcttccagtgtgacctgaccaccaacaaccgcatcgccctgaccagcagcgagctgctgtacatctatggagccctggacagccgggtgcgggccctggtgttttctgtgcgctgctgggcccgggcccacagcctgaccagcagcatccctggggcctggatcaccaacttcagcctgaccatgatggtgatcttcttcctgcagaggaggagcccccccatcctgcccaccctggacagcctgaagaccctggctgatgctgaagataaatgtgtgattgagggcaacaactgcacctttgtgcgggacctgagccgcatcaagcccagccagaacacagagaccctggagctgctgctgaaggagttctttgagtacttcggcaactttgcctttgacaagaacagcatcaacatccggcagggccgggagcagaacaagccagacagcagccccctgtacatccagaacccctttgagaccagcctgaacatcagcaagaatgtgtcccagagccagctgcagaagtttgtggacctggcccgggagagcgcctggatcctgcagcaggaggacacagaccggcccagcatcagcagcaaccggccctggggcctggtgtccctgctgctgcccagcgcccccaacaggaagagcttcaccaagaagaagagcaacaagtttgccattgaaacagtgaagaacctgctggagagcctgaagggcaacagaacagagaacttcaccaagaccagcggcaagaggaccatcagcacccagacctag

SEQ ID NO: 159870 - DNA, 660 bp, synthetic construct
  misc_feature 1..660: note = Description of Artificial Sequence: Synthetic coding sequence
  source 1..660: mol_type = other DNA
atgcagaatgaaagaagagagcaggcccagaggacagtgctgatccactgcccagagaagatcagcgagaacaagttcctgaagtacctgagccagtttggccccatcaacaaccacttcttctatgagagctttggcctgtatgctgtggtggagttctgccagaaggagagcatcggcagcctgcagaatggcacccacacccccagcacagccatggagacagccatccccttccgcagccgcttcttcaacctgaagctgaagaaccagaccagcgagaggagccgggtgcgcagcagcaaccagctgcccaggagcaacaagcagctgtttgagctgctgtgctacgccgagagcattgatgaccagctgaacaccctgctgaaggagttccagctgacagaggagaacaccaagctgcgctacctgacctgcagcctgattgaggacatggccgccgcctacttcccagactgcatcgtgcggcccttcggcagctctgtgaacaccttcggcaagctgggctgtgacctggacatgttcctggacctggatgagaccaggaacctgagcgcccacaagatcagcggcaacttcctgatggagttccaggtgaagaatgtgcccagcgagcgcatcgccacccagaagatctag

SEQ ID NO: 159871 - DNA, 453 bp, synthetic construct
  misc_feature 1..453: note = Description of Artificial Sequence: Synthetic coding sequence
  source 1..453: mol_type = other DNA
gacctgcggagagatgagcagcccagcggctctgtggagaccggctttgaggacaagatccccaagaggcgcttcagcgagatgcagaatgaaagaagagagcaggcccagaggacagtgctgatccactgcccagagaagatcagcgagaacaagttcctgaagtacctgagccagtttggccccatcaacaaccacttcttctatgagagctttggcctgtatgctgtggtggagttctgccagaaggagagcatcggcagcctgcagaatggcacccacacccccagcacagccatggagacagccatccccttccgcagccgcttcttcaacctgaagctgaagaaccagaccagcgagaggagccgggtgcgcagcagcaaccagctgcccaggagcaacaagcagctgtttgagctgctgtgctacgccgagagcgtgtccttctag

SEQ ID NO: 159872 - DNA, 309 bp, synthetic construct
  misc_feature 1..309: note = Description of Artificial Sequence: Synthetic coding sequence
  source 1..309: mol_type = other DNA
atgttcctgacagccctgctgtggaggggccgcatccctggccggcagtggattggcaagcaccggcggcccaggtttgtgtccctgcgggccaagcagaacatgatccggcggctggagattgaagctgagaaccactactggctgtccatgccctacatgacccgggagcaggagcggggccatgctgctgtgagaagaagagaggcctttgaggccatcaaggctgctgccaccagcaagtttcctccccaccgcttcatcgctgaccagctggaccacctgaatgtgaccaagaagtggagctag

SEQ ID NO: 159873 - DNA, 978 bp, synthetic construct
  misc_feature 1..978: note = Description of Artificial Sequence: Synthetic coding sequence
  source 1..978: mol_type = other DNA
atggctgctgctgtgcgctgcatgggccgggccctgatccaccaccagaggcacagcctgagcaagatggtgtaccagaccagcctgtgcagctgcagcgtgaacatccgggtgcccaacagacactttgctgctgccaccaagagcgccaagaagaccaagaagggggccaaggagaagaccccagatgagaagaaggatgaaattgagaagatcaaggcctacccctacatggagggggagccagaagatgatgtgtacctgaagaggctgtacccccggcagatctatgaggtggagaaggctgtgcacctgctgaagaagttccagatcctggacttcaccagccccaagcagagcgtgtacctggacctgaccctggacatggccctgggcaagaagaagaatgtggagcccttcacctctgtgctgagcctgccctacccctttgccagcgagatcaacaaggtggccgtgttcacagaaaatgccagcgaggtgaagattgctgaggagaatggagctgcctttgctgggggcaccagcctcatccagaagatctgggatgatgagatcgtggccgacttctacgtggccgtgcctgagatcatgcctgagctgaaccggctgaggaagaagctgaacaagaagtaccccaagctgagcagaaattccatcggccgggacatccccaagatgctggagctgttcaagaatggacatgagatcaaggtggatgaggagcgggagaacttcctgcagaccaagatcgccaccctggacatgagcagtgaccagattgctgccaacctgcaggccgtcatcaatgaggtgtgccgccaccggcccctgaacctgggcccctttgtggtgcgggccttcctgcggagcagcaccagcgagggcctgctgctgaagattgaccccctgctgcccaaggaggtgaagaatgaggagagcgagaaggaggatgcctag

SEQ ID NO: 159874 - DNA, 909 bp, synthetic construct
  misc_feature 1..909: note = Description of Artificial Sequence: Synthetic coding sequence
  source 1..909: mol_type = other DNA
atggtgtaccagaccagcctgtgcagctgcagcgtgaacatccgggtgcccaacagacactttgctgctgccaccaagagcgccaagaagaccaagaagggggccaaggagaagaccccagatgagaagaaggatgaaattgagaagatcaaggcctacccctacatggagggggagccagaagatgatgtgtacctgaagaggctgtacccccggcagatctatgaggtggagaaggctgtgcacctgctgaagaagttccagatcctggacttcaccagccccaagcagagcgtgtacctggacctgaccctggacatggccctgggcaagaagaagaatgtggagcccttcacctctgtgctgagcctgccctacccctttgccagcgagatcaacaaggtggccgtgttcacagaaaatgccagcgaggtgaagattgctgaggagaatggagctgcctttgctgggggcaccagcctcatccagaagatctgggatgatgagatcgtggccgacttctacgtggccgtgcctgagatcatgcctgagctgaaccggctgaggaagaagctgaacaagaagtaccccaagctgagcagaaattccatcggccgggacatccccaagatgctggagctgttcaagaatggacatgagatcaaggtggatgaggagcgggagaacttcctgcagaccaagatcgccaccctggacatgagcagtgaccagattgctgccaacctgcaggccgtcatcaatgaggtgtgccgccaccggcccctgaacctgggcccctttgtggtgcgggccttcctgcggagcagcaccagcgagggcctgctgctgaagattgaccccctgctgcccaaggagatcaagagccagcccaagaagaagaagaactag

SEQ ID NO: 159875 - DNA, 816 bp, synthetic construct
  misc_feature 1..816: note = Description of Artificial Sequence: Synthetic coding sequence
  source 1..816: mol_type = other DNA
atgatcagcgcccactgcaacctgcacctgcccggcagcagtgacagccctgccagcgccagccaggtggccggcatcaccggccgcctgcccaccctgcagacagtgcgctatggcagcaaggctgtgaccaggcacagaagagtgatgcacttccagaggcagaagctgatggctgtgacagagtacatcccccccaagccagccatccaccccagctgcctgcccagcccccccagccccccccaggaggagatcggcctcatccggctgctgcggcgggagattgctgctgtgttccaggacaacaggatgattgctgtgtgccagaatgtggccctgtctgctgaggacaagctgctgatgaggcaccagctgaggaagcacaagatcctgatgaaggtgttccccaaccaggtgctgaagcccttcctggaggacagcaagtaccagaacctgctgcccctgtttgtgggccacaacatgctgctggtgtctgaggagcccaaggtgaaggagatggtgcgcatcctgaggacagtgcccttcctgcccctgctgggcggctgcattgatgacaccatcctgagccggcagggcttcatcaactacagcaagctgcccagcctgcccctggtgcagggcgagctggtgggcggcctgacctgcctgacagcccagacccacagcctgctgcagcaccagcccctgcagctgaccaccctgctggaccagtacatccgggagcagcgggagaaggacagcgtgatgtctgccaacgggaagccagaccctgacacagtgcctgacagctag

SEQ ID NO: 159876 - DNA, 786 bp, synthetic construct
  misc_feature 1..786: note = Description of Artificial Sequence: Synthetic coding sequence
  source 1..786: mol_type = other DNA
atggctgctgctgtggccggcatgctgcggggcggcctgctgccccaggccggccgcctgcccaccctgcagacagtgcgctatggcagcaaggctgtgaccaggcacagaagagtgatgcacttccagaggcagaagctgatggctgtgacagagtacatcccccccaagccagccatccaccccagctgcctgcccagcccccccagccccccccaggaggagatcggcctcatccggctgctgcggcgggagattgctgctgtgttccaggacaacaggatgattgctgtgtgccagaatgtggccctgtctgctgaggacaagctgctgatgaggcaccagctgaggaagcacaagatcctgatgaaggtgttccccaaccaggtgctgaagcccttcctggaggacagcaagtaccagaacctgctgcccctgtttgtgggccacaacatgctgctggtgtctgaggagcccaaggtgaaggagatggtgcgcatcctgaggacagtgcccttcctgcccctgctgggcggctgcattgatgacaccatcctgagccggcagggcttcatcaactacagcaagctgcccagcctgcccctggtgcagggcgagctggtgggcggcctgacctgcctgacagcccagacccacagcctgctgcagcaccagcccctgcagctgaccaccctgctggaccagtacatccgggagcagcgggagaaggacagcgtgatgtctgccaacgggaagccagaccctgacacagtgcctgacagctag

SEQ ID NO: 159877 - DNA, 816 bp, synthetic construct; identical to SEQ ID NO: 159875
  misc_feature 1..816: note = Description of Artificial Sequence: Synthetic coding sequence
  source 1..816: mol_type = other DNA

SEQ ID NO: 159878 - DNA, 579 bp, synthetic construct
  misc_feature 1..579: note = Description of Artificial Sequence: Synthetic coding sequence
  source 1..579: mol_type = other DNA
atgagcaagctgggccgggccgcccggggcctgaggaagccagaggtgggcggcgtcatccgggccatcgtgcgggccggcctggccatgcctggcccccccctgggccctgtgctgggccagaggggcgtgtccatcaaccagttctgcaaggagttcaatgaaagaaccaaggacatcaaggagggcatccccctgcccaccaagatcctggtgaagccagacaggacctttgagatcaagattggccagcccaccgtgtcctacttcctgaaggctgctgctggcattgaaaaaggagcccggcagacaggcaaggaggtggccggcctggtgaccctgaagcacgtgtatgagatcgcccgcatcaaggcccaggatgaggcctttgccctgcaggatgtgcccctgagctctgtggtgcgcagcatcatcggcagcgcccggagcctgggcatccgggtggtgaaggacctgagcagcgaggagctggccgccttccagaaggagcgggccatcttcctggccgcccagaaggaggccgacctggccgcccaggaggaggccgccaagaagtag

SEQ ID NO: 159879 - DNA, 546 bp, synthetic construct
  misc_feature 1..546: note = Description of Artificial Sequence: Synthetic coding sequence
  source 1..546: mol_type = other DNA
atgagcaagctgggccgggccgcccggggcctgaggaagccagaggtgggcggcgtcatccgggccatcgtgcgggccggcctggccatgcctggcccccccctgggccctgtgctgggccagaggggcgtgtccatcaaccagttctgcaaggagttcaatgaaagaaccaaggacatcaaggagggcatccccctgcccaccaagatcctggtgaagccagacaggacctttgagatcaagattggccagcccaccgtgtcctacttcctgaaggctgctgctggcattgaaaaaggagcccggcagacaggcaaggaggtggccggcctggtgaccctgaagcacgtgtatgagatcgcccgcatcaaggcccaggatgaggcctttgccctgcaggatgtgcccctgagctctgtggtgcgcagcatcatcggcagcgcccggagcctgggcatccgggtggtgaaggagcgctgcagcgccaacgtgctgagaaatggcaagatctccatgaaggaccccagcggccgcagctctgtgtag

SEQ ID NO: 159880 - DNA, 501 bp, synthetic construct
  misc_feature 1..501: note = Description of Artificial Sequence: Synthetic coding sequence
  source 1..501: mol_type = other DNA
atgagcaagctgggccgggccgcccggggcctgaggaagccagagcggggcgtgtccatcaaccagttctgcaaggagttcaatgaaagaaccaaggacatcaaggagggcatccccctgcccaccaagatcctggtgaagccagacaggacctttgagatcaagattggccagcccaccgtgtcctacttcctgaaggctgctgctggcattgaaaaaggagcccggcagacaggcaaggaggtggccggcctggtgaccctgaagcacgtgtatgagatcgcccgcatcaaggcccaggatgaggcctttgccctgcaggatgtgcccctgagctctgtggtgcgcagcatcatcggcagcgcccggagcctgggcatccgggtggtgaaggacctgagcagcgaggagctggccgccttccagaaggagcgggccatcttcctggccgcccagaaggaggccgacctggccgcccaggaggaggccgccaagaagtag

SEQ ID NO: 159881 - DNA, 891 bp, synthetic construct
  misc_feature 1..891: note = Description of Artificial Sequence: Synthetic coding sequence
  source 1..891: mol_type = other DNA
atggctgctgaggcccgggtgagccgctggtactttggaggcctggccagctgtggggccgcctgctgcacccaccccctggacctgctgaaggtgcacctgcagacccagcaggaggtgaagctgaggatgacaggcatggccctgcgggtggtgaggacagatggcatcctggccctgtacagcggcctgagcgccagcctgtgccggcagatgacctacagcctgaccaggtttgccatctatgagaccgtgcgggacagagtggccaagggcagccagggccccctgcccttccacgagaaggtgctgctgggctctgtgtctggcctggccggcggctttgtgggcaccccagctgacctggtgaatgtgaggatgcagaatgatgtgaagctgccccagggccagaggagaaattatgcccacgccctggatggcctgtacagagtggcccgggaggagggcctgcggcggctcttcagcggggccaccatggccagcagcagaggagccctggtgacagtgggccagctgagctgctatgaccaggccaagcagctggtgctgagcacaggctacctgagtgacaacatcttcacccactttgtggccagcttcatcgctgctgctggagatgagcccccaccccagggcggctgtgccaccttcctgtgccagcccctggatgtgctgaagacccggctgatgaacagcaagggggagtaccagggcgtcttccactgtgctgtggagacagccaagctgggccccctggccttctacaagggcctggtgcctgctggcatccgcctcatcccccacacagtgctgacctttgtgttcctggagcagctgaggaagaactttggcatcaaggtgcccagctag

SEQ ID NO: 159882 - DNA, 537 bp, synthetic construct
  misc_feature 1..537: note = Description of Artificial Sequence: Synthetic coding sequence
  source 1..537: mol_type = other DNA
atgctgcctgctgctgcccggcccctgtggggcccctgcctgggcctgcgggctgctgccttccggctggcccggcggcaggtgccctgtgtgtgtgctgtgcgccacatgaggagcagcggccaccagagatgtgaggccctggccggggcccccctggacaatgcccccaaggagtacccacccaagatccagcagctggtgcaggacatcgccagcctgaccctgctggagatcagtgacctgaatgagctgctgaagaagaccctgaagatccaggatgtgggcctggtgcccatgggcggcgtgatgtctggagctgtgcctgctgctgctgcccaggaggccgtggaggaggacatccccatcgccaaggagaggacccacttcaccgtgcggctgacagaggccaagcctgtggacaaggtgaagctgatcaaggagatcaagaactacatcaaggccagcaccagcagccggcagaggtcctggtggagcccctgccccggcaaccagagccagtgccggcagagctag

SEQ ID NO: 159883 - DNA, 597 bp, synthetic construct
  misc_feature 1..597: note = Description of Artificial Sequence: Synthetic coding sequence
  source 1..597: mol_type = other DNA
atgctgcctgctgctgcccggcccctgtggggcccctgcctgggcctgcgggctgctgccttccggctggcccggcggcaggtgccctgtgtgtgtgctgtgcgccacatgaggagcagcggccaccagagatgtgaggccctggccggggcccccctggacaatgcccccaaggagtacccacccaagatccagcagctggtgcaggacatcgccagcctgaccctgctggagatcagtgacctgaatgagctgctgaagaagaccctgaagatccaggatgtgggcctggtgcccatgggcggcgtgatgtctggagctgtgcctgctgctgctgcccaggaggccgtggaggaggacatccccatcgccaaggagaggacccacttcaccgtgcggctgacagaggccaagcctgtggacaaggtgaagctgatcaaggagatcaagaactacatccagggcatcaacctggtgcaggccaagaagctggtggagagcctgccccaggagatcaaggccaacgtggccaaggccgaggccgagaagatcaaggccgccctggaggccgtgggcggcaccgtggtgctggagtag

SEQ ID NO: 159884 - DNA, 864 bp, synthetic construct
  misc_feature 1..864: note = Description of Artificial Sequence: Synthetic coding sequence
  source 1..864: mol_type = other DNA
atggctgctgaggcccgggtgagccgctggtactttggaggcctggccagctgtggggccgcctgctgcacccaccccctggacctgctgaaggtgcacctgcagacccagcaggaggtgaagctgaggatgacaggcatggccctgcgggtggtgaggacagatggcatcctggccctgtacagcggcctgagcgccagcctgtgccggcagatgacctacagcctgaccaggtttgccatctatgagaccgtgcgggacagagtggccaagggcagccagggccccctgcccttccacgagaaggtgctgctgggctctgtgtctggcctggccggcggctttgtgggcaccccagctgacctggtgaatgtgaggatgcagaatgatgtgaagctgccccagggccagaggagaaattatgcccacgccctggatggcctgtacagagtggcccgggaggagggcctgcggcggctcttcagcggggccaccatggccagcagcagaggagccctggtgacagtgggccagctgagctgctatgaccaggccaagcagctggtgctgagcacaggctacctgagtgacaacatcttcacccactttgtggccagcttcatcgccggcggctgtgccaccttcctgtgccagcccctggatgtgctgaagacccggctgatgaacagcaaaggagagtaccagggcgtcttccactgtgctgtggagacagccaagctgggccccctggccttctacaagggcctggtgcctgctggcatccgcctcatcccccacacagtgctgacctttgtgttcctggagcagctgaggaagaactttggcatcaaggtgcccagctag

SEQ ID NO: 159885 - DNA, 1329 bp, synthetic construct
  misc_feature 1..1329: note = Description of Artificial Sequence: Synthetic coding sequence
  source 1..1329: mol_type = other DNA
atgctgcctgctgctgcccggcccctgtggggcccctgcctgggcctgcgggctgctgccttccggctggcccggcggcaggtgccctgtgtgtgtgctgtgcgccacatgaggagcagcggccaccagagatgtgaggccctggccggggcccccctggacaatgcccccaaggagtacccacccaagatccagcagctggtgcaggacatcgccagcctgaccctgctggagatcagtgacctgaatgagctgctgaagaagaccctgaagatccaggatgtgggcctggtgcccatgggcggcgtgatgtctggagctgtgcctgctgctgctgcccaggaggccgtggaggaggacatccccatcgccaaggagaggacccacttcaccgtgcggctgacagaggccaagcctgtggacaaggtgaagctgatcaaggagatcaagaactacatccagggcatcaacctggtgcaggccaagaagctggtggagagcctgccccaggagatcaaggccaacgtggccaaggccgaggccgagaagatcaaggccgccctggaggccacccagcaggaggtgaagctgaggatgacaggcatggccctgcgggtggtgaggacagatggcatcctggccctgtacagcggcctgagcgccagcctgtgccggcagatgacctacagcctgaccaggtttgccatctatgaaacagtgcgggacagagtggccaagggcagccagggccccctgcccttccacgagaaggtgctgctgggctctgtgtctggcctggccggcggctttgtgggcaccccagctgacctggtgaatgtgaggatgcagaatgatgtgaagctgccccagggccagaggaggaactatgcccacgccctggatggcctgtacagagtggcccgggaggagggcctgcggcggctcttcagcggggccaccatggccagcagcagaggagccctggtgacagtgggccagctgagctgctatgaccaggccaagcagctggtgctgagcacaggctacctgagtgacaacatcttcacccactttgtggccagcttcatcgccggcggctgtgccaccttcctgtgccagcccctggatgtgctgaagacccggctgatgaacagcaagggggagtaccagggcgtcttccactgtgctgtggagacagccaagctgggccccctggccttctacaagggcctggtgcctgctggcatccgcctcatcccccacacagtgctgacctttgtgttcctggagcagctgaggaagaactttggcatcaaggtgcccagctag

SEQ ID NO: 159886 - DNA, 735 bp, synthetic construct
  misc_feature 1..735: note = Description of Artificial Sequence: Synthetic coding sequence
  source 1..735: mol_type = other DNA
atgacaggcatggccctgcgggtggtgaggacagatggcatcctggccctgtacagcggcctgagcgccagcctgtgccggcagatgacctacagcctgaccaggtttgccatctatgaaacagtgcgggacagagtggccaagggcagccagggccccctgcccttccacgagaaggtgctgctgggctctgtgtctggcctggccggcggctttgtgggcaccccagctgacctggtgaatgtgaggatgcagaatgatgtgaagctgccccagggccagaggaggaactatgcccacgccctggatggcctgtacagagtggcccgggaggagggcctgcggcggctcttcagcggggccaccatggccagcagcagaggagccctggtgacagtgggccagctgagctgctatgaccaggccaagcagctggtgctgagcacaggctacctgagtgacaacatcttcacccactttgtggccagcttcatcgccggcggctgtgccaccttcctgtgccagcccctggatgtgctgaagacccggctgatgaacagcaagggggagtaccagggcgtcttccactgtgctgtggagacagccaagctgggccccctggccttctacaagggcctggtgcctgctggcatccgcctcatcccccacacagtgctgacctttgtgttcctggagcagctgaggaagaactttggcatcaaggtgcccagctag

SEQ ID NO: 159887 - DNA, 438 bp, synthetic construct
  misc_feature 1..438: note = Description of Artificial Sequence: Synthetic coding sequence
  source 1..438: mol_type = other DNA
atggccttcttcaccggcctgtggggccccttcacctgtgtgtcccgggtgctgagccaccactgcttcagcaccaccggcagcctgagcgccatccagaagatgaccagggtgcgggtggtggacaacagcgccctgggcaacagcccctaccaccgggccccccgctgcatccacgtgtacaagaagaatggagtgggcaaggtgggggaccagatcctgctggccatcaagggccagaagaagaaggccctgattgtgggccactgcatgcctggccccaggatgacccccaggtttgacagcaacaacgtggtgctgattgaagataatggaaatcctgtgggcacccgcatcaagacccccatccccaccagcctgaggaagcgggagggggagtacagcaaggtgctggccatcgcccagaactttgtgtag

SEQ ID NO: 159888 - DNA, 891 bp, synthetic construct
  misc_feature 1..891: note = Description of Artificial Sequence: Synthetic coding sequence
  source 1..891: mol_type = other DNA
atggccggccccctgcagggcggcggggcccgggccctggacctgctgcggggcctgccccgggtgtccctggccaacctgaagcccaaccctggcagcaagaagccagagcggcggccccggggcagaagaagaggaagaaaatgtggccggggccacaagggggagcggcagaggggcacccggccccggctgggctttgaaggaggccagacccccttctacatccgcatccccaagtatggcttcaatgaaggccacagcttccggcggcagtacaagcccctgagcctgaaccggctgcagtacctgattgacctgggccgggtggaccccagccagcccatcgacctgacccagctggtgaatggccggggcgtgaccatccagcccctgaagagggactatggagtgcagctggtggaggagggcgctgacaccttcaccgccaaggtgaacatcgaggtgcagctggccagcgagctggccatcgccgccatcgagaagaatggaggagtggtgaccacagccttctatgaccccaggagcctggacatcgtgtgcaagcctgtgcccttcttcctgcggggccagcccatccccaagaggatgctgcccccagaggagctggtgccctactacacagatgccaagaacagaggctacctggccgaccctgccaagtttcctgaggcccggctggagctggccaggaaatatggctacatcctgcctgacatcaccaaggatgagctgttcaagatgctgtgcaccaggaaggacccccggcagatcttcttcggcctggcccctggctgggtggtgaacatggctgacaagaagatcctgaagcccacagatgagaacctgctgaagtactacaccagctag

SEQ ID NO: 159889 - DNA, 756 bp, synthetic construct
  misc_feature 1..756: note = Description of Artificial Sequence: Synthetic coding sequence
  source 1..756: mol_type = other DNA
atgtggaggctgctggcccgggccagcgcccccctgctgcgggtgcccctgagtgacagctgggccctgctgcctgccagcgctggggtgaagaccctgctgcctgtgcccagctttgaagatgtgtccatccctgagaagcccaagctgcgcttcatcgagcgggcccccctggtgcccaaggtgagaagagagcccaagaacctgagtgacatccggggccccagcacagaggccacagagttcacagagggcaactttgccatcctggccctgggcggcggctacctgcactggggccactttgagatgatgaggctgaccatcaacagatccatggaccccaagaacatgtttgccatctggagggtgcctgcccccttcaagcccatcaccaggaagtctgtgggccacaggatgggcggcggcaagggggccatcgaccactacgtgacccctgtgaaggccggccgcctggtggtggagatgggcggccgctgtgaatttgaggaggtgcagggcttcctggaccaggtggcccacaagctgccctttgctgccaaggctgtgtcccggggcaccctggagaagatgaggaaggaccaggaggagcgggagaggaacaaccagaacccctggacctttgagcgcatcgccacagccaacatgctgggcatcaggaaggtgctgagcccctatgacctgacccacaagggcaagtactggggcaagttctacatgcccaagagggtgtag

SEQ ID NO: 159890 - DNA, 528 bp, synthetic construct
  misc_feature 1..528: note = Description of Artificial Sequence: Synthetic coding sequence
  source 1..528: mol_type = other DNA
atgaggctgtctgtggccgccgccatcagccacggccgggtcttccggaggatgggcctgggccctgagagccgcatccacctgctgaggaacctgctgaccggcctggtgagacatgagcgcatcgaggccccctgggcccgggtggatgagatgaggggctacgccgagaagctgattgattatggcaagctgggggacaccaatgaaagagccatgaggatggctgacttctggctgacagagaaggacctgatccccaagctgttccaggtgctggccccccgctacaaggaccagacaggaggctacaccaggatgctgcagatccccaacagaagcctggaccgggccaagatggctgtgattgagtacaagggcaactgcctgccccccctgcccctgccccggcgggacagccacctgaccctgctgaaccagctgctgcagggcctgcggcaggacctgcggcagagccaggaggccagcaaccacagcagccacacagcccagaccccaggcatctag

SEQ ID NO: 159891 - DNA, 543 bp, synthetic construct
  misc_feature 1..543: note = Description of Artificial Sequence: Synthetic coding sequence
  source 1..543: mol_type = other DNA
atggccctgcggagccgcttctggggcctcttctctgtgtgcagaaatcctggctgccgctttgctgccctgagcaccagcagcgagcctgctgccaagccagaggtggaccctgtggagaatgaagctgtggcccctgagttcaccaacagaaaccccaggaacctggagctgctgtctgtggccaggaaggagcggggctggaggacagtgttccccagccgggagttctggcaccggctgcgggtcatccgcacccagcaccacgtggaggccctggtggagcaccagaatggcaaggtggtggtgtctgccagcacccgggagtgggccatcaagaagcacctgtacagcaccagaaatgtggtggcctgtgagagcatcggccgggtgctggcccagcgctgcctggaggccggcatcaacttcatggtgtaccagcccaccccctgggaggccgccagtgacagcatgaagaggctgcagagcgccatgacagagggcggcgtggtgctgcgggagccccagaggatctatgaatag

SEQ ID NO: 159892 - DNA, 879 bp, synthetic construct
  misc_feature 1..879: note = Description of Artificial Sequence: Synthetic coding sequence
  source 1..879: mol_type = other DNA
atggccgcctgcatcgctgctggccactgggccgccatgggcctgggccgctccttccaggccgcccggaccctgctgcccccaccagccagcatcgcctgccgggtgcacgccggccctgtgcggcagcagagcacaggccccagcgagcccggggccttccagcccccacccaagcctgtgattgtggacaagcacaggcctgtggagcctgagcggcgcttcctgagccctgagttcatcccccggcggggccgcacagaccccctgaagttccagatcgagaggaaggacatgctggagaggaggaaggtgctgcacatccctgagttctacgtgggcagcatcctgcgggtgaccacagctgacccctatgccagcggcaagatcagccagttcctgggcatctgcatccagaggagcggccggggcctgggcgccaccttcatcctgagaaatgtgattgagggccagggcgtggagatctgctttgagctgtacaacccccgggtgcaggagatccaggtggtgaagctggagaagaggctggatgacagcctgctgtacctgagagatgccctgcctgagtacagcacctttgatgtgaacatgaagcctgtggtgcaggagcccaaccagaaggtgcctgtgaatgagctgaaggtgaagatgaagcccaagccctggagcaagcgctgggagcggcccaacttcaacatcaagggcatccgctttgacctgtgcctgacagagcagcagatgaaggaggcccagaagtggaaccagccctggctggagtttgacatgatgagagaatatgacaccagcaagattgaggccgccatctggaaggagattgaggccagcaagaggagctag

SEQ ID NO: 159893 - DNA, 879 bp, synthetic construct; identical to SEQ ID NO: 159892
  misc_feature 1..879: note = Description of Artificial Sequence: Synthetic coding sequence
  source 1..879: mol_type = other DNA

SEQ ID NO: 159894 - DNA, 240 bp, synthetic construct
  misc_feature 1..240: note = Description of Artificial Sequence: Synthetic coding sequence
  source 1..240: mol_type = other DNA
aaggtgcctgtgaatgagctgaaggtgaagatgaagcccaagccctggagcaagcgctgggagcggcccaacttcaacatcaagggcatccgctttgacctgtgcctgacagagcagcagatgaaggaggcccagaagtggaaccagccctggctggagtttgacatgatgagagaatatgacaccagcaagattgaagctgccatctggaaggagattgaggccagcaagaggagctag

SEQ ID NO: 159895 - DNA, 918 bp, synthetic construct
  misc_feature 1..918: note = Description of Artificial Sequence: Synthetic coding sequence
  source 1..918: mol_type = other DNA
atggccctgtgtgccctgacccgggccctgcggagcctgaacctggcccccccaacagtggccgccccagcccccagcctcttccctgctgcccagatgatgaacaacggcctgctgcagcagcccagcgccctgatgctgctgccctgcaggcctgtgctgacctctgtggccctgaatgccaactttgtgtcctggaagagcaggaccaagtacaccatcacccctgtgaagatgaggaagagcggcggccgggaccacacaggccgcatccgggtgcacggcatcggcggcggccacaagcagcgctacaggatgattgacttcctgcgcttccggcctgaggagaccaagagcggcccctttgaggagaaggtgatccaggtgcgctatgacccctgccgctctgctgacatcgccctggtggccggcggcagcaggaagcgctggatcatcgccacagagaacatgcaggccggggacaccatcctgaacagcaaccacatcggccgcatggctgtggccgcccgggagggagatgcccaccccctgggcgccctgcctgtgggcaccctcatcaacaacgtggagagcgagcccggccgcggggcccagtacatccgggccgccggcacctgtggggtgctgctgaggaaggtgaatggaacagccatcatccagctgcccagcaagaggcagatgcaggtgctggagacctgtgtggccaccgtgggccgggtgtccaatgtggaccacaacaagagggtgattggcaaggccggcaggaaccgctggctgggcaagaggcccaacagcggccgctggcacaggaagggcggctgggccggcaggaagatccggcccctgccccccatgaagagctatgtgaagctgcccagcgccagcgcccagagctag

SEQ ID NO: 159896 - DNA, 450 bp, synthetic construct
  misc_feature 1..450: note = Description of Artificial Sequence: Synthetic coding sequence
  source 1..450: mol_type = other DNA
atggtgttcctgacagcccagctgtggctgaggaacagagtgacagaccgctacttccgcatccaggaggtgctgaagcacgcccggcacttccggggcaggaagaaccgctgctaccgcctggccgtgaggacagtcatccgggcctttgtgaagtgcaccaaggcccgctacctgaagaagaagaacatgaggaccctgtggatcaaccgcatcacagctgccagccaggagcacggcctgaagtacccagccctgattggcaacctggtgaagtgccaggtggagctgaacaggaaggtgctggccgacctggccatctatgagcccaagaccttcaagagcctggccgccctggccagcagaagaagacatgagggctttgctgctgccctgggagatggcaaggagcctgagggcatcttcagccgggtggtgcagtaccactag

SEQ ID NO: 159897 - DNA, 618 bp, synthetic construct
  misc_feature 1..618: note = Description of Artificial Sequence: Synthetic coding sequence
  source 1..618: mol_type = other DNA
atggccgccagcagcctgactgtgaccctgggccgcctggccagcgcctgcagccacagcatcctgcggcccagcggccctggagctgccagcctgtggagcgccagccgccgcttcaacagccagagcaccagctacctgcccggctacgtgcccaagaccagcctgagcagccccccctggccagaggtggtgctgcctgaccctgtggaggagaccaggcaccacgccgaggtggtgaagaaggtgaatgagatgattgtgacaggccagtatggccgcctgtttgctgtggtgcactttgccagccggcagtggaaggtgaccagtgaagatctcatcctgattggaaatgagctggacctggcctgtggggagcgcatccggctggagaaggtgctgctggtgggcgctgacaacttcaccctgctgggcaagcccctgctgggcaaggacctggtgcgggtggaggccaccgtgattgagaagacagagagctggccccgcatcatcatgaggttcaggaagaggaagaacttcaagaagaagagaattgtgaccaccccccagacagtgctgcgcatcaacagcattgagatcgccccctgcctgctgtag

SEQ ID NO: 159898 - DNA, 843 bp, synthetic construct
  misc_feature 1..843: note = Description of Artificial Sequence: Synthetic coding sequence
  source 1..843: mol_type = other DNA
atggccgccagcagcctgactgtgaccctgggccgcctggccagcgcctgcagccacagcatcctgcggcccagcggccctggagctgccagcctgtggagcgccagccgccgcttcaacagccagagcaccagctacctgcccggctacgtgcccaagaccagcctgagcagccccccctggccagaggtggtgctgcctgaccctgtggaggagaccaggcaccacgccgaggtggtgaagaaggtgaatgagatgattgtgacaggccagtatggccgcctgtttgctgtggtgcactttgccagccggcagtggaaggtgaccagtgaagatctcatcctgattggaaatgagctggacctggcctgtggggagcgcatccggctggagaaggtgctgctggtgggcgctgacaacttcaccctgctgggcaagcccctgctgggcaaggacctggtgcgggtggaggccaccgtgattgagaagacagagagctggccccgcatcatcatgaggttcaggaagaggaagaacttcaagaagaagaggagcaagctggagaaggtgcccctgggccctgtggcccgctgctggctgcccaggaggatgaggacagagggcgtgggccacgtgggcctgggcaccggcagccctggccgcagccagcccggctgccactgccccctggccaccctcatcctggagggcgccccccggggcagcagcctggcccccctgctgctgcacgccccccgggtgaccccacccaggagccccagcccccccaggtctgcccgggaccccaccagcctgcccttcagcagcaccctgcgggcctag

SEQ ID NO: 159899 - DNA, 363 bp, synthetic construct
  misc_feature 1..363: note = Description of Artificial Sequence: Synthetic coding sequence
  source 1..363: mol_type = other DNA
atgattgtgacaggccagtatggccgcctgtttgctgtggtgcactttgccagccggcagtggaaggtgaccagcgaggacctgatcctgattggaaatgagctggacctggcctgtggggagcgcatccggctggagaaggtgctgctggtgggcgctgacaacttcaccctgctgggcaagcccctgctgggcaaggacctggtgcgggtggaggccaccgtcatcgagaagacagagagctggccccgcatcatcatgaggttcaggaagaggaagaacttcaagaagaagagaattgtgaccaccccccagacagtgctgcgcatcaacagcattgaaattgccccctgcctgctgtag

SEQ ID NO: 159900 - DNA, 381 bp, synthetic construct
  misc_feature 1..381: note = Description of Artificial Sequence: Synthetic coding sequence
  source 1..381: mol_type = other DNA
atgtggtacctggccaagctgatccggggcatgagcattgaccaggccctggcccagctggagttcaatgacaagaagggggccaagatcatcaaggaggtgctgctggaggcccaggacatggctgtgcgggaccacaacgtggagttccgcagcaacctgtacatcgccgagagcaccagcggccggggccagtgcctgaagaggatccgctaccacggccggggccgcttcggcatcatggagaaggtgtactgccactactttgtgaagctggtggagggccccccacctcctcctgagccccccaagacagctgtggcccacgccaaggagtacatccagcagctgcggagcaggaccatcgtgcacaccctgtag

SEQ ID NO: 159901 - DNA, 699 bp, synthetic construct
  misc_feature 1..699: note = Description of Artificial Sequence: Synthetic coding sequence
  source 1..699: mol_type = other DNA
atggctgctgctgtgctgggccagctgggcaaggacttcctggtggtgaagaggcagaagggcgtggagatggagagcgagctgacagcctgtgtggatgtggccggggccctgtggatccacaacctgcggagccggggcaagctggccctgggcgtgctgccccagagctacatccacaccagcgccagcctggacatcagcaggaagtgggagaagaagaacaagatcgtgtacccaccccagctgcccggggagccccggcggcctgctgagatctaccactgccggcggcagatcaagtacagcaaggacaagatgtggtacctggccaagctgatccggggcatgagcattgaccaggccctggcccagctggagttcaatgacaagaagggggccaagatcatcaaggaggtgctgctggaggcccaggacatggctgtgcgggaccacaacgtggagttccgcagcaacctgtacatcgccgagagcaccagcggccggggccagtgcctgaagaggatccgctaccacggccggggccgcttcggcatcatggagaaggtgtactgccactactttgtgaagctggtggagggccccccacctcctcctgagccccccaagacagctgtggcccacgccaaggagtacatccagcagctgcggagcaggaccatcgtgcacaccctgtag

SEQ ID NO: 159902 - DNA, 639 bp, synthetic construct
  misc_feature 1..639: note = Description of Artificial Sequence: Synthetic coding sequence
  source 1..639: mol_type = other DNA
atggctgctgctgtgctgggccagctgggcgccctgtggatccacaacctgcggagccggggcaagctggccctgggcctgctgtccttccacagcgtgctgccccagagctacatccacaccagcgccagcctggacatcagcaggaagtgggagaagaagaacaagatcgtgtacccaccccagctgcccggggagccccggcggcctgctgagatctaccactgccggcggcagatcaagtacagcaaggacaagatgtggtacctggccaagctgatccggggcatgagcattgaccaggccctggcccagctggagttcaatgacaagaagggggccaagatcatcaaggaggtgctgctggaggcccaggacatggctgtgcgggaccacaacgtggagttccgcagcaacctgtacatcgccgagagcaccagcggccggggccagtgcctgaagaggatccgctaccacggccggggccgcttcggcatcatggagaaggtgtactgccactactttgtgaagctggtggagggccccccacctcctcctgagccccccaagacagctgtggcccacgccaaggagtacatccagcagctgcggagcaggaccatcgtgcacaccctgtag

SEQ ID NO: 159903 - DNA, 621 bp, synthetic construct
  misc_feature 1..621: note = Description of Artificial Sequence: Synthetic coding sequence
  source 1..621: mol_type = other DNA
atggctgctgctgtgctgggccagctgggcgccctgtggatccacaacctgcggagccggggcaagctggccctgggcgtgctgccccagagctacatccacaccagcgccagcctggacatcagcaggaagtgggagaagaagaacaagatcgtgtacccaccccagctgcccggggagccccggcggcctgctgagatctaccactgccggcggcagatcaagtacagcaaggacaagatgtggtacctggccaagctgatccggggcatgagcattgaccaggccctggcccagctggagttcaatgacaagaagggggccaagatcatcaaggaggtgctgctggaggcccaggacatggctgtgcgggaccacaacgtggagttccgcagcaacctgtacatcgccgagagcaccagcggccggggccagtgcctgaagaggatccgctaccacggccggggccgcttcggcatcatggagaaggtgtactgccactactttgtgaagctggtggagggccccccacctcctcctgagccccccaagacagctgtggcccacgccaaggagtacatccagcagctgcggagcaggaccatcgtgcacaccctgtag

SEQ ID NO: 159904 - DNA, 462 bp, synthetic construct
  misc_feature 1..462: note = Description of Artificial Sequence: Synthetic coding sequence
  source 1..462: mol_type = other DNA
atggccagaaatgtggtgtaccccctgtaccgcctgggcggcccccagctgcgggtcttccgcaccaacttcttcatccagctggtgcggcctggggtggcccagccagaagatactgtgcagttccgcatccccatggagatgaccagggtggacctgaggaactacctggagggcatctacaacgtgcctgtggccgctgtgaggaccagggtgcagcacggcagcaacaagagaagagaccacagaaatgtgcgcatcaagaagccagactacaaggtggcctacgtgcagctggcccacggccagaccttcaccttcccagacctcttccctgagaaggatgagagccctgagggcagcgctgctgatgacctgtacagcatgctggaggaggagcggcagcagaggcagagcagtgaccccaggagaggaggagtgcccagctggtttggcctgtag

SEQ ID NO: 159905 - DNA, 462 bp, synthetic construct; identical to SEQ ID NO: 159904
  misc_feature 1..462: note = Description of Artificial Sequence: Synthetic coding sequence
  source 1..462: mol_type = other DNA

SEQ ID NO: 159906 - DNA, 651 bp, synthetic construct
  misc_feature 1..651: note = Description of Artificial Sequence: Synthetic coding sequence
  source 1..651: mol_type = other DNA
atgaggctgagcgccctgctggccctggccagcaaggtgaccctgcccccccactaccgctatggcatgagccccccaggctctgtggccgacaagaggaagaaccccccctggatcagaagaagacctgtggtggtggagcccatcagtgatgaggactggtacctgttctgtggggacacagtggagatcctggagggcaaggatgctgggaagcagggcaaggtggtgcaggtgatccggcagaggaactgggtggtggtgggcggcctgaacacccactaccgctacatcggcaagaccatggactaccggggcaccatgatccccagcgaggcccccctgctgcaccggcaggtgaagctggtggaccccatggacaggaagcccacagaaattgagtggaggttcacagaggccggggagcgggtgcgggtgtccaccaggagcggccgcatcatccccaagccagagttccccagggcagatggcatcgtgcctgagacctggattgatggccccaaggacacctctgtggaggatgccctggagaggacctacgtgccctgcctgaagaccctgcaggaggaggtgatggaggccatgggcatcaaggagaccaggaagtacaagaaggtgtactggtactag

SEQ ID NO: 159907 - DNA, 651 bp, synthetic construct; identical to SEQ ID NO: 159906
  misc_feature 1..651: note = Description of Artificial Sequence: Synthetic coding sequence
  source 1..651: mol_type = other DNA

SEQ ID NO: 159908 - DNA, 300 bp, synthetic construct
  misc_feature 1..300: note = Description of Artificial Sequence: Synthetic coding sequence
  source 1..300: mol_type = other DNA
atgaggctgagcgccctgctggccctggccagcaaggtgaccctgcccccccactaccgctatggcatgagccccccaggctctgtggccgacaagaggaagaaccccccctggatcagaagaagacctgtggtggtggagcccatcagtgatgaggactggtacctgttctgtggggacacagtggagatcctggagggcaaggatgctgggaagcagggcaaggtggtgcaggtgatccggcagaggaactgggtggtggtgggcggcctgaacacccactaccgctacatcggctag

SEQ ID NO: 159909 - DNA, 207 bp, synthetic construct
  misc_feature 1..207: note = Description of Artificial Sequence: Synthetic coding sequence
  source 1..207: mol_type = other DNA
atgaggctgagcgccctgctggccctggccagcaaggtgaccctgcccccccactaccgctatggcatgagccccccaggctctgtggccgacaagaggaagaaccccccctggatcagaagaagacctgtggtggtggagcccatcagtgatgaggactggtacctgttctgtggggacacagtggagatcctggagggcaagtag

SEQ ID NO: 159910 - DNA, 522 bp, synthetic construct
  misc_feature 1..522: note = Description of Artificial Sequence: Synthetic coding sequence
  source 1..522: mol_type = other DNA
atgaggctgagcgccctgctggccctggccagcaaggtgaccctgcccccccactaccgctatggcatgagccccccaggctctgtggccgacaagaggaagaaccccccctggatcagaagaagacctgtggtggtggagcccatcagtgatgaggactggtacctgttctgtggggacacagtggagatcctggagggcaaggatgctgggaagcagggcaaggtggtgcaggtgatccggcagaggaactgggtggtggtgggcggcctgaacacccactaccgctacatcggcaagaccatggactaccggggcaccatgatccccagcgaggcccccctgctgcaccggcaggtgaagctggtggaccccatggacaggaagcccacagaaattgagtggaggttcacagaggccggggagcgggtgcgggtgtccaccaggagcggccgcatcatccccaagccagagttccccagggcagatggcatcgtgcctgagacctggattgatggatag

SEQ ID NO: 159911 - DNA, 4395 bp, synthetic construct
  misc_feature 1..4395: note = Description of Artificial Sequence: Synthetic coding sequence
  source 1..4395: mol_type = other DNA
atgttctcctttgtggacctgcggctgctgctgctgctggccgccacagccctgctgacccacggccaggaggagggccaggtggagggccaggatgaggacatcccccccatcacctgtgtgcagaatggcctgcgctaccatgacagagatgtgtggaagccagagccctgccgcatctgtgtgtgtgacaatggcaaggtgctgtgtgatgatgtgatctgtgatgagaccaagaactgccctggagctgaggtgcctgagggggagtgctgccctgtgtgcccagatggcagcgagagccccacagaccaggagaccaccggggtggagggccccaagggggacaccggcccccggggcccccggggccctgctggccccccaggaagagatggcatccctggccagcccggcctgcccggccccccaggccccccaggccccccaggccccccaggcctgggcggcaactttgccccccagctgtcctatggctatgatgagaagagcactggaggcatctctgtgcccggccccatgggccccagcggcccccggggcctgcccggccccccaggggcccctggcccccagggcttccagggccccccaggagagcccggggagcccggggccagcggccccatgggcccccggggccccccaggccccccaggcaagaatggagatgatggagaggccggcaagccaggccggcctggagagcggggccccccaggcccccagggcgcccggggcctgcccggcacagctggcctgcccggcatgaagggccaccggggcttcagcggcctggatggagccaagggagatgctggccctgctggccccaagggggagcccggcagccctggagaaaatggagcccctggccagatgggcccccggggcctgcctggagagcggggccggcctggggcccctggccctgctggggcccggggaaatgatggagccaccggggctgctggccccccaggccccactggacctgctggccccccaggcttccctggagctgtgggcgccaagggggaggccggcccccagggcccccggggcagcgagggcccccagggcgtgcggggggagcccggccccccaggccctgctggagctgctggccctgctggcaaccctggagcagatggccagcccggggccaagggggccaacggggcccctggcattgctggggcccctggcttccctggggcccggggccccagcggcccccagggccctgggggccccccaggccccaagggcaacagcggggagcccggggcccctggcagcaagggggacacaggagccaagggggagcccggccctgtgggcgtgcagggccccccaggccctgctggggaggagggcaagagaggagcccggggggagcccggccccaccggcctgcccggccccccaggagagcggggcggccctggcagccggggcttccctggagcagatggagtggccggccccaagggccctgctggggagcggggcagccctggccctgctggccccaagggcagccctggagaggccggccggcctggagaggccggcctgcccggggccaagggcctgaccggcagccctggcagccctggcccagatggcaagacaggccccccaggccctgctggccaggacggccggcccggccccccaggccccccaggggcccggggccaggccggcgtgatgggcttccctggccccaagggagctgctggggagcccgggaaggccggggagcggggcgtgcccggccccccaggagctgtgggccctgctgggaaggatggagaggccggggcccagggccccccaggccctgctggccctgctggggagcggggggagcagggccctgctggcagccctggcttccagggcctgcccggccctgctggccccccaggagaggccggcaagccaggagagcagggcgtgcctggggacctgggcgcccctggccccagcggggcccggggggagcggggcttccctggagagcggggcgtgcagggccccccaggccctgctggccccaggggggccaacggggcccctggaaatgatggagccaagggagatgctggggcccctggggcccctggcagccagggcgcccctggcctgcagggcatgcctggagagagaggagctgctggcctgcccggccccaagggggacagaggagatgctggccccaagggagcagatggcagccctgggaaggatggagtgcggggcctgaccggccccatcggccccccaggccctgctggggcccctggggacaagggggagagcggccccagcggccctgctggccccactggagcccggggggcccctggggacagaggagagcccggccccccaggccctgctggctttgctggccccccaggagcagatggccagcccggggccaagggggagcctggagatgctggggccaagggagatgctggccccccaggccctgctggccctgctggccccccaggccccatcggaaatgtgggcgcccctggggccaagggggcccggggcagcgctggccccccaggggccaccggcttccctggagctgctggccgggtgggccccccaggccccagcggaaatgccggccccccaggccccccaggccctgctgggaaggagggcggcaagggccccagaggagaaacaggccctgctggccggcctggagaggtgggccccccaggccccccaggccctgctggggagaagggcagccctggagcagatggccctgctggggcccctggcaccccaggcccccagggcattgctggccagaggggcgtggtgggcctgcccggccagagaggagagcggggcttccctggcctgcccggccccagcggggagcccgggaagcagggccccagcggggccagcggggagcggggccccccaggccccatgggccccccaggcctggccggccccccaggagagagcggccgggagggcgcccctggagctgagggcagccctggaagagatggcagccctggggccaagggggacagaggagaaacaggccctgctggccccccaggggcccctggggcccctggggcccctggccctgtgggccctgctgggaagagcggggacagaggagaaacaggccctgctggccccactggacctgtgggccctgtgggcgcccggggccctgctggcccccagggccccaggggggacaagggggagactggagagcagggcgaccggggcatcaagggccaccggggcttcagcggcctgcagggccccccaggccccccaggcagccctggagagcagggccccagcggggccagcggccctgctggcccccggggccccccaggcagcgctggggcccctgggaaggatggcctgaatggcctgcccggccccatcggccccccaggcccccggggccgcactggagatgctggccctgtgggccccccaggccccccaggccccccaggccccccaggccccccatctgctggctttgacttctccttcctgccccagcccccccaggagaaggcccatgatggcggccgctactacagagcagatgatgccaacgtggtgcgggaccgggacctggaggtggacaccaccctgaagagcctgagccagcagatcgagaacatccgcagccctgagggcagcaggaagaacccagcccggacctgccgggacctgaagatgtgccacagcgactggaagtctggagagtactggattgaccccaaccagggctgcaacctggatgccatcaaggtgttctgcaacatggagactggagagacctgtgtgtaccccacccagcccagcgtggcccagaagaactggtacatcagcaagaaccccaaggacaagagacatgtgtggtttggagagagcatgacagatggcttccagtttgaatatggaggccagggcagtgaccctgcagatgtggccatccagctgaccttcctgcggctgatgagcacagaggccagccagaacatcacctaccactgcaagaacagcgtggcctacatggaccagcagacaggcaacctgaagaaggccctgctgctgcagggcagcaatgaaattgagatccgggcagagggcaacagccgcttcacctacagcgtgacagtggatggctgcaccagccacactggagcctggggcaagacagtgattgagtacaagaccaccaagaccagccggctgcccatcattgatgtggcccccctggatgtgggcgccccagaccaggagtttggatttgatgtgggccctgtgtgcttcctgtag

SEQ ID NO: 159912 - DNA, 285 bp, synthetic construct
  misc_feature 1..285: note = Description of Artificial Sequence: Synthetic coding sequence
  source 1..285: mol_type = other DNA
atggcctctgtggtgctggccctgcggaccaggacagctgtgaccagcctgctgagccccaccccagccacagccctggccgtgcgctatgccagcaagaagagcggcggcagcagcaagaacctgggcggcaagagcagtggaagacggcagggcatcaagaagatggagggccactacgtgcatgctggcaacatcatcgccacccagaggcacttccgctggcaccctggggcccacgtgtcctgcagcgtggccgcccccctcttccccttcctgggctag

SEQ ID NO: 159913 - DNA, 282 bp, synthetic construct
  misc_feature 1..282: note = Description of Artificial Sequence: Synthetic coding sequence
  source 1..282: mol_type = other DNA
atggagggccactacgtgcacgccggcaacatcatcgccacccagaggcacttccgctggcaccctggggcccacgtgggcgtgggcaagaacaagtgcctgtatgccctggaggagggcatcgtgcgctacaccaaggaggtgtatgtgccccaccccaggaacacagaggccgtggacctgatcacccggctgcccaagggagctgtgctgtacaagacctttgtgcacgtggtgcctgccaagccagagggcaccttcaagctggtggccatgctgtag

SEQ ID NO: 159914 - DNA, 282 bp, synthetic construct; identical to SEQ ID NO: 159913
  misc_feature 1..282: note = Description of Artificial Sequence: Synthetic coding sequence
  source 1..282: mol_type = other DNA

SEQ ID NO: 159915 - DNA, 771 bp, synthetic construct
  misc_feature 1..771: note = Description of Artificial Sequence: Synthetic coding sequence
  source 1..771: mol_type = other DNA
atgcccctgcacaagtaccctgtgtggctgtggaagaggctgcagctgcgggagggcatctgcagccggctgcccggccactacctgcggagcctggaggaggagaggacccccacccctgtgcactaccggccccacggggccaagttcaagatcaaccccaagaatggccagcgggagcgggtggaggatgtgcccatccccatctacttccccccagagagccagaggggcctgtggggcggggagggctggatcctgggccagatctatgccaacaatgacaagctgagcaagaggctgaagaaggtgtggaagccccagctgtttgagcgggagttctacagcgagatcctggacaagaagttcaccgtgacagtgaccatgaggaccctggacctgattgatgaggcctacggcctggacttctacatcctgaagacccccaaggaggacctgtgcagcaagtttggcatggacctgaagaggggcatgctgctgcggctggcccggcaggacccccagctgcacccagaagatcctgagaggagagctgccatctatgacaagtacaaggagtttgccatccctgaggaggaggccgagtgggtgggcctgaccctggaggaggccatcgagaagcagaggctgctggaggagaaggaccctgtgcccctcttcaagatctacgtggccgagctgatccagcagctgcagcagcaggccctgtctgagcctgctgtggtgcagaagagggccagcggccagtag

SEQ ID NO: 159916 - DNA, 771 bp, synthetic construct; identical to SEQ ID NO: 159915
  misc_feature 1..771: note = Description of Artificial Sequence: Synthetic coding sequence
  source 1..771: mol_type = other DNA

SEQ ID NO: 159917 - DNA, 771 bp, synthetic construct
  misc_feature 1..771: note = Description of Artificial Sequence: Synthetic coding sequence
  source 1..771: mol_type = other DNA
atgcccctgcacaagtaccctgtgtggctgtggaagaggctgcagctgcgggagggcatctgcagccggctgcccggccactacctgcggagcctggaggaggagaggacccccacccctgtgcactaccggccccacggggccaagttcaagatcaaccccaagaatggccagcgggagcgggtggaggatgtgcccatccccatctacttccccccagagagccagaggggcctgtggggcggggagggctggatcctgggccagatctatgccaacaatgacaagctgagcaagaggctgaagaaggtgtggaagccccagctgtttgagcgggagttctacagcgagatcctggacaagaagttcaccgtgacagtgaccatgaggaccctggacctgattgatgaggcctacggcctggacttctacatcctgaaggccagcggggaggacctgtgcagcaagtttggcatggacctgaagaggggcatgctgctgcggctggcccggcaggacccccagctgcacccagaagatcctgagaggagagctgccatctatgacaagtacaaggagtttgccatccctgaggaggaggccgagtgggtgggcctgaccctggaggaggccatcgagaagcagaggctgctggaggagaaggaccctgtgcccctcttcaagatctacgtggccgagctgatccagcagctgcagcagcaggccctgtctgagcctgctgtggtgcagaagagggccagcggccagtag

SEQ ID NO: 159918 - DNA, 771 bp, synthetic construct; identical to SEQ ID NO: 159917
  misc_feature 1..771: note = Description of Artificial Sequence: Synthetic coding sequence
  source 1..771: mol_type = other DNA

SEQ ID NO: 159919 - DNA, 147 bp, synthetic construct
  misc_feature 1..147: note = Description of Artificial Sequence: Synthetic coding sequence
  source 1..147: mol_type = other DNA
atgagccgggccggcggccgcggggagcagagccgctggggcagaagagctgagctgcggggcctgggccggcctgaggcccccctgcggctgggcccagatgtgtgtggctctgtgccctgtgcccggggagctggcagcgagtag

SEQ ID NO: 159920 - DNA, 723 bp, synthetic construct
  misc_feature 1..723: note = Description of Artificial Sequence: Synthetic coding sequence
  source 1..723: mol_type = other DNA
atgcccctgcacaagtaccctgtgtggctgtggaagaggctgcagctgcgggagggcatctgcagccggctgcccggccactacctgcggagcctggaggaggagaggacccccacccctgtgcactaccggccccacggggccaagttcaagatcaaccccaagaatggccagcgggagcgggtggaggatgtgcccatccccatctacttccccccagagagccagaggggcctgtggggcggggagggctggatcctgggccagatctatgccaacaatgacaagctgagcaagaggctgaagaaggtgtggaagccccagctgtttgagcgggagttctacagcgagatcctggacaagaagttcaccgtgacagtgaccatgaggaccctggacctgattgatgaggcctacggcctggacttctacatcctgaagacccccaaggaggacctgtgcagcaagtttggcatggacctgaagaggggcatgctgctgcggctggcccggcaggacccccagctgcacccagaagatcctgagaggagagctgccatctatgacaagtacaaggagtttgccatccctgaggaggaggccgagtgggtgggcctgaccctggaggaggccatcgagaagcagaggctgctggaggagaaggaccctgtgcccctcttcaagatctacgtggccgagctgatccagcagctgcagcagtag

SEQ ID NO: 159921 - DNA, 657 bp, synthetic construct
  misc_feature 1..657: note = Description of Artificial Sequence: Synthetic coding sequence
  source 1..657: mol_type = other DNA
atgcccctgcacaagtaccctgtgtggctgtggaagaggctgcagctgcgggagggcatctgcagccggctgcccggccactacctgcggagcctggaggaggagaggacccccacccctgtgcactaccggccccacggggccaagttcaagatcaaccccaagaatggccagcgggagcgggtggaggatgtgcccatccccatctacttccccccagagagccagaggggcctgtggggcggggagggctggatcctgggccagatctatgccaacaatgacaagctgagcaagaggctgaagaaggtgtggaagccccagctgtttgagcgggagttctacagcgagatcctggacaagaagttcaccgtgacagtgaccatgaggaccctggacctgattgatgaggcctacggcctggacttctacatcctgaagacccccaaggaggacctgtgcagcaagtttggcatggacctgaagaggggcatgctgctgcggctggcccggcaggacccccagctgcacccagaagatcctgagaggagagctgccatctatgacaagtacaaggagtttgccatccctgaggaggaggccgagtgggtgggcctgaccctggaggaggccatcgagaagcagaggctgctgtag

SEQ ID NO: 159922 - DNA, 585 bp, synthetic construct
  misc_feature 1..585: note = Description of Artificial Sequence: Synthetic coding sequence
  source 1..585: mol_type = other DNA
atgcccctgcacaagtaccctgtgtggctgtggaagaggctgcagctgcgggagggcatctgcagccggctgcccggccactacctgcggagcctggaggaggagaggacccccacccctgtgcactaccggccccacggggccaagttcaagatcaaccccaagaatggccagcgggagcgggtggaggatgtgcccatccccatctacttccccccagagagccagaggggcctgtggggcggggagggctggatcctgggccagatctatgccaacaatgacaagctgagcaagaggctgaagaaggtgtggaagccccagctgtttgagcgggagttctacagcgagatcctggacaagaagttcaccgtgacagtgaccatgaggaccctggacctgattgatgaggcctacggcctggacttctacatcctgaagacccccaaggaggacctgtgcagcaagtttggcatggacctgaagaggggcatgctgctgcggctggcccggcaggacccccagctgcacccagaagatcctgagaggagagctgccatctatgacaagtacaaggagttctag

SEQ ID NO: 159923 - DNA, 1047 bp, synthetic construct
  misc_feature 1..1047: note = Description of Artificial Sequence: Synthetic coding sequence
  source 1..1047: mol_type = other DNA
atgcctggctggaggctgctgacccaggtgggcgcccaggtgctgggccgcctgggagatggcctgggcgccgccctgggccctggcaacagaacccacatctggctgtttgtgcggggcctgcacggcaagagcggcacctggtgggatgagcacctgtctgaggagaatgtgcccttcatcaagcagctggtgtctgatgaggacaaggcccagctggccagcaagctgtgccccctgaaggatgagccctggcccatccacccctgggagcccggcagcttccgggtgggcctcatcgccctgaagctgggcatgatgcccctgtggaccaaggatggccagaagcacgtggtgaccctgctgcaggtgcaggactgccacgtgctgaagtacaccagcaaggagaactgcaatggcaagatggccaccctgtctgtgggcggcaagacagtgagccgcttcaggaaggccaccagcatcctggagttctaccgggagctgggcctgccccccaagcagacagtgaagatcttcaacatcacagacaatgctgccatcaagccaggcacccccctgtatgctgcccacttccggcccggccagtatgtggatgtgacagccaagaccatcggcaagggcttccagggcgtgatgaagcgctggggcttcaagggccagcctgccacccacggccagaccaagacccaccggcggcctggagctgtggccactggagacatcggccgggtgtggccaggcaccaagatgcctgggaagatgggcaacatctacagaacagaatatggcctgaaggtgtggaggatcaacaccaagcacaacatcatctacgtgaatggatctgtgcccggccacaagaactgcctggtgaaggtgaaggacagcaagctgcctgcctacaaggacctgggcaagaacctgcccttccccacctacttcccagatggagatgaggaggagctgcctgaggacctgtatgatgaaaatgtgtgccagcccggggcccccagcatcacctttgcctag

SEQ ID NO: 159924 - DNA, 1128 bp, synthetic construct
  misc_feature 1..1128: note = Description of Artificial Sequence: Synthetic coding sequence
  source 1..1128: mol_type = other DNA
atgcctggctggaggctgctgacccaggtgggcgcccaggtgctgggccgcctgggagatggcctgggcgccgccctgggccctggcaacagagtgaccaccaacagcctgaatgtgtccctcatcagaagaaatgtgggcagcgaggagaaggtgggggacctgaagaagaggacccacatctggctgtttgtgcggggcctgcacggcaagagcggcacctggtgggatgagcacctgtctgaagaaaatgtgcccttcatcaagcagctggtgtctgatgaggacaaggcccagctggccagcaagctgtgccccctgaaggatgagccctggcccatccacccctgggagcccggcagcttccgggtgggcctgattgccctgaagctgggcatgatgcccctgtggaccaaggatggccagaagcacgtggtgaccctgctgcaggtgcaggactgccacgtgctgaagtacaccagcaaagaaaactgcaatggcaagatggccaccctgtctgtgggcggcaagacagtgagccgcttcaggaaggccaccagcatcctggagttctaccgggagctgggcctgccccccaagcagacagtgaagatcttcaacatcacagacaatgctgccatcaagccaggcacccccctgtatgctgcccacttccggcccggccagtatgtggatgtgacagccaagaccatcggcaagggcttccagggcgtgatgaagcgctggggcttcaagggccagcctgccacccacggccagaccaagacccacagaagacctggagctgtggccaccggggacatcggccgggtgtggccaggcaccaagatgcctgggaagatgggcaacatctacagaacagaatatggcctgaaggtgtggaggatcaacaccaagcacaacatcatctacgtgaatggatctgtgcccggccacaagaactgcctggtgaaggtgaaggacagcaagctgcctgcctacaaggacctgggcaagaacctgcccttccccacctacttcccagatggagatgaggaggagctgcctgaggacctgtatgatgaaaatgtgtgccagcccggggcccccagcatcacctttgcctag

SEQ ID NO: 159925 - DNA, 1092 bp, synthetic construct
  misc_feature 1..1092: note = Description of Artificial Sequence: Synthetic coding sequence
  source 1..1092: mol_type = other DNA
tgattcttccccagccagagggccagcgctggggacagaagtggcggccactgtgagaacttccccacagccacagccagcacctggcgctggaggggggacagcctgaaggccgagcggcagggcgccaggaagagcacccacatctggctgtttgtgcggggcctgcacggcaagagcggcacctggtgggatgagcacctgtctgaagaaaatgtgcccttcatcaagcagctggtgtctgatgaggacaaggcccagctggccagcaagctgtgccccctgaaggatgagccctggcccatccacccctgggagcccggcagcttccgggtgggcctgattgccctgaagctgggcatgatgcccctgtggaccaaggatggccagaagcacgtggtgaccctgctgcaggtgcaggactgccacgtgctgaagtacaccagcaaagaaaactgcaatggcaagatggccaccctgtctgtgggcggcaagacagtgagccgcttcaggaaggccaccagcatcctggagttctaccgggagctgggcctgccccccaagcagacagtgaagatcttcaacatcacagacaatgctgccatcaagccaggcacccccctgtatgctgcccacttccggcccggccagtatgtggatgtgacagccaagaccatcggcaagggcttccagggcgtgatgaagcgctggggcttcaagggccagcctgccacccacggccagaccaagacccacagaagacctggagctgtggccaccggggacatcggccgggtgtggccaggcaccaagatgcctgggaagatgggcaacatctacagaacagaatatggcctgaaggtgtggaggatcaacaccaagcacaacatcatctacgtgaatggatctgtgcccggccacaagaactgcctggtgaaggtgaaggacagcaagctgcctgcctacaaggacctgggcaagaacctgcccttccccacctacttcccagatggagatgaggaggagctgcctgaggacctgtatgatgaaaatgtgtgccagcccggggcccccagcatcacctttgcctag

SEQ ID NO: 159926 - DNA, 486 bp, synthetic construct
  misc_feature 1..486: note = Description of Artificial Sequence: Synthetic coding sequence
  source 1..486: mol_type = other DNA
atggccggcatcctgcggctggtggtgcagtggcccccaggccgcctgcagacagtgaccaagggcgtggagagcctcatctgcacagactggatccgccacaagttcaccaggagccgcatccctgagaaggtgttccaggccagcccagaagatcatgagaagtatggaggagacccccagaacccccacaagctgcacatcgtgacccgcatcaagagcaccaggagaagaccctactgggagaaggacatcatcaagatgctgggcctggagaaggcccacaccccccaggtgcacaagaacatccccagcgtgaatgccaagctgaaggtggtgaagcacctgatccgcatcaagcccctgaagctgccccagggcctgcctgctgaggagaacatgagcaacacctgcctgaagagcactggagagctggtggtgcagtggcacctgaagcctgtggagcagaaggcccacgagagctag

SEQ ID NO: 159927 - DNA, 486 bp, synthetic construct; identical to SEQ ID NO: 159926
  misc_feature 1..486: note = Description of Artificial Sequence: Synthetic coding sequence
  source 1..486: mol_type = other DNA

SEQ ID NO: 159928 - DNA, 705 bp, synthetic construct
  misc_feature 1..705: note = Description of Artificial Sequence: Synthetic coding sequence
  source 1..705: mol_type = other DNA
atggccgagcggggctacagcttcagcctgaccaccttcagccccagcggcaagctggtgcagatcgagtatgccctggccgctgtggccggcggggcccccagcgtgggcatcaaggccgccaacggggtggtgctggccacagagaagaagcagaagagcatcctgtatgatgagaggtctgtgcacaaggtggagcccatcaccaagcacatcggcctggtgtacagcggcatgggccctgactacagagtgctggtgcaccgggccaggaagctggcccagcagtactacctggtgtaccaggagcccatccccacagcccagctggtgcagagggtggcctctgtgatgcaggagtacacccagagcggcggcgtgcggcccttcggcgtgtccctgctgatctgtggctggaatgaaggccggccctacctgttccagagcgaccccagcggggcctactttgcctggaaggccacagccatgggcaagaactacgtgaatggcaagaccttcctggagaagcgctacaatgaagacctggagctggaggatgccatccacacagccatcctgaccctgaaggagagctttgagggccagatgacagaggacaacatcgaggtgggcatctgcaatgaggccggcttccggcggctgacccccacagaggtgaaggactacctggccgccatcgcctag

SEQ ID NO: 159929 - DNA, 324 bp, synthetic construct
  misc_feature 1..324: note = Description of Artificial Sequence: Synthetic coding sequence
  source 1..324: mol_type = other DNA
atggccctggccatgctggtgctggtggtgagcccctggagcgctgcccggggcgtgctgaggaactactgggagcggctgctgaggaagctgccccagagccggcccggcttccccagccccccctggggccctgccctggccgtgcagggccctgccatgttcacagagcccgccaatgacaccagcggcagcaaagaaaacagcagcctgctggacagcatcttctggatggccgcccccaagaacagaaggaccatcgaggtgaaccgctgcagaagaagaaacccccagaagctgatcaaggtgaaggtgatgcactag

SEQ ID NO: 159930 - DNA, 279 bp, synthetic construct
  misc_feature 1..279: note = Description of Artificial Sequence: Synthetic coding sequence
  source 1..279: mol_type = other DNA
atggctgtgctggccggcagcctgctgggccccaccagccgctctgctgccctgctgggcggccgctggctgcagccccgggcctggctgggcttcccagatgcctggggcctgcccaccccccagcaggcccggggcaaggcccggggaaatgagtaccagcccagcaacatcaagaggaagaacaagcacggctgggtgcggcggctgagcaccccagctggggtgcaggtgatcctgcggaggatgctgaagggcaggaagagcctgagccactag

SEQ ID NO: 159931 - DNA, 513 bp, synthetic construct
  misc_feature 1..513: note = Description of Artificial Sequence: Synthetic coding sequence
  source 1..513: mol_type = other DNA
atggccgccagcgcctttgctggagctgtgcgggccgccagcggcatcctgcggcccctgaacatcctggccagcagcacctacagaaactgtgtgaagaatgccagcctcatcagcgccctgagcacaggccgcttcagccacatccagacccctgtggtgagcagcaccccccggctgaccaccagcgagaggaacctgacctgtggccacaccagcgtcatcctgaacaggatggcccctgtgctgcccagcgtgctgaagctgcctgtgcgcagcctgacctacttcagcgccaggaagggcaagaggaagacagtgaaggctgtgattgaccgcttcctgcggctgcactgcggcctgtgggtgcggaggaaggccggctacaagaagaagctgtggaagaagaccccagccaggaagaagaggctgcgggagtttgtgttctgcaacaagacccagagcaagctgctggacaagatgaccaccagcttctggaagagaagaaattag

SEQ ID NO: 159932 - DNA, 567 bp, synthetic construct
  misc_feature 1..567: note = Description of Artificial Sequence: Synthetic coding sequence
  source 1..567: mol_type = other DNA
atggccgccagcgcctttgctggagctgtgcgggccgccagcggcatcctgcggcccctgaacatcctggccagcagcacctacagaaactgtgtgaagaatgccagcctcatcagcgccctgagcacaggccgcttcagccacatccagacccctgtggtgagcagcaccccccggctgaccaccagcgagaggaacctgacctgtggccacaccagcgtcatcctgaacaggatggcccctgtgctgcccagcgtgctgaagctgcctgtgcgcagcctgacctacttcagcgccaggaagggcaagaggaagacagtgaaggctgtgattgaccgcttcctgcggctgcactgcggcctgtgggtgcggaggaaggccggctacaagaagaagctgtggaagaagaccccagccaggaagaagaggctgcgggagtttgtgttctgcaacaagacccagagcaagctgctggacaagatgaccaccagcttctggaagagaagaaactggtacgtggatgacccctaccagaagtaccatgacaggaccaacctgaaggtgtag

SEQ ID NO: 159933 - DNA, 312 bp, synthetic construct
  misc_feature 1..312: note = Description of Artificial Sequence: Synthetic coding sequence
  source 1..312: mol_type = other DNA
atggccaacctcttcatcaggaagatggtgaaccccctgctgtacctgagccgccacacagtgaagccccgggccctgagcaccttcctgtttggcagcatcagaggagctgcccctgtggccgtggagcccggggctgctgtgcgcagcctgctgagccctggcctgctgccccacctgctgcctgccctgggcttcaagaacaagacagtgctgaagaagcgctgcaaggactgctacctggtgaagaggcggggccgctggtacgtgtactgcaagacccaccccaggcacaagcagaggcagatgtag

SEQ ID NO: 159934 - DNA, 312 bp, synthetic construct; identical to SEQ ID NO: 159933
  misc_feature 1..312: note = Description of Artificial Sequence: Synthetic coding sequence
  source 1..312: mol_type = other DNA

SEQ ID NO: 159935 - DNA, 312 bp, synthetic construct; identical to SEQ ID NO: 159933
  misc_feature 1..312: note = Description of Artificial Sequence: Synthetic coding sequence
  source 1..312: mol_type = other DNA

SEQ ID NO: 159936 - DNA, 312 bp, synthetic construct; identical to SEQ ID NO: 159933
  misc_feature 1..312: note = Description of Artificial Sequence: Synthetic coding sequence
  source 1..312: mol_type = other DNA

SEQ ID NO: 159937 - DNA, 1251 bp, synthetic construct
  misc_feature 1..1251: note = Description of Artificial Sequence: Synthetic coding sequence
  source 1..1251: mol_type = other DNA
atgcactttgtgccctggctggcccggcccatcttccccccctgggaccggggctacaaggacccccgcttctaccgcagcccccccctgcacgagcaccccctgtacaaggaccaggcctgctacatcttccaccaccgctgccgcctgctggagggcgtgaagcaggccctgtggctgaccaagaccaagctgattgagggcctgcctgagaaggtgctgagcctggtggatgaccccaggaaccacatcgagaaccaggatgaatgtgtgctgaatgtcatcagccacgcccggctgtggcagaccacagaggagatccccaagcgggagacctactgccctgtgattgtggacaacctgatccagctgtgcaagagccagatcctgaagcaccccagcctggcccggcgcatctgtgtgcagaacagcaccttcagcgccacctggaaccgggagagcctgctgctgcaggtgcggggcagcggcggggcccggctgagcaccaaggaccccctgcccaccatcgccagccgggaggagattgaggccaccaagaaccacgtgctggagaccttctaccccatcagccccatcatcgacctgcacgagtgcaacatctatgatgtgaagaatgacaccggcttccaggagggctacccctacccctacccccacaccctgtacctgctggacaaggccaacctgcggccccaccggctgcagcctgaccagctgcgggccaagatgatcctgtttgcctttggaagtgccctggcccaggcccggctgctgtatggaaatgatgccaaggtgctggagcagcctgtggtggtgcagagcgtgggcacagatggccgggtcttccacttcctggtgttccagctgaacaccacagacctggactgcaatgaaggagtgaagaacctggcctgggtggacagcgaccagctgctgtaccagcacttctggtgcctgcctgtgatcaagaagagggtggtggtgacaggcccctgcttcagcaagagccagatgagcaccagctttgtgctgacccccagcttcaatgctggggaggaggtgatgcagaggaacctgcgggccagcgccagcctgccccccagcacaggcagccctgccagcgagctggtgaaggagcaggagcacgccgccggccgggtgctgcggcgggtgatgctggacagcgagaccccccgggaggagctgcctgctgctgacttctggaagtag

SEQ ID NO: 159938 - DNA, 879 bp, synthetic construct
  misc_feature 1..879: note = Description of Artificial Sequence: Synthetic coding sequence
  source 1..879: mol_type = other DNA
atgtctggggcctgtgccccccggggcagccgcagcctgctgccctggattggctgcaccaggagcctggactggagccccagccccctgcggggccgctgcaccagctgccccggctggaggggccgctccttccggcctggaacagctgccaccaggacccagggcagcacagcccggcccctcttcaccagcatccgctgcaccaagaccaggcctgccatctccttcaccaccgtggccgccttcagccgcagcctgctgctgcaggtgcggggcagcggcggggcccggctgagcaccaaggaccccctgcccaccatcgccagccgggaggagattgaggccaccaagaaccacgtgctggagaccttctaccccatcagccccatcatcgacctgcacgagtgcaacatctatgatgtgaagaatgacaccggcttccaggagggctacccctacccctacccccacaccctgtacctgctggacaaggccaacctgcggccccaccggctgcagcctgaccagctgcgggccaagatgatcctgtttgcctttggaagtgccctggcccaggcccggctgctgtatggaaatgatgccaaggtgctggagcagcctgtggtggtgcagagcgtgggcacagatggccgggtcttccacttcctggtgttccagctgaacaccacagacctggactgcaatgaaggagtgaagaacctggcctgggtggacagcgaccagctgctgtaccagcacttctggtgcctgcctgtgatcaagaagagggtggtggtggagcctgtgggccctgtgggcttcaagccagagaccttcaggaagttcctggccctgtacctgcatggagctgcctag

SEQ ID NO: 159939 - DNA, 1272 bp, synthetic construct
  misc_feature 1..1272: note = Description of Artificial Sequence: Synthetic coding sequence
  source 1..1272: mol_type = other DNA
atggccctggccagcggccctgcccggcgggccctggccggcagcggccagctgggcctgggcggctttggagcccccaggagaggagcctatgagtggggcgtgcgcagcaccaggaagtctgagcccccacccctggacagagtgtatgagatccctggcctggagcccatcacctttgctgggaagatgcactttgtgccctggctggcccggcccatcttccccccctgggaccggggctacaaggacccccgcttctaccgcagcccccccctgcacgagcaccccctgtacaaggaccaggcctgctacatcttccaccaccgctgccgcctgctggagggcgtgaagcaggccctgtggctgaccaagaccaagctgattgagggcctgcctgagaaggtgctgagcctggtggatgaccccaggaaccacatcgagaaccaggatgaatgtgtgctgaatgtcatcagccacgcccggctgtggcagaccacagaggagatccccaagcgggagacctactgccctgtgattgtggacaacctgatccagctgtgcaagagccagatcctgaagcaccccagcctggcccggcgcatctgtgtgcagaacagcaccttcagcgccacctggaaccgggagagcctgctgctgcaggtgcggggcagcggcggggcccggctgagcaccaaggaccccctgcccaccatcgccagccgggaggagattgaggccaccaagaaccacgtgctggagaccttctaccccatcagccccatcatcgacctgcacgagtgcaacatctatgatgtgaagaatgacaccggcttccaggagggctacccctacccctacccccacaccctgtacctgctggacaaggccaacctgcggccccaccggctgcagcctgaccagctgcgggccaagatgatcctgtttgccttcggcagcgccctggcccaggcccggctgctgtatggaaatgatgccaaggtgctggagcagcctgtggtggtgcagagcgtgggcacagatggccgggtcttccacttcctggtgttccagctgaacaccacagacctggactgcaatgaaggagtgaagaacctggcctgggtggacagcgaccagctgctgtaccagcacttctggtgcctgcccgtcatcaagaagagggtggtggtggagcctgtgggccctgtgggcttcaagccagagaccttcaggaagttcctggccctgtacctgcacggggccgcctag

SEQ ID NO: 159940 - DNA, 795 bp, synthetic construct
  misc_feature 1..795: note = Description of Artificial Sequence: Synthetic coding sequence
  source 1..795: mol_type = other DNA
tgaagcctgctgctgcaggtgcggggcagcggcggggcccggctgagcaccaaggaccccctgcccaccatcgccagccgggaggagattgaggccaccaagaaccacgtgctggagaccttctaccccatcagccccatcatcgacctgcacgagtgcaacatctatgatgtgaagaatgacaccggcttccaggagggctacccctacccctacccccacaccctgtacctgctggacaaggccaacctgcggccccaccggctgcagcctgaccagctgcgggccaagatgatcctgtttgcctttggaagtgccctggcccaggcccggctgctgtatggaaatgatgccaaggtgctggagcagcctgtggtggtgcagagcgtgggcacagatggccgggtcttccacttcctggtgttccagctgaacaccacagacctggactgcaatgaaggagtgaagaacctggcctgggtggacagcgaccagctgctgtaccagcacttctggtgcctgcctgtgatcaagaagagggtggtggtgacaggcccctgcttcagcaagagccagatgagcaccagctttgtgctgacccccagcttcaatgctggggaggaggtgatgcagaggaacctgcgggccagcgccagcctgccccccagcacaggcagccctgccagcgagctggtgaaggagcaggagcacgccgccggccgggtgctgcggcgggtgatgctggacagcgagaccccccgggaggagctgcctgctgctgacttctggaagtag

SEQ ID NO: 159941 - DNA, 1143 bp, synthetic construct
  misc_feature 1..1143: note = Description of Artificial Sequence: Synthetic coding sequence
  source 1..1143: mol_type = other DNA
atggccgccccctggtggagggctgccctgtgtgagtgccgccgctggaggggcttcagcaccagcgctgtgctgggccgccgcaccccacccctgggccccatgcccaacagcgacatcgacctgagcaacctggagcggctggagaagtaccgcagctttgaccgctacagaagaagagctgagcaggaggcccaggccccccactggtggaggacctaccgggagtactttggagagaagacagaccccaaggagaagattgacatcggcctgcccccacccaaggtgtccaggacccagcagctgctggagaggaagcaggccatccaggagctgcgggccaacgtggaggaggagcgggccgcccggctgaggacagcctctgtgcccctggatgctgtgcgggcagagtgggagaggacctgtggcccctaccacaagcagaggctggccgagtactacggcctgtacagagacctcttccatggagccacctttgtgccccgggtgcccctgcacgtggcctatgctgtgggagaagatgacctgatgcctgtgtactgtggaaatgaggtgacccccacagaggccgcccaggcccctgaggtgacctatgaggccgaggagggcagcctgtggaccctgctgctgaccagcctggatggccacctgctggagccagatgctgagtacctgcactggctgctgaccaacatccctggcaacagagtggccgagggccaggtgacctgcccctacctgccccccttccctgcccggggcagcggcatccaccggctggccttcctgctcttcaagcaggaccagcccatcgacttctctgaagatgcccggcccagcccctgctaccagctggcccagaggaccttccgcacctttgacttctacaagaagcaccaggagaccatgaccccagctggcctgtccttcttccagtgccgctgggatgacagcgtgacctacatcttccaccagctgctggacatgagggagcctgtgtttgaatttgtgcggcccccaccctaccaccccaagcagaagcgcttcccccaccggcagcccctgcgctacctggaccgctacagagacagccatgagcccacctacggcatctactag

SEQ ID NO: 159942 - DNA, 591 bp, synthetic construct
  misc_feature 1..591: note = Description of Artificial Sequence: Synthetic coding sequence
  source 1..591: mol_type = other DNA
atgcctgtgtactgtggaaatgaggtgacccccacagaggccgcccaggcccctgaggtgacctatgaggccgaggagggcagcctgtggaccctgctgctgaccagcctggatggccacctgctggagccagatgctgagtacctgcactggctgctgaccaacatccctggcaacagagtggccgagggccaggtgacctgcccctacctgccccccttccctgcccggggcagcggcatccaccggctggccttcctgctcttcaagcaggaccagcccatcgacttctctgaagatgcccggcccagcccctgctaccagctggcccagaggaccttccgcacctttgacttctacaagaagcaccaggagaccatgaccccagctggcctgtccttcttccagtgccgctgggatgacagcgtgacctacatcttccaccagctgctggacatgagggagcctgtgtttgaatttgtgcggcccccaccctaccaccccaagcagaagcgcttcccccaccggcagcccctgcgctacctggaccgctacagagacagccatgagcccacctacggcatctactag

SEQ ID NO: 159943 - DNA, 1062 bp, synthetic construct
  misc_feature 1..1062: note = Description of Artificial Sequence: Synthetic coding sequence
  source 1..1062: mol_type = other DNA
atggaggccctggccatgggcagccgggccctgcggctgtggctggtggcccctgggggcggcatcaagtggaggttcatcgccaccagcagcgccagccagctgagccccacagagctgacagagatgagaaatgacctcttcaacaaggagaaggcccggcagctgagcctgacccccaggacagagaagattgaggtgaagcacgtgggcaagacagatcctggcaccgtgtttgtgatgaacaagaacatcagcaccccctacagctgtgccatgcacctgtctgagtggtactgcaggaagagcatcctggccctggtggatggccagccctgggacatgtacaagcccctgaccaagagctgtgagatcaagttcctgaccttcaaggactgtgaccctggagaggtgaacaaggcctactggaggagctgtgccatgatgatgggctgcgtcatcgagcgggccttcaaggatgagtacatggtgaacctggtgcgggcccctgaggtgcctgtgatcagcggggccttctgctatgatgtggtgctggacagcaagctggatgagtggatgcccaccaaggagaacctgcgctccttcaccaaggatgcccacgccctgatctacaaggacctgccctttgagaccctggaggtggaggccaaggtggccctggagatcttccagcacagcaagtacaaggtggacttcatcgaggagaaggccagccagaaccctgagagaattgtgaagctgcacagaattggagacttcattgatgtgtctgagggccccctcatccccaggaccagcatctgcttccagtatgaggtgtctgctgtgcacaacctgcagcccacccagcccagcctcatccgccgcttccagggcgtgtccctgcctgtgcacctgcgggcccacttcaccatctgggacaagctgctggagaggagcaggaagatgacccccttccccatcctgctgctcttcaccacccagagcttcttcaccaccagccctgagagctacctgctgcacggcaccgtgtctgagtag

SEQ ID NO: 159944 - DNA, 1017 bp, synthetic construct
  misc_feature 1..1017: note = Description of Artificial Sequence: Synthetic coding sequence
  source 1..1017: mol_type = other DNA
atggaggccctggccatgggcagccgggccctgcggctgtggctggtggcccctgggggcggcatcaagtggaggttcatcgccaccagcagcgccagccagctgagccccacagagctgacagagatgagaaatgacctcttcaacaaggagaaggcccggcagctgagcctgacccccaggacagagaagattgaggtgaagcacgtgggcaagacagatcctggcaccgtgtttgtgatgaacaagaacatcagcaccccctacagctgtgccatgcacctgtctgagtggtactgcaggaagagcatcctggccctggtggatggccagccctgggacatgtacaagcccctgaccaagagctgtgagatcaagttcctgaccttcaaggactgtgaccctggagaggtgaacaaggcctactggaggagctgtgccatgatgatgggctgcgtcatcgagcgggccttcaaggatgagtacatggtgaacctggtgcgggcccctgaggtgcctgtgatcagcggggccttctgctatgatgtggtgctggacagcaagctggatgagtggatgcccaccaaggagaacctgcgctccttcaccaaggatgcccacgccctgatctacaaggacctgccctttgagaccctggaggtggaggccaaggtggccctggagatcttccagcacagcaagtacaaggtggacttcatcgaggagaaggccagccagaaccctgagagaattgtgaagctgcacagaattggagacttcattgatgtgtctgagggccccctcatccccaggaccagcatctgcttccagtatgaggtgtctgctgtgcacaacctgcagcccacccagcccagcctcatccgccgcttccagggcgtgtccctgcctgtgcacctgcgggcccacttcaccatctgggacaagctgctggagaggagcaggaagatggtgacagaggaccagagcaaggccacagaggagtgcaccagcacctag

SEQ ID NO: 159945 - DNA, 936 bp, synthetic construct
  misc_feature 1..936: note = Description of Artificial Sequence: Synthetic coding sequence
  source 1..936: mol_type = other DNA
atgctgcagtttgtgcgggccggggcccgggcctggctgcggcccaccggcagccagggcctgagcagcctggccgaggaggccgcccgggccacagaaaatcctgagcaggtggccagcgagggcctgcctgagcctgtgctgaggaaggtggagctgcctgtgcccacccacagaagacctgtgcaggcctgggtggagagcctgcggggctttgagcaggagcgggtgggcctggccgacctgcacccagatgtgtttgccacagccccccggctggacatcctgcaccaggtggccatgtggcagaagaacttcaagaggatctcctatgccaagaccaagaccagggctgaggtgcggggcggcggcaggaagccctggccccagaagggcaccggccgggcccggcacggcagcatccgcagccccctgtggaggggcggcggcgtggcccacggcccccggggccccaccagctactactacatgctgcccatgaaggtgcgggccctgggcctgaaggtggccctgactgtgaagctggcccaggatgacctgcacatcatggacagcctggagctgcccactggagacccccagtacctgacagagctggcccactaccgccgctggggagacagcgtgctgctggtggacctgacccatgaggagatgccccagagcatcgtggaggccaccagccggctgaagaccttcaacctgatcccagctgtgggcctgaatgtgcacagcatgctgaagcaccagaccctggtgctgaccctgcccaccgtggccttcctggaggacaagctgctgtggcaggacagccgctaccggcccctgtaccccttcagcctgccctacagcgacttcccccggcccctgccccacgccacccagggccctgctgccaccccctaccactgctag

SEQ ID NO: 159946 - DNA, 936 bp, synthetic construct; identical to SEQ ID NO: 159945
  misc_feature 1..936: note = Description of Artificial Sequence: Synthetic coding sequence
  source 1..936: mol_type = other DNA

SEQ ID NO: 159947 - DNA, 792 bp, synthetic construct
  misc_feature 1..792: note = Description of Artificial Sequence: Synthetic coding sequence
  source 1..792: mol_type = other DNA
atgctgcagtttgtgcgggccggggcccgggcctggctgcggcccaccggcagccagggcctgagcagcctggccgaggaggccgcccgggccacagaaaatcctgagcaggtggccagcgagggcctgcctgagcctgtgctgaggaaggtggagctgcctgtgcccacccacagaagacctgtgcaggcctgggtggagagcctgcggggctttgagcaggagcgggtgggcctggccgacctgcacccagatgtgtttgccacagccccccggctggacatcctgcaccaggtggccatgtggcagaagaacttcaagaggatctcctatgccaagaccaagaccagggctgaggtgcggggcggcggcaggaagccctggccccagaagggcaccggccgggcccggcacggcagcatccgcagccccctgtggaggggcggcggcgtggcccacggcccccggggccccaccagctactactacatgctgcccatgaaggtgcgggccctgggcctgaaggtggccctgactgtgaagctggcccaggatgacctgcacatcatggacagcctggagctgcccactggagacccccagtacctgacagagctggcccactaccgccgctggggagacagcgtgctgctggtggacctgacccatgaggagatgccccagagcatcgtggaggccaccagccggctgaagaccttcaacctgatcccagctgtgggggagcagagggcccaggccccccgggtgaggatgtgccgcctgcgctgctag

SEQ ID NO: 159948 - DNA, 792 bp, synthetic construct; identical to SEQ ID NO: 159947
  misc_feature 1..792: note = Description of Artificial Sequence: Synthetic coding sequence
  source 1..792: mol_type = other DNA

SEQ ID NO: 159949 - DNA, 414 bp, synthetic construct
  misc_feature 1..414: note = Description of Artificial Sequence: Synthetic coding sequence
  source 1..414: mol_type = other DNA
atgggcgtgctggccgctgctgcccgctgcctggtgagaggagctgacaggatgagcaagtggaccagcaagaggggccccaggagcttccggggcaggaagggccgcggggccaagggcatcggcttcctgaccagcggctggaggtttgtgcagatcaaggagatggtgcctgagtttgtggtgcctgacctgaccggcttcaagctgaagccctacgtgtcctacctggcccctgagagcgaggagacccccctgacagctgcccagctgttcagcgaggccgtggccccagccatcgagaaggacttcaaggatggcacctttgatcctgacaacctggagaagtatggctttgagcccacccaggagggcaagctgttccagctgtaccccaggaacttcctgaggtag

SEQ ID NO: 159950 - DNA, 429 bp, synthetic construct
  misc_feature 1..429: note = Description of Artificial Sequence: Synthetic coding sequence
  source 1..429: mol_type = other DNA
atgggagatgtgaaggagaactacctggagaccttcatcagcagccccaagtttggccgcacctgtgctgatggagccctgtactgtgtgtgccacaagagcacctacagccccctgcctgatgactacaactgcaatgtggagctggccctgaccagtgatggccgcaccatcgtgtgctaccaccccagcgtggacatcccctatgagcacaccaagcccatccccaggccagaccctgtgcacaacaatgaggagacccatgaccaggtgctgaagacccggctggaggagaaggtggagcacctggaggagggccccatgattgagcagctgagcaagatgttcttcaccaccaagcaccgctggtacccccacggccgctaccaccgctgcaggaagaacctgaacccccccaaggacagatag

SEQ ID NO: 159951 - DNA, 429 bp, synthetic construct
  misc_feature 1..429: note = Description of Artificial Sequence: Synthetic coding sequence
  source 1..429: mol_type = other DNA
atggctgtggccgctgtgaagtgggtgatgagcaagaggaccatcctgaagcacctgtttcctgtgcagaatggagccctgtactgtgtgtgccacaagagcacctacagccccctgcctgatgactacaactgcaatgtggagctggccctgaccagtgatggccgcaccatcgtgtgctaccaccccagcgtggacatcccctatgagcacaccaagcccatccccaggccagaccctgtgcacaacaatgaggagacccatgaccaggtgctgaagacccggctggaggagaaggtggagcacctggaggagggccccatgattgagcagctgagcaagatgttcttcaccaccaagcaccgctggtacccccacggccgctaccaccgctgcaggaagaacctgaacccccccaaggacagatag

SEQ ID NO: 159952 - DNA, 429 bp, synthetic construct; identical to SEQ ID NO: 159951
  misc_feature 1..429: note = Description of Artificial Sequence: Synthetic coding sequence
  source 1..429: mol_type = other DNA

SEQ ID NO: 159953 - DNA, 429 bp, synthetic construct; identical to SEQ ID NO: 159951
  misc_feature 1..429: note = Description of Artificial Sequence: Synthetic coding sequence
  source 1..429: mol_type = other DNA

SEQ ID NO: 159954 - DNA, 609 bp, synthetic construct
  misc_feature 1..609: note = Description of Artificial Sequence: Synthetic coding sequence
  source 1..609: mol_type = other DNA
atgacagcccggggcacccccagccgcttcctggcctctgtgctgcacaacggcctgggccgctacgtgcagcagctgcagaggctgtccttctctgtgtccagagatggagccagcagcagaggagcccgggagtttgtggagcgggaggtgattgactttgccaggagaaatcctggggtggtgatctacgtgaacagccggccctgctgcgtgccccgggtggtggccgagtacctgaatggagctgtgcgggaggagagcatccactgcaagtctgtggaggagatcagcaccctggtgcagaagctggccgaccagagcggcctggatgtgatccgcatcaggaagcccttccacacagacaaccccagcatccagggccagtggcaccccttcaccaacaagcccaccaccttccggggcctgcggccccgggaggtgcaggaccctgccccagcccaggacaccggcctgcggctgtctgctgtggccccccagatcctgctgcccggctggccagaccccatctctgtgcagagcagtgacctgccctggggcaacacccactacagacctgagcccctgagcagcaccacctggctgtag

SEQ ID NO: 159955 - DNA, 648 bp, synthetic construct
  misc_feature 1..648: note = Description of Artificial Sequence: Synthetic coding sequence
  source 1..648: mol_type = other DNA
atgacagcccggggcacccccagccgcttcctggcctctgtgctgcacaacggcctgggccgctacgtgcagcagctgcagaggctgtccttctctgtgtccagagatggagccagcagcagaggagcccgggagtttgtggagcgggaggtgattgactttgccaggagaaatcctggggtggtgatctacgtgaacagccggccctgctgcgtgccccgggtggtggccgagtacctgaatggagctgtgcgggaggagagcatccactgcaagtctgtggaggagatcagcaccctggtgcagaagctggccgaccagagcggcctggatgtgatccgcatcaggaagcccttccacacagacaaccccagcatccagggccagtggcaccccttcaccaacaagcccaccaccttccggggcctgcggccccgggaggtgcaggaccctgccccagcccaggacaccggcctgcggctgtctgctgtggccccccagatcctgctgcccggctggccagaccccccagacctgcccaccgtggaccccatcagcagcagcctgaccagcgccccagcccccatgctgtctgctgtgtcctgcctgcccatcgtgcctgccctgaccaccgtgtgcagcgcctag

SEQ ID NO: 159956 - DNA, 480 bp, synthetic construct
  misc_feature 1..480: note = Description of Artificial Sequence: Synthetic coding sequence
  source 1..480: mol_type = other DNA
atgacagcccggggcacccccagccgcttcctggcctctgtgctgcacaacggcctgggccgctacgtgcagcagctgcagaggctgtccttctctgtgtccagagatggagccagcagcagaggagcccgggagtttgtggagcgggaggtgattgactttgccaggagaaatcctggggtggtgatctacgtgaacagccggccctgctgcgtgccccgggtggtggccgagtacctgaatggagctgtgcgggaggagagcatccactgcaagtctgtggaggagatcagcaccctggtgcagaagctggccgaccagagcggcctggatgtgatccgcatcaggaagcccttccacacagacaaccccagcatccagggccagtggcaccccttcaccaacaagcccaccaccttccggggcctgcggccccgggaggtgcaggaccctgccccagcccaggtgcaggcccagtag

SEQ ID NO: 159957 - DNA, 708 bp, synthetic construct
  misc_feature 1..708: note = Description of Artificial Sequence: Synthetic coding sequence
  source 1..708: mol_type = other DNA
atgacagcccggggcacccccagccgcttcctggcctctgtgctgcacaacggcctgggccgctacgtgcagcagctgcagaggctgtccttctctgtgtccagagatggagccagcagcagaggagcccgggagtttgtggagcgggaggtgattgactttgccaggagaaatcctggggtggtgatctacgtgaacagccggccctgctgcgtgccccgggtggtggccgagtacctgaatggagctgtgcgggaggagagcatccactgcaagtctgtggaggagatcagcaccctggtgcagaagctggccgaccagagcggcctggatgtgatccgcatcaggaagcccttccacacagacaaccccagcatccagggccagtggcaccccttcaccaacaagcccaccaccttccggggcctgcggccccgggaggtgcaggaccctgccccagcccaggatgctgctgagttcctgggggagggcgccggcccctgctggtacagcatcgtggccctgccccagaagcacatcgccatcgccatccaccccccccagcctgctggccagtgccaccaggccatcggccactggccagagaccgtgtgcagctgcacagctgaccccccagcccggctggcccggcccaacatcagcagcgtcatccgcagcagcctgggcaagtaccccctgcccagctag

SEQ ID NO: 159958 - DNA, 495 bp, synthetic construct
  misc_feature 1..495: note = Description of Artificial Sequence: Synthetic coding sequence
  source 1..495: mol_type = other DNA
atgacagcccggggcacccccagccgcttcctggcctctgtgctgcacaacggcctgggccgctacgtgcagcagctgcagaggctgtccttctctgtgtccagagatggagccagcagcagaggagcccgggagtttgtggagcgggaggtgattgactttgccaggagaaatcctggggtggtgatctacgtgaacagccggccctgctgcgtgccccgggtggtggccgagtacctgaatggagctgtgcgggaggagagcatccactgcaagtctgtggaggagatcagcaccctggtgcagaagctggccgaccagagcggcctggatgtgatccgcatcaggaagcccttccacacagacaaccccagcatccagggccagtggcaccccttcaccaacaagcccaccaccttccggggcctgcggccccgggaggtgcaggaccctgccccagcccagtgcctgctgctgggcgctgtgaccctgtag

SEQ ID NO: 159959 - DNA, 480 bp, synthetic construct; identical to SEQ ID NO: 159956
  misc_feature 1..480: note = Description of Artificial Sequence: Synthetic coding sequence
  source 1..480: mol_type = other DNA

SEQ ID NO: 159960 - DNA, 555 bp, synthetic construct
  misc_feature 1..555: note = Description of Artificial Sequence: Synthetic coding sequence
  source 1..555: mol_type = other DNA
atgacagcccggggcacccccagccgcttcctggcctctgtgctgcacaacggcctgggccgctacgtgcagcagctgcagaggctgtccttctctgtgtccagagatggagccagcagcagaggagcccgggagtttgtggagcgggaggtgattgactttgccaggagaaatcctggggtggtgatctacgtgaacagccggccctgctgcgtgccccgggtggtggccgagtacctgaatggagctgtgcgggaggagagcatccactgcaagtctgtggaggagatcagcaccctggtgcagaagctggccgaccagagcggcctggatgtgatccgcatcaggaagcccttccacacagacaaccccagcatccagggccagtggcaccccttcaccaacaagcccaccaccttccggggcctgcggccccgggaggtgcaggaccctgccccagcccaggacaccggcctgcggctgtctgctgtggccccccagatcctgctgcccggctggccagaccccacccgggccacccgggccaccaggtag

SEQ ID NO: 159961 - DNA, 786 bp, synthetic construct
  misc_feature 1..786: note = Description of Artificial Sequence: Synthetic coding sequence
  source 1..786: mol_type = other DNA
atgacagcccggggcacccccagccgcttcctggcctctgtgctgcacaacggcctgggccgctacgtgcagcagctgcagaggctgtccttctctgtgtccagagatggagccagcagcagaggagcccgggagtttgtggagcgggaggtgattgactttgccaggagaaatcctggggtggtgatctacgtgaacagccggccctgctgcgtgccccgggtggtggccgagtacctgaatggagctgtgcgggaggagagcatccactgcaagtctgtggaggagatcagcaccctggtgcagaagctggccgaccagagcggcctggatgtgatccgcatcaggaagcccttccacacagacaaccccagcatccagggccagtggcaccccttcaccaacaagcccaccaccttccggggcctgcggccccgggaggtgcaggaccctgccccagcccaggatgctgctgagttcctgggggagggcgccggcccctgctggtacagcatcgtggccctgccccagaagcacatcgccatcgccatccaccccccccagcctgctggccagtgccaccaggccatcggccactggccagagaccgtgtgcagctgcacagctgaccccccagcccggctggcccggcccaccaggcctccccacagcggcagctacctgatcctgattgacctgtgcagcagcccctatgctgtgcgctccttcctgcccccagactgcccctgcacagaccactgtgtgctgtctgtgaaggccgcctag

SEQ ID NO: 159962 - DNA, 510 bp, synthetic construct
  misc_feature 1..510: note = Description of Artificial Sequence: Synthetic coding sequence
  source 1..510: mol_type = other DNA
tgaggaacacccagccgcttcctggcctctgtgctgcacaacggcctgggccgctacgtgcagcagctgcagaggctgtccttctctgtgtccagagatggagccagcagcagaggagcccgggagtttgtggagcgggaggtgattgactttgcccggaggaaccctggggtggtgatctacgtgaacagccggccctgctgcgtgccccgggtggtggccgagtacctgaatggagctgtgcgggaggagagcatccactgcaagtctgtggaggagatcagcaccctggtgcagaagctggccgaccagagcggcctggatgtgatccgcatcaggaagcccttccacacagacaaccccagcatccagggccagtggcaccccttcaccaacaagcccaccaccttccggggcctgcggccccgggaggtgcaggaccctgccccagcccaggatgctgctgagttcctgggggagggcgccggcccctgctggaccctggcctag

SEQ ID NO: 159963 - DNA, 999 bp, synthetic construct
  misc_feature 1..999: note = Description of Artificial Sequence: Synthetic coding sequence
  source 1..999: mol_type = other DNA
atggccagcggcctggtgcggctgctgcagcagggccaccgctgcctgctggcccctgtggcccccaagctggtgccccctgtgcggggcgtgaagaagggcttccgggccgccttccgcttccagaaggagctggagcggcagaggctgctgcgctgccccccacctcctgtgagaagaagtgagaagcccaactgggactaccacgccgagatccaggccttcggccaccggctgcaggagaacttcagcctggacctgctgaagacagcctttgtgaacagctgctacatcaagtctgaggaggccaagaggcagcagctgggcatcgagaaggaggccgtgctgctgaacctgaagagcaaccaggagctgtctgagcagggcaccagcttcagccagacctgcctgacccagttcctggaggatgagtacccagacatgcccacagagggcatcaagaacctggtggacttcctgactggagaggaggtggtgtgccacgtggccaggaacctggccgtggagcagctgaccctgtctgaggagttccctgtgcccccagctgtgctgcagcagaccttctttgctgtgattggagccctgctgcagagcagcggccctgagaggacagccctcttcatccgggacttcctgatcacccagatgaccgggaaggagctgtttgagatgtggaagatcatcaaccccatgggcctgctggtggaggagctgaagaagagaaatgtgtctgcccctgagagccggctgacccggcagagcggcggcaccacagccctgcccctgtactttgtgggcctgtactgtgacaagaagctgattgctgagggccctggagagaccgtgctggtggccgaggaggaggccgcccgggtggccctgaggaagctgtatggcttcacagaaaatagaagaccctggaactacagcaagcccaaggagaccctgcgggcagagaagagcatcacagccagctag

SEQ ID NO: 159964 - DNA, 921 bp, synthetic construct
  misc_feature 1..921: note = Description of Artificial Sequence: Synthetic coding sequence
  source 1..921: mol_type = other DNA
atggccgcccccatcccccagggcttcagctgcctgagccgcttcctgggctggtggttccggcagcctgtgctggtgacccagagcgctgccatcgtgcctgtgaggaccaagaagcgcttcaccccacccatctaccagcccaagttcaagacagagaaggagttcatgcagcacgccaggaaggccggcctggtgatccccccagagaagagtgacaggagcatccacctggcctgcacagctggcatctttgatgcctacgtgcccccagaaggagatgcccgcatcagcagcctgagcaaggagggcctcatcgagaggacagagaggatgaagaagaccatggccagccaggtgtccatccgccgcatcaaggactatgatgccaacttcaagatcaaggacttccctgagaaggccaaggacatcttcatcgaggcccacctgtgcctgaacaacagcgaccatgaccggctgcacaccctggtgacagagcactgcttcccagacatgacctgggacatcaagtacaagacagtgcgctggagctttgtggagagcctggagcccagccacgtggtgcaggtgcgctgcagctccatgatgaaccagggcaatgtgtatggccagatcaccgtgaggatgcacacccggcagaccctggccatctatgaccgcttcggccgcctgatgtatggccaggaggatgtgcccaaggatgtgctggagtatgtggtgtttgagaagcagctgaccaacccctacggctcctggaggatgcacaccaagatcgtgcccccctgggccccacccaagcagcccatcctgaagacagtgatgatccctggcccccagctgaagccagaggaggagtatgaggaggcccagggcgaggcccagaagccccagctggcctag

SEQ ID NO: 159965 - DNA, 693 bp, synthetic construct
  misc_feature 1..693: note = Description of Artificial Sequence: Synthetic coding sequence
  source 1..693: mol_type = other DNA
atggctgctgctggcctggccctgctgtgcagaagagtgtcctctgccctgaagagcagccgcagcctcatcaccccccaggtgcctgcctgcaccggcctgctgcacaccaccctgagcaggaagggcctggaggagttctttgatgaccccaagaactggggccaggagaaggtgaagtctggagctgcctggacctgccagcagctgaggaacaagagcaatgaagacctgcacaagctgtggtacgtgctgctgaaggagaggaacatgctgctgaccctggagcaggaggccaagaggcagaggctgcccatgcccagccctgagcggctggacaaggtggtggacagcatggatgccctggacaaggtggtgcaggagcgggaggatgccctgcggctgctgcagacaggccaggagcgggcccggcctggggcctggaggcgggacatcttcggccgcatcatctggcacaagttcaagcagtgggtgatcccctggcacctgaacaagcgctacaacaggaagcgcttctttgccctgccctacgtggaccacttcctgcggctggagcgggagaagagggcccgcatcaaggccaggaaggagaacctggagaggaagaaggccaagatcctgctgaagaagttcccccacctggccgaggcccagaagagcagcctggtgtag

SEQ ID NO: 159966 - DNA, 423 bp, synthetic construct
  misc_feature 1..423: note = Description of Artificial Sequence: Synthetic coding sequence
  source 1..423: mol_type = other DNA
atgctgctgaccctggagcaggaggccaagaggcagaggctgcccatgcccagccctgagcggctggacaaggtggtggacagcatggatgccctggacaaggtggtgcaggagcgggaggatgccctgcggctgctgcagacaggccaggagcgggcccggcctggggcctggaggcgggacatcttcggccgcatcatctggcacaagttcaagcagtgggtgatcccctggcacctgaacaagcgctacaacaggaagcgcttctttgccctgccctacgtggaccacttcctgcggctggagcgggagaagagggcccgcatcaaggccaggaaggagaacctggagaggaagaaggccaagatcctgctgaagaagttcccccacctggccgaggcccagaagagcagcctggtgtag

SEQ ID NO: 159967 - DNA, 753 bp, synthetic construct
  misc_feature 1..753: note = Description of Artificial Sequence: Synthetic coding sequence
  source 1..753: mol_type = other DNA
atggctgctgctggcctggccctgctgtgcagaagagtgtcctctgccctgaagagcagccgcagcctcatcaccccccaggtgcctgcctgcaccggcttcttcctgagcctgctgcccaagagcaccccaaatgtgaccagcttccaccagtaccgcctgctgcacaccaccctgagcaggaagggcctggaggagttctttgatgaccccaagaactggggccaggagaaggtgaagtctggagctgcctggacctgccagcagctgaggaacaagagcaatgaagacctgcacaagctgtggtacgtgctgctgaaggagaggaacatgctgctgaccctggagcaggaggccaagaggcagaggctgcccatgcccagccctgagcggctggacaaggtggtggacagcatggatgccctggacaaggtggtgcaggagcgggaggatgccctgcggctgctgcagacaggccaggagcgggcccggcctggggcctggaggcgggacatcttcggccgcatcatctggcacaagttcaagcagtgggtgatcccctggcacctgaacaagcgctacaacaggaagcgcttctttgccctgccctacgtggaccacttcctgcggctggagcgggagaagagggcccgcatcaaggccaggaaggagaacctggagaggaagaaggccaagatcctgctgaagaagttcccccacctggccgaggcccagaagagcagcctggtgtag

SEQ ID NO: 159968 - DNA, 639 bp, synthetic construct
  misc_feature 1..639: note = Description of Artificial Sequence: Synthetic coding sequence
  source 1..639: mol_type = other DNA
atgagcggcaccctggagaaggtgctgtgcctgaggaacaacaccatcttcaagcaggccttcagcctgctgcgcttccgcaccagcggggagaagcccatctacagcgtgggcggcatcctgctgagcatcagccggccctacaagaccaagcccacccacggcatcggcaagtacaagcacctgatcaaggccgaggagcccaagaagaagaagggcaaggtggaggtgcgggccatcaacctgggcacagattatgaatatggagtgctgaacatccacctgacagcctatgacatgaccctggccgagagctatgcccagtatgtgcacaacctgtgcaacagcctgagcatcaaggtggaggagagctatgccatgcccaccaagaccatcgaggtgctgcagctgcaggaccagggcagcaagatgctgctggacagcgtgctgaccacccatgagcgggtggtgcagatcagcggcctgagcgccacctttgctgagatcttcctggagatcatccagagcagcctgcctgagggcgtgcggctgtctgtgaaggagcacacagaggaggacttcaagggccgcttcaaggcccggcctgagctggaggagctgctggccaagctgaagtag

SEQ ID NO: 159969 - DNA, 585 bp, synthetic construct
  misc_feature 1..585: note = Description of Artificial Sequence: Synthetic coding sequence
  source 1..585: mol_type = other DNA
atgggcctgagcagctgcaggaagaccagcagcggcctgcccctcatcctgcactatggaggcatcctgctgagcatcagccggccctacaagaccaagcccacccacggcatcggcaagtacaagcacctgatcaaggccgaggagcccaagaagaagaagggcaaggtggaggtgcgggccatcaacctgggcacagattatgaatatggagtgctgaacatccacctgacagcctatgacatgaccctggccgagagctatgcccagtatgtgcacaacctgtgcaacagcctgagcatcaaggtggaggagagctatgccatgcccaccaagaccatcgaggtgctgcagctgcaggaccagggcagcaagatgctgctggacagcgtgctgaccacccatgagcgggtggtgcagatcagcggcctgagcgccacctttgctgagatcttcctggagatcatccagagcagcctgcctgagggcgtgcggctgtctgtgaaggagcacacagaggaggacttcaagggccgcttcaaggcccggcctgagctggaggagctgctggccaagctgaagtag

SEQ ID NO: 159970 - DNA, 501 bp, synthetic construct
  misc_feature 1..501: note = Description of Artificial Sequence: Synthetic coding sequence
  source 1..501: mol_type = other DNA
atggccgccaccatgttccgggccaccctgcggggctggaggactggagtgcagaggggctgcggcctgcggctgctgagccagacccagggccccccagactaccccaggtttgtggagagcgtggatgagtaccagtttgtggagcggctgctgcctgccacccgcatcccagacccccccaagcatgagcactaccccacccccagcggctggcagcccccccgggaccccccacccaacctgccctactttgtgagaagaagcaggatgcacaacatccctgtgtacaaggacatcacccacggcaaccggcagatgaccgtcatcaggaaggtggagggggacatctgggccctgcagaaggatgtggaggacttcctgagccccctgctgggcaagacccctgtgacccaggtgaatgaggtgacaggcaccctgcgcatcaagggctactttgaccaggagctgaaggcctggctgctggagaagggcttctag

SEQ ID NO: 159971 - DNA, 501 bp, synthetic construct; identical to SEQ ID NO: 159970
  misc_feature 1..501: note = Description of Artificial Sequence: Synthetic coding sequence
  source 1..501: mol_type = other DNA

SEQ ID NO: 159972 - DNA, 477 bp, synthetic construct
  misc_feature 1..477: note = Description of Artificial Sequence: Synthetic coding sequence
  source 1..477: mol_type = other DNA
atggccgcccggtctgtgtctggcatcaccaggagggtcttcatgtggacagtgtctggcaccccctgccgggagttctggagccgcttcaggaaggagaaggagcctgtggtggtggagaccgtggaggagaagaaggagcccatcctggtgtgcccccccctgcggagccgggcctacaccccacctgaggacctgcagagccggctggagagctatgtgaaggaggtgtttggcagcagcctgcccagcaactggcaggacatcagcctggaggacagccggctgaagttcaacctgctggcccacctggctgatgacctgggccacgtggtgcccaacagccggctgcaccagatgtgccgggtgagagatgtgctggacttctacaacgtgcccatccaggacaggagcaagtttgatgagctgagcgccagcaacctgccccccaacctgaagatcacctggagctactag

SEQ ID NO: 159973 - DNA, 408 bp, synthetic construct
  misc_feature 1..408: note = Description of Artificial Sequence: Synthetic coding sequence
  source 1..408: mol_type = other DNA
atggccgcccggtctgtgtctggcatcaccaggagggtcttcatgtggacagtgtctggcaccccctgccgggagttctggagccgcttcaggaaggagaaggagcctgtggtggtggagaccgtggaggagaagaaggagcccatcctggtgtgcccccccctgcggagccgggcctacaccccacctgaggacctgcagagccggctggagagctatgtgaaggaggtgtttggcagcagcctgcccagcaactggcaggacatcagcctggaggacagccggctgaagttcaacctgctggcccacctggctgatgacctgggccacgtggtgcccaacagccggctgcaccagatgtgccggggctacagctttgaggagggcaagatccagctgggcatctag

SEQ ID NO: 159974 - DNA, 1146 bp, synthetic construct
  misc_feature 1..1146: note = Description of Artificial Sequence: Synthetic coding sequence
  source 1..1146: mol_type = other DNA
atggccagccccagcctggagaggcctgagaagggagctgggaagtctgagttcaggaaccagaagcccaagccagagaaccaggatgaaagtgagctgctgactgtgcctgatggctggaaggagcccgccttcagcaaggaggacaacccccggggcctgctggaggagagcagctttgccaccctcttccccaagtaccgggaggcctacctgaaggagtgctggcccctggtgcagaaggccctgaatgagcaccacgtgaatgccaccctggacctgattgagggctccatgacagtgtgcaccaccaagaagacctttgacccctacatcatcatccgggcccgggacctgatcaagctgctggcccggtctgtgtcctttgagcaggccgtgcgcatcctgcaggatgatgtggcctgtgacatcatcaagattggcagcctggtgaggaacaaggagagatttgtgaagaggcggcagaggctgattggccccaagggcagcaccctgaaggccctggagctgctgaccaactgctacatcatggtgcagggcaacacagtgtctgccatcggccccttcagcggcctgaaggaggtgaggaaggtggtgctggacaccatgaagaacatccaccccatctacaacatcaagagcctgatgatcaagcgggagctggccaaggacagcgagctgcggagccagagctgggagcgcttcctgccccagttcaagcacaagaatgtgaacaagaggaaggagcccaagaagaagacagtgaagaaggagtacacccccttccccccaccccagcctgagagccagattgacaaggagctggccagcggggagtacttcctgaaggccaaccagaagaagaggcagaagatggaggccatcaaggccaagcaggccgaggccatcagcaagaggcaggaggagaggaacaaggccttcatcccccccaaggagaagcccatcgtgaagcccaaggaggccagcacagagaccaagattgatgtggccagcatcaaggagaaggtgaagaaggccaagaacaagaagctgggcgccctgacagctgaggagatcgccctgaagatggaggctgatgagaagaagaagaagaagaagaagtag

SEQ ID NO: 159975 - DNA, 372 bp, synthetic construct
  misc_feature 1..372: note = Description of Artificial Sequence: Synthetic coding sequence
  source 1..372: mol_type = other DNA
atggccgccctgggcaccgtgctcttcaccggggtgcggcggctgcactgcagcgtggccgcctgggccggcggccagtggaggctgcagcagggcctggccgccaaccccagcggctacggccccctgacagagctgcctgactggagctatgcagatggccggcctgccccacccatgaagggccagctgcggaggaaggccgagcgggagacctttgccaggagagtggtgctgctgagccaggagatggatgctggcctgcaggcctggcagctgcggcagcagaagctgcaggaggagcagaggaagcaggagaatgccctgaagcccaagggggccagcctgaagagccccctgcccagccagtag

SEQ ID NO: 159976 - DNA, 369 bp, synthetic construct
  misc_feature 1..369: note = Description of Artificial Sequence: Synthetic coding sequence
  source 1..369: mol_type = other DNA
atggccgccctgggcaccgtgctcttctctgtgcggcggctgcactgcagcgtggccgcctgggccggcggccagtggaggctgcagcagggcctggccgccaaccccagcggctacggccccctgacagagctgcctgactggagctatgcagatggccgcccagccccacccatgaagggccagctgcggaggaaggccgagcgggagacctttgcccggcgggtggtgctgctgagccaggagatggatgctggcctgcaggcctggcagctgcggcagcagaagctgcaggaggagcagaggaagcaggagaatgccctgaagcccaagggggccagcctgaagagccccctgcccagccagtag

SEQ ID NO: 159977 - DNA, 264 bp, synthetic construct
  misc_feature 1..264: note = Description of Artificial Sequence: Synthetic coding sequence
  source 1..264: mol_type = other DNA
atggccgccctgggcaccgtgctcttcaccggggtgcggcggctgcactgcagcgtggccgcctgggccggcggccagtggaggctgcagcagggcctggccgccaaccccagcggctacggccccctgacagagctgcctgactggagctatgcagagaccagctgcacagctgtgactggaaatggccgctggatcacctccatggccgcccaggccgctgaggtggccggccgcaccaaggaggccggcaagtgcagctag

SEQ ID NO: 159978 - DNA, 195 bp, synthetic construct
  misc_feature 1..195: note = Description of Artificial Sequence: Synthetic coding sequence
  source 1..195: mol_type = other DNA
atgaagggccagctgcggaggaaggccgagcgggagacctttgcccggcgggtggtgctgctgagccaggagatggatgctggcctgcaggcctggcagctgcggcagcagaagctgcaggaggagcagaggaagcaggagaatgccctgaagcccaagggggccagcctgaagagccccctgcccagccagtag

SEQ ID NO: 159979 - DNA, 195 bp, synthetic construct; identical to SEQ ID NO: 159978
  misc_feature 1..195: note = Description of Artificial Sequence: Synthetic coding sequence
  source 1..195: mol_type = other DNA

SEQ ID NO: 159980 - DNA, 195 bp, synthetic construct; identical to SEQ ID NO: 159978
  misc_feature 1..195: note = Description of Artificial Sequence: Synthetic coding sequence
  source 1..195: mol_type = other DNA

SEQ ID NO: 159981 - DNA, 339 bp, synthetic construct
  misc_feature 1..339: note = Description of Artificial Sequence: Synthetic coding sequence
  source 1..339: mol_type = other DNA
atggctgctgccctggcccggctgggcctgcggcctgtgaagcaggtgcgggtgcagttctgcccctttgagaagaatgtggagagcaccaggaccttcctgcagacagtgtcctctgagaaggtgcgcagcaccaacctgaactgcagcgtgattgctgatgtgagacatgatggcagcgagccctgtgtggatgtgctgtttggagatggccacaggctcatcatgagaggagcccacctgacagccctggagatgctgacagcctttgccagccacatccgggccagagatgctgctggcagcggggacaagccaggagctgacaccggccgctag

SEQ ID NO: 159982 - DNA, 417 bp, synthetic construct
  misc_feature 1..417: note = Description of Artificial Sequence: Synthetic coding sequence
  source 1..417: mol_type = other DNA
atggccaccaagaggctgtttggagccaccaggacctgggccggctggggcgcctgggagctgctgaacccagccaccagcggccgcctgctggcccgggactatgccaagaagcctgtgatgaagggggccaagagcgggaaaggagctgtgaccagcgaggccctgaaggaccctgatgtgtgcacagatcctgtgcagctgaccacctacgccatgggcgtgaacatctacaaggagggccaggatgtgcccctgaagccagatgctgagtacccagagtggctgtttgagatgaacctgggcccccccaagaccctggaggagctggaccctgagagccgggagtactggaggcggctgaggaagcagaacatctggaggcacaaccggctgagcaagaacaagaggctgtag

SEQ ID NO: 159983 - DNA, 387 bp, synthetic construct
  misc_feature 1..387: note = Description of Artificial Sequence: Synthetic coding sequence
  source 1..387: mol_type = other DNA
atggctgctgtgggcagcctgctgggccgcctgcggcagagcacagtgaaggccactggacctgccctgcggcggctgcacaccagctcctggagggctgacagcagccgggccagcctgaccagggtgcaccggcaggcctatgcccggctgtaccctgtgctgctggtgaagcaggacggcagcaccatccacatccgctaccgggagcccaggaggatgctggccatgcccatcgacctggacaccctgagccctgaggagcggcgggcccggctgaggaagcgggaggcccagctgcagagcaggaaggagtatgagcaggagctgagtgatgacctgcacgtggagcgctaccggcagttctggaccaggaccaagaagtag

SEQ ID NO: 159984 - DNA, 387 bp, synthetic construct; identical to SEQ ID NO: 159983
  misc_feature 1..387: note = Description of Artificial Sequence: Synthetic coding sequence
  source 1..387: mol_type = other DNA

SEQ ID NO: 159985 - DNA, 387 bp, synthetic construct; identical to SEQ ID NO: 159983
  misc_feature 1..387: note = Description of Artificial Sequence: Synthetic coding sequence
  source 1..387: mol_type = other DNA

SEQ ID NO: 159986 - DNA, 387 bp, synthetic construct; identical to SEQ ID NO: 159983
  misc_feature 1..387: note = Description of Artificial Sequence: Synthetic coding sequence
  source 1..387: mol_type = other DNA

SEQ ID NO: 159987 - DNA, 495 bp, synthetic construct
  misc_feature 1..495: note = Description of Artificial Sequence: Synthetic coding sequence
  source 1..495: mol_type = other DNA
atggctgctgtgggcagcctgctgggcctggccgccagctcctggctgggcggccagaatgccagtgaccacagcctgtggctgctgaggaagccccggggcagcagctgccccggcaccggccaccagctgtgccgcctgcggcagagcacagtgaaggccactggacctgccctgcggcggctgcacaccagctcctggagggctgacagcagccgggccagcctgaccagggtgcaccggcaggcctatgcccggctgtaccctgtgctgctggtgaagcaggacggcagcaccatccacatccgctaccgggagcccaggaggatgctggccatgcccatcgacctggacaccctgagccctgaggagcggcgggcccggctgaggaagcgggaggcccagctgcagagcaggaaggagtatgagcaggagctgagtgatgacctgcacgtggagcgctaccggcagttctggaccaggaccaagaagtag

SEQ ID NO: 159988 - DNA, 378 bp, synthetic construct
  misc_feature 1..378: note = Description of Artificial Sequence: Synthetic coding sequence
  source 1..378: mol_type = other DNA
atggctgctgtgggcagcctgctgggccagagcacagtgaaggccaccggccctgccctgcggcggctgcacaccagctcctggagggctgacagcagccgggccagcctgaccagggtgcaccggcaggcctatgcccggctgtaccctgtgctgctggtgaagcaggacggcagcaccatccacatccgctaccgggagcccaggaggatgctggccatgcccatcgacctggacaccctgagccctgaggagcggcgggcccggctgaggaagcgggaggcccagctgcagagcaggaaggagtatgagcaggagctgagtgatgacctgcacgtggagcgctaccggcagttctggaccaggaccaagaagtag

SEQ ID NO: 159989 - DNA, 387 bp, synthetic construct; identical to SEQ ID NO: 159983
  misc_feature 1..387: note = Description of Artificial Sequence: Synthetic coding sequence
  source 1..387: mol_type = other DNA

SEQ ID NO: 159990 - DNA, 387 bp, synthetic construct; identical to SEQ ID NO: 159983
  misc_feature 1..387: note = Description of Artificial Sequence: Synthetic coding sequence
  source 1..387: mol_type = other DNA

SEQ ID NO: 159991 - DNA, 387 bp, synthetic construct; identical to SEQ ID NO: 159983
  misc_feature 1..387: note = Description of Artificial Sequence: Synthetic coding sequence
  source 1..387: mol_type = other DNA

SEQ ID NO: 159992 - DNA, 387 bp, synthetic construct; identical to SEQ ID NO: 159983
  misc_feature 1..387: note = Description of Artificial Sequence: Synthetic coding sequence
  source 1..387: mol_type = other DNA

SEQ ID NO: 159993 - DNA, 495 bp, synthetic construct; identical to SEQ ID NO: 159987
  misc_feature 1..495: note = Description of Artificial Sequence: Synthetic coding sequence
  source 1..495: mol_type = other DNA

SEQ ID NO: 159994 - DNA, 387 bp, synthetic construct; identical to SEQ ID NO: 159983
  misc_feature 1..387: note = Description of Artificial Sequence: Synthetic coding sequence
  source 1..387: mol_type = other DNA

SEQ ID NO: 159995 - DNA, 387 bp, synthetic construct; identical to SEQ ID NO: 159983
  misc_feature 1..387: note = Description of Artificial Sequence: Synthetic coding sequence
  source 1..387: mol_type = other DNA

SEQ ID NO: 159996 - DNA, 387 bp, synthetic construct; identical to SEQ ID NO: 159983
  misc_feature 1..387: note = Description of Artificial Sequence: Synthetic coding sequence
  source 1..387: mol_type = other DNA

SEQ ID NO: 159997 - DNA, 387 bp, synthetic construct; identical to SEQ ID NO: 159983
  misc_feature 1..387: note = Description of Artificial Sequence: Synthetic coding sequence
  source 1..387: mol_type = other DNA

SEQ ID NO: 159998 - DNA, 387 bp, synthetic construct; identical to SEQ ID NO: 159983
  misc_feature 1..387: note = Description of Artificial Sequence: Synthetic coding sequence
  source 1..387: mol_type = other DNA

SEQ ID NO: 159999 - DNA, 387 bp, synthetic construct; identical to SEQ ID NO: 159983
  misc_feature 1..387: note = Description of Artificial Sequence: Synthetic coding sequence
  source 1..387: mol_type = other DNA

SEQ ID NO: 160000 - DNA, 387 bp, synthetic construct; identical to SEQ ID NO: 159983
  misc_feature 1..387: note = Description of Artificial Sequence: Synthetic coding sequence
  source 1..387: mol_type = other DNA

SEQ ID NO: 160001 - DNA, 387 bp, synthetic construct; identical to SEQ ID NO: 159983
  misc_feature 1..387: note = Description of Artificial Sequence: Synthetic coding sequence
  source 1..387: mol_type = other DNA

SEQ ID NO: 160002 - DNA, 387 bp, synthetic construct; identical to SEQ ID NO: 159983
  misc_feature 1..387: note = Description of Artificial Sequence: Synthetic coding sequence
  source 1..387: mol_type = other DNA

SEQ ID NO: 160003 - DNA, 495 bp, synthetic construct; identical to SEQ ID NO: 159987
  misc_feature 1..495: note = Description of Artificial Sequence: Synthetic coding sequence
  source 1..495: mol_type = other DNA

SEQ ID NO: 160004 - DNA, 231 bp, synthetic construct
  misc_feature 1..231: note = Description of Artificial Sequence: Synthetic coding sequence
  source 1..231: mol_type = other DNA
atggctgctgtgggcagcctgctgggccgcctgcggcagagcacagtgaaggccactggacctgccctgcggcggctgcacaccagctcctggagggctgacagcagccgggccagcctgaccagggtgcaccggcaggcctatgcccggctgtaccctgtgctgctggtgaagcaggacggcagcaccatccacatccgctaccgggagcccaggaggatgctggcctag

SEQ ID NO: 160005 - DNA, 702 bp, synthetic construct
  misc_feature 1..702: note = Description of Artificial Sequence: Synthetic coding sequence
  source 1..702: mol_type = other DNA
atggccgcccctgtggtgacagcccctggccgggccctgctgcgggccggggccggccgcctgctgcggggcggcgtgcaggagctgctgcggcccaggcatgagggcaatgccccagacctggcctgcaacttcagcctgagccagaacagaggaacagtgattgtggagcgctggtggaaggtgcccctggccggggagggcaggaagccccggctgcacagaagacaccgggtgtacaagctggtggaggacaccaagcaccggcccaaggagaacctggagctgatcctgacccagagcgtggagaatgtgggcgtgcggggggacctggtgtctgtgaagaagagcctgggcaggaaccggctgctgccccagggcctggccgtgtatgccagccctgagaacaagaagctgtttgaggaggagaagctgctgcggcaggagggcaagctggagaagatccagaccaaggccggggaggccctgggcgtggtggtggccccccacaccctgaagctgcctgaggagcccatcacccgctggggcgagtactggtgtgaggtgacagtgaatggcctggacacagtgcgggtgcccatgtctgtggtgaactttgagaagcccaagaccaagcgctacaagtactggctggcccagcaggccgccaaggccatggcccccaccagcccccagatctag

SEQ ID NO: 160006 - DNA, 804 bp, synthetic construct
  misc_feature 1..804: note = Description of Artificial Sequence: Synthetic coding sequence
  source 1..804: mol_type = other DNA
atggccgcccctgtggtgacagcccctggccgggccctgctgcgggccggggccggccgcctgctgcggggcggcgtgcaggagctgctgcggcccaggcatgagggcaatgccccagacctggcctgcaacttcagcctgagccagaacagaggaacagtgattgtggagcgctggtggaaggtgcccctggccggggagggcaggaagccccggctgcacagaagacaccgggtgtacaagctggtggaggacaccaagcaccggcccaaggagaacctggagctgatcctgacccagagcgtggagaatgtgggcgtgcggggggacctggtgtctgtgaagaagagcctgggcaggaaccggctgctgccccagggcctggccgtgtatgccagccctgagaacaagaagctgtttgaggaggagaagctgctgcggcaggagggcaagctggagaagatccagaccaaggccggggaggccaccgtgaagttcctgaagagctgccgcctggaggtgggcatgaagaacaacgtgaagtgggagctgaaccctgagatcgtggcccggcacttcttcaagaacctgggcgtggtggtggccccccacaccctgaagctgcctgaggagcccatcacccgctggggcgagtactggtgtgaggtgacagtgaatggcctggacacagtgcgggtgcccatgtctgtggtgaactttgagaagcccaagaccaagcgctacaagtactggctggcccagcaggccgccaaggccatggcccccaccagcccccagatctag

SEQ ID NO: 160007 - DNA, 606 bp, synthetic construct
  misc_feature 1..606: note = Description of Artificial Sequence: Synthetic coding sequence
  source 1..606: mol_type = other DNA
atggccgccaggacagcctttggagctgtgtgccggcggctgtggcagggcctgggcaacttctctgtgaacaccagcaaaggaaacacagccaagaatggaggcctgctgctgagcaccaacatgaagtgggtgcagttcagcaacctgcacgtggatgtgcccaaggacctgaccaagcctgtggtgaccatcagtgatgagccagacatcctgtacaagaggctgtctgtgctggtgaagggccatgacaaggctgtgctggacagctatgagtactttgctgtgctggccgccaaggagctgggcatcagcatcaaggtgcatgagccccccaggaagattgagcgcttcaccctgctgcagagcgtgcacatctacaagaagcaccgggtgcagtatgagatgaggaccctgtaccgctgcctggagctggagcacctgaccggcagcacagcagatgtgtacctggagtacatccagaggaacctgcctgagggcgtggccatggaggtgaccaagacccagctggagcagctgcctgagcacatcaaggagcccatctgggagaccctgtctgaggagaaggaggagagcaagagctag

SEQ ID NO: 160008 - DNA, 585 bp, synthetic construct
  misc_feature 1..585: note = Description of Artificial Sequence: Synthetic coding sequence
  source 1..585: mol_type = other DNA
atgcaggccgtgagaaatgccggcagccgcttcctgcgctcctggacctggccccagacagctggccgggtggtggcccggaccccagctggcaccatctgcacaggagcccggcagctgcaggatgctgctgccaagcagaaggtggagcagaatgctgcccccagccacaccaagttcagcatctacccacccatccctggagaggagagcagcctgcgctgggccggcaagaagtttgaggagatccccatcgcccacatcaaggccagccacaacaacacccagatccaggtggtgtctgccagcaatgagcccctggcctttgccagctgtggcacagagggcttcagaaatgccaagaagggcaccggcattgctgcccagacagctggcattgctgctgctgcccgggccaagcagaagggcgtcatccacatccgggtggtggtgaagggcctgggccctggccgcctgagcgccatgcacggcctcatcatgggcggcctggaggtgatcagcatcacagacaacacccccatcccccacaacggctgccggcccaggaaggccaggaagctgtag

SEQ ID NO: 160009 - DNA, 486 bp, synthetic construct
  misc_feature 1..486: note = Description of Artificial Sequence: Synthetic coding sequence
  source 1..486: mol_type = other DNA
atgcaggccgtgagaaatgccggcagccgcttcctgcgctcctggacctggccccagacagctggccgggtggtggcccggaccccagctggcaccatctgcacaggagcccggcagctgcaggatgctgctgccaagcagaaggtggagcagaatgctgcccccagccacaccaagttcagcacccagatccaggtggtgtctgccagcaatgagcccctggcctttgccagctgtggcacagagggcttcagaaatgccaagaagggcactggaattgctgcccagacagctggcattgctgctgctgcccgggccaagcagaagggcgtcatccacatccgggtggtggtgaagggcctgggccctggccgcctgagcgccatgcacggcctcatcatgggcggcctggaggtgatcagcatcacagacaacacccccatcccccacaacggctgccggcccaggaaggccaggaagctgtag

SEQ ID NO: 160010 - DNA, 417 bp, synthetic construct
  misc_feature 1..417: note = Description of Artificial Sequence: Synthetic coding sequence
  source 1..417: mol_type = other DNA
atgtcctggagcggcctgctgcacggcctgaacaccagcctgacctgtggccctgccctggtgccccggctgtgggccacctgcagcatggccaccctgaaccagatgcaccggctgggcccccccaagaggcctcccaggaagctgggccccacagagggccggccccagctgaagggcgtggtgctgtgcaccttcaccaggaagcccaagaagcccaacagcgccaacaggaagtgctgccgggtgcggctgagcacaggccgggaggccgtgtgcttcatccctggagagggccacaccctgcaggagcaccagatcgtgctggtggagggcggccgcacccaggacctgcccggggtgaagctgactgtggtgcggggcaagtatgactgtggccacgtgcagaagaagtag

SEQ ID NO: 160011 - DNA, 417 bp, synthetic construct; identical to SEQ ID NO: 160010
  misc_feature 1..417: note = Description of Artificial Sequence: Synthetic coding sequence
  source 1..417: mol_type = other DNA

SEQ ID NO: 160012 - DNA, 417 bp, synthetic construct; identical to SEQ ID NO: 160010
  misc_feature 1..417: note = Description of Artificial Sequence: Synthetic coding sequence
  source 1..417: mol_type = other DNA

SEQ ID NO: 160013 - DNA, 387 bp, synthetic construct
  misc_feature 1..387: note = Description of Artificial Sequence: Synthetic coding sequence
  source 1..387: mol_type = other DNA
atggccgccttcatgctgggcagcctgctgcggaccttcaagcagatggtgcccagcagcgccagcggccaggtgcgcagccactacgtggactggaggatgtggagagatgtgaagaggaggaagatggcctatgaatatgcagatgagcggctgcgcatcaacagcctgaggaagaacaccatcctgcccaagatcctgcaggatgtggctgatgaggagattgctgccctgccccgggacagctgccctgtgcgcatccggaacagatgtgtgatgaccagccggccccggggcgtgaagaggcgctggaggctgagcagaattgtgttccgccacctggccgaccacggccagctgagcggcatccagagggccacctggtag

SEQ ID NO: 160014 - DNA, 774 bp, synthetic construct
  misc_feature 1..774: note = Description of Artificial Sequence: Synthetic coding sequence
  source 1..774: mol_type = other DNA
atgctgcgggtggcctggaggaccctgagcctcatccgcaccagggctgtgacccaggtgctggtgcccggcctgcccggcggcggcagcgccaagttccccttcaaccagtggggcctgcagcccaggagcctgctgctgcaggccgcccggggctacgtggtgaggaagccagcccagagccggctggatgatgatcctccacccagcaccctgctgaaggactaccagaatgtgcccggcatcgagaaggtggatgatgtggtgaagaggctgctgagcctggagatggccaacaagaaggagatgctgaagatcaagcaggagcagttcatgaagaagatcgtggccaaccctgaggacaccaggagcctggaggcccgcatcatcgccctgtctgtgaagatccgctcctatgaggagcacctggagaagcacaggaaggacaaggcccacaagcgctacctgctgatgagcattgaccagaggaagaagatgctgaagaacctgaggaacaccaactatgatgtgtttgagaagatctgctggggcctgggcatcgagtacaccttcccccccctgtactacagaagagcccacagaagatttgtgaccaagaaggccctgtgcatccgggtcttccaggagacccagaagctgaagaagagaagaagagccctgaaggctgctgctgctgcccagaagcaggccaagagaagaaatccagacagccctgccaaggccatccccaagaccctgaaggacagccagtag

SEQ ID NO: 160015 - DNA, 300 bp, synthetic construct
  misc_feature 1..300: note = Description of Artificial Sequence: Synthetic coding sequence
  source 1..300: mol_type = other DNA
atggtgcacctgaccaccctgctgtgcaaggcctaccggggcggccacctgaccatccggctggccctgggcggctgcaccaaccggcccttctaccgcatcgtggccgcccacaacaagtgccccagagatggccgctttgtggagcagctgggcagctatgaccccctgcccaacagccatggagagaagctggtggccctgaacctggaccgcatccgccactggattggctgtggggcccacctgagcaagcccatggagaagctgctgggcctgaagtacagccacgtgttctag

SEQ ID NO: 160016 - DNA, 414 bp, synthetic construct
  misc_feature 1..414: note = Description of Artificial Sequence: Synthetic coding sequence
  source 1..414: mol_type = other DNA
atggtgcacctgaccaccctgctgtgcaaggcctaccggggcggccacctgaccatccggctggccctgggcggctgcaccaaccggcccttctaccgcatcgtggccgcccacaacaagtgccccagagatggccgctttgtggagcagctgggcagctatgaccccctgcccaacagccatggagagaagctggtggccctgaacctggaccgcatccgccactggattggctgtggggcccacctgagcaagcccatggagaagctgctgggcctggccggcttcttccccctgcaccccatgatgatcaccaatgctgagcggctgcggaggaagagggcccgggaggtgctgctggccagccagaagacagatgctgaggccacagacacagaggccacagagacctag

SEQ ID NO: 160017 - DNA, 372 bp, synthetic construct
  misc_feature 1..372: note = Description of Artificial Sequence: Synthetic coding sequence
  source 1..372: mol_type = other DNA
atggtgcacctgaccaccctgctgtgcaaggcctaccggggcggccacctgaccatccggctggccctgggcggctgcaccaaccggcccttctaccgcatcgtggccgcccacaacaagtgccccagagatggccgctttgtggagcagctgggcagctatgaccccctgcccaacagccatggagagaagctggtggccctgaacctggaccgcatccgccactggattggctgtggggcccacctgagcaagcccatggagaagctgctgggcaagacagatgcccgcttccctgagcagggcgaggagaggcctgagcagcaccacttccctgaggacctggccccagcccggggccggggcctgtag

SEQ ID NO: 160018 - DNA, 393 bp, synthetic construct
  misc_feature 1..393: note = Description of Artificial Sequence: Synthetic coding sequence
  source 1..393: mol_type = other DNA
atgtctgtggtgcgcagctctgtgcacgcccgctggatcgtgggcaaggtgattggcaccaagatgcagaagacagccaaggtgcgggtgacccggctggtgctggacccctacctgctgaagtacttcaacaagaggaagacctactttgcccatgatgccctgcagcagtgcaccgtgggggacatcgtgctgctgcgggccctgcctgtgccccgggccaagcacgtgaagcatgagctggccgagatcgtgttcaaggtgggcaaggtgattgatcctgtgacaggcaagccctgtgccggcaccacctacctggagagccccctgagcagcgagaccacccagctgagcaagaacctggaggagctgaacatcagcagcgcccagtag

SEQ ID NO: 160019 - DNA, 390 bp, synthetic construct
  misc_feature 1..390: note = Description of Artificial Sequence: Synthetic coding sequence
  source 1..390: mol_type = other DNA
atgtctgtggtgcgcagctctgtgcacgcccgctggatcgtgggcaaggtgattggcaccaagatgcagaagacagccaaggtgcgggtgacccggctggtgctggacccctacctgctgaagtacttcaacaagaggaagacctactttgcccatgatgccctgcagcagtgcaccgtgggggacatcgtgctgctgcgggccctgcctgtgccccgggccaagcacgtgaagcatgagctggccgagatcgtgttcaaggtgggcaaggtgattgatcctgtgacaggcaagccctgtgccggcaccacctacctggagagccccctgagcagcgagaccacccagctgagcaagaacctggaggagctgaacatcagcagcgcctag

SEQ ID NO: 160020 - DNA, 384 bp, synthetic construct
  misc_feature 1..384: note = Description of Artificial Sequence: Synthetic coding sequence
  source 1..384: mol_type = other DNA
atggccgccctgaaggccctggtgtctggctgcggccgcctgctgcggggcctgctggccggccctgctgccacctcctggagccggctgcctgcccggggcttccgggaggtggtggagacccaggagggcaagaccaccatcatcgagggccgcatcacagccacccccaaggagagccccaacccccccaaccccagcggccagtgccccatctgccgctggaacctgaagcacaagtacaactatgatgatgtgctgctgctgagccagttcatccggccccacggcggcatgctgcccaggaagatcaccggcctgtgccaggaggagcacaggaagattgaagaatgtgtgaagatggcccacagagctggcacctag

SEQ ID NO: 160021 - DNA, 813 bp, synthetic construct
  misc_feature 1..813: note = Description of Artificial Sequence: Synthetic coding sequence
  source 1..813: mol_type = other DNA
atggccgccctgaaggccctggtgtctggctgcggccgcctgctgcggggcctgctggccggccctgctgccacctcctggagccggctgcctgcccggggcttccgggaggtggtggagacccaggagggcaagaccaccatcatcgagggccgcatcacagccacccccaaggagagccccaacccccccaaccccagcggccagtgccccatctgccgctggaacctgaagcacaagtacaactatgatgatgtgctgctgctgagccagttcatccggccccacggcggcatgctgcccaggaagatcaccggcctgtgccaggaggagcacaggaagattgaagaatgtgtgaagatggcccacagagctggaagaagaccctggggccccagaggagctgagggctgccgccacagcctgcccacccagctgccccacgtgtctgcccctcctggcaggaaggtggacatccgctctgtgaactacacccaccaccccatgcccaccttccccctgccctgggccttccccctggcccccagcgagctgcagcgggagctgcagaggctgagccccctgcccaggcacagcggcctgctgcccaaccaccggccccggctgcctgagggcgtggtgcccaagagcaagccccagctgaaccgctacctgacccgctgggcccctggctctgtgaagcccatctacaagaagggcccccgctggaacagagtgaggatgcctgtgggcagccccctgctgcgggacaacgtgtgctacagcaggaccccctggaagctgtaccactag

SEQ ID NO: 160022 - DNA, 591 bp, synthetic construct
  misc_feature 1..591: note = Description of Artificial Sequence: Synthetic coding sequence
  source 1..591: mol_type = other DNA
atggccgccctgaaggccctggtgtctggctgcggccgcctgctgcggggcctgctggccggccctgctgccacctcctggagccggctgcctgcccggggcttccgggaggtggtggagacccaggagggcaagaccaccatcatcgagggccgcatcacagccacccccaaggagagccccaacccccccaaccccagcggccagtgccccatctgccgctggaacctgaagcacaagtacaactatgatgatgtgctgctgctgagccagttcatccggccccacggcggcatgctgcccaggaagatcaccggcctgtgccaggaggagcacaggaagattgaagaatgtgtgaagatggcccacagagctggcctgctgcccaaccaccggccccggctgcctgagggcgtggtgcccaagagcaagccccagctgaaccgctacctgacccgctgggcccctggctctgtgaagcccatctacaagaagggcccccgctggaacagagtgaggatgcctgtgggcagccccctgctgcgggacaacgtgtgctacagcaggaccccctggaagctgtaccactag

SEQ ID NO: 160023 - DNA, 795 bp, synthetic construct
  misc_feature 1..795: note = Description of Artificial Sequence: Synthetic coding sequence
  source 1..795: mol_type = other DNA
atggccgccctgaaggccctggtgtctggctgcggccgcctgctgcggggcctgctggccggccctgctgccacctcctggagccggctgcctgcccggggcttccgggaggtggtggagacccaggagggcaagaccaccatcatcgagggccgcatcacagccacccccaaggagagccccaacccccccaaccccagcggccagtgccccatctgccgctggaacctgaagcacaagtacaactatgatgatgtgctgctgctgagccagttcatccggccccacggcggcatgctgcccaggaagatcaccggcctgtgccaggaggagcacaggaagattgaagaatgtgtgaagatggcccacagagctggaagaagaccctggggccccagaggagctgagggctgccgccacagcctgcccacccagctgccccacgtgtctgcccctcctggcaggaaggtggacatccgctctgtgaactacacccaccaccccatgcccaccttccccctgccctgggccttccccctggcccccagcgagctgcagcgggagctgcagaggctgagccccctgcccaggcacagcggcctgctgcccaaccaccggccccggctgcctgagggcgtggtgcccaagagcaagccccagctgaaccgctacctgacccgctgggcccctggctctgtgaagcccatctacaagaagggcccccgctggaacagagtgaggatgcctgtgggcagccccctgctgcgggacaacgtgtgctacagcaggacatag

SEQ ID NO: 160024 - DNA, 777 bp, synthetic construct
  misc_feature 1..777: note = Description of Artificial Sequence: Synthetic coding sequence
  source 1..777: mol_type = other DNA
atggccgcctctgtgctgaacacagtgctgcggcggctgcccatgctgagcctcttccggggcagccaccgggtgcaggtgcccctgcagaccctgtgcaccaaggcccccagcgaggaggacagcctgagctctgtgcccatcagcccctacaaggatgagccctggaagtacctggagagcgaggagtaccaggagagatatggcagcaggcctgtgtgggccgactacagaagaaaccacaagggcggcgtgcccccccagaggaccaggaagacctgcatcagaagaaacaaggtggtgggcaacccctgccccatctgccgggaccacaagctgcacgtggacttcagaaatgtgaagctgctggagcagtttgtgtgtgcccacacaggcatcatcttctacgccccctacacaggagtgtgtgtgaagcagcacaagaggctgacccaggccatccagaaggcccgggaccacggcctgctgatctaccacatcccccaggtggagccccgggacctggacttcagcaccagccatggagctgtgtctgccaccccaccagcccccaccctggtgtctggggacccctggtacccctggtacaactggaagcagcccccagagcgggagctgagccggctgcggcggctgtaccagggccacctgcaggaggagagcggccccccacctgagagcatgcccaagatgccacccaggaccccagctgaggccagcagcacaggccagacaggcccccagagcgccctgtag

SEQ ID NO: 160025 - DNA, 777 bp, synthetic construct; identical to SEQ ID NO: 160024
  misc_feature 1..777: note = Description of Artificial Sequence: Synthetic coding sequence
  source 1..777: mol_type = other DNA

SEQ ID NO: 160026 - DNA, 648 bp, synthetic construct
  misc_feature 1..648: note = Description of Artificial Sequence: Synthetic coding sequence
  source 1..648: mol_type = other DNA
atggccgcctctgtgctgaacacagtgctgcggcggctgcccatgctgagcctcttccggggcagccaccgggtgcaggtgcccctgcagaccctgtgcaccaaggcccccagcgaggaggacagcctgagctctgtgcccatcagcccctacaaggatgagccctggaagtacctggagagcgaggagtaccaggagagatatggcagcaggcctgtgtgggccgactacagaagaaaccacaagggcggcgtgcccccccagaggaccaggaagacctgcatcaacgtgaagctgctggagcagtttgtgtgtgcccacacaggcatcatcttctacgccccctacacaggcctgctgatctaccacatcccccaggtggagccccgggacctggacttcagcaccagccacggggctgtgtctgccaccccaccagcccccaccctggtgtctggggacccctggtacccctggtacaactggaagcagcccccagagcgggagctgagccggctgcggcggctgtaccagggccacctgcaggaggagagcggccccccacctgagagcatgcccaagatgccacccaggaccccagctgaggccagcagcacaggccagacaggcccccagagcgccctgtag

SEQ ID NO: 160027 - DNA, 648 bp, synthetic construct; identical to SEQ ID NO: 160026
  misc_feature 1..648: note = Description of Artificial Sequence: Synthetic coding sequence
  source 1..648: mol_type = other DNA

SEQ ID NO: 160028 - DNA, 777 bp, synthetic construct; identical to SEQ ID NO: 160024
  misc_feature 1..777: note = Description of Artificial Sequence: Synthetic coding sequence
  source 1..777: mol_type = other DNA

SEQ ID NO: 160029 - DNA, 648 bp, synthetic construct; identical to SEQ ID NO: 160026
  misc_feature 1..648: note = Description of Artificial Sequence: Synthetic coding sequence
  source 1..648: mol_type = other DNA

SEQ ID NO: 160030 - DNA, 648 bp, synthetic construct; identical to SEQ ID NO: 160026
  misc_feature 1..648: note = Description of Artificial Sequence: Synthetic coding sequence
  source 1..648: mol_type = other DNA

SEQ ID NO: 160031 - DNA, 777 bp, synthetic construct; identical to SEQ ID NO: 160024
  misc_feature 1..777: note = Description of Artificial Sequence: Synthetic coding sequence
  source 1..777: mol_type = other DNA

SEQ ID NO: 160032 - DNA, 648 bp, synthetic construct; identical to SEQ ID NO: 160026
  misc_feature 1..648: note = Description of Artificial Sequence: Synthetic coding sequence
  source 1..648: mol_type = other DNA

SEQ ID NO: 160033 - DNA, 777 bp, synthetic construct; identical to SEQ ID NO: 160024
  misc_feature 1..777: note = Description of Artificial Sequence: Synthetic coding sequence
  source 1..777: mol_type = other DNA

SEQ ID NO: 160034 - DNA, 648 bp, synthetic construct; identical to SEQ ID NO: 160026
  misc_feature 1..648: note = Description of Artificial Sequence: Synthetic coding sequence
  source 1..648: mol_type = other DNA

SEQ ID NO: 160035 - DNA, 648 bp, synthetic construct; identical to SEQ ID NO: 160026
  misc_feature 1..648: note = Description of Artificial Sequence: Synthetic coding sequence
  source 1..648: mol_type = other DNA

SEQ ID NO: 160036 - DNA, 777 bp, synthetic construct; identical to SEQ ID NO: 160024
  misc_feature 1..777: note = Description of Artificial Sequence: Synthetic coding sequence
  source 1..777: mol_type = other DNA

SEQ ID NO: 160037 - DNA, 777 bp, synthetic construct; identical to SEQ ID NO: 160024
  misc_feature 1..777: note = Description of Artificial Sequence: Synthetic coding sequence
  source 1..777: mol_type = other DNA

SEQ ID NO: 160038 - DNA, 366 bp, synthetic construct
  misc_feature 1..366: note = Description of Artificial Sequence: Synthetic coding sequence
  source 1..366: mol_type = other DNA
atggccgcctctgtgctgaacacagtgctgcggcggctgcccatgctgagcctcttccggggcagccaccgggtgcaggtgcccctgcagaccctgtgcaccaaggcccccagcgaggaggacagcctgagctctgtgcccatcagcccctacaaggatgagccctggaagtacctggagagcgaggagtaccaggagagatatggcagcaggcctgtgtgggccgactacagaagaaaccacaagggcggcgtgcccccccagaggaccaggaagacctgcatcagaagaaacaaggtggtgggcaacccctgccccatctgccgggaccacaagctgcacgtggacttccgggagagcgtgtag

SEQ ID NO: 160039 - DNA, 366 bp, synthetic construct; identical to SEQ ID NO: 160038
  misc_feature 1..366: note = Description of Artificial Sequence: Synthetic coding sequence
  source 1..366: mol_type = other DNA

SEQ ID NO: 160040 - DNA, 366 bp, synthetic construct; identical to SEQ ID NO: 160038
  misc_feature 1..366: note = Description of Artificial Sequence: Synthetic coding sequence
  source 1..366: mol_type = other DNA

SEQ ID NO: 160041 - DNA, 366 bp, synthetic construct; identical to SEQ ID NO: 160038
  misc_feature 1..366: note = Description of Artificial Sequence: Synthetic coding sequence
  source 1..366: mol_type = other DNA

SEQ ID NO: 160042 - DNA, 366 bp, synthetic construct; identical to SEQ ID NO: 160038
  misc_feature 1..366: note = Description of Artificial Sequence: Synthetic coding sequence
  source 1..366: mol_type = other DNA

SEQ ID NO: 160043 - DNA, 366 bp, synthetic construct; identical to SEQ ID NO: 160038
  misc_feature 1..366: note = Description of Artificial Sequence: Synthetic coding sequence
  source 1..366: mol_type = other DNA

SEQ ID NO: 160044 - DNA, 366 bp, synthetic construct; identical to SEQ ID NO: 160038
  misc_feature 1..366: note = Description of Artificial Sequence: Synthetic coding sequence
  source 1..366: mol_type = other DNA

SEQ ID NO: 160045 - DNA, 429 bp, synthetic construct
  misc_feature 1..429: note = Description of Artificial Sequence: Synthetic coding sequence
  source 1..429: mol_type = other DNA
atggctgctgtggtggccgtgtgtggcggcctgggcaggaagaagctgacccacctggtgacagctgctgtgtccctgacccaccctggcacccacacagtgctgtggaggcggggctgcagccagcaggtgagcagcaatgaagacctgcccatctccatggagaacccctacaaggagcccctgaagaagtgcatcctgtgtgggaagcacgtggactacaagaatgtgcagctgctgagccagtttgtgagccccttcaccggctgcatctacggccgccacatcaccggcctgtgtgggaagaagcagaaggagatcaccaaggccatcaagagggcccagatcatgggcttcatgcctgtgacctacaaggaccctgcctacctgaaggaccccaaggtgtgcaacatccgctaccgggagtag

SEQ ID NO: 160046 - DNA, 345 bp, synthetic construct
  misc_feature 1..345: note = Description of Artificial Sequence: Synthetic coding sequence
  source 1..345: mol_type = other DNA
atggctgctgtggtggccgtgtgtggcggcctgggcaggaagaagctgacccacctggtgacagctgctgtgtccctgacccaccctggcacccacacagtgctgtggaggcggggctgcagccagcaggtgagcagcaatgaagacctgctgctgagccagtttgtgagccccttcaccggctgcatctacggccgccacatcaccggcctgtgtgggaagaagcagaaggagatcaccaaggccatcaagagggcccagatcatgggcttcatgcctgtgacctacaaggaccctgcctacctgaaggaccccaaggtgtgcaacatccgctaccgggagtag

SEQ ID NO: 160047 - DNA, 891 bp, synthetic construct
  misc_feature 1..891: note = Description of Artificial Sequence: Synthetic coding sequence
  source 1..891: mol_type = other DNA
atggccaccagcagcgctgccctgccccgcatcctgggcgctggggcccgggcccccagccgctggctgggcttcctgggcaaggccacccccaggcctgcccggcccagcaggaggaccctgggcagcgccacagccctgatgatccgggagagcgaggacagcacagacttcaatgacaagatcctgaatgagcccctgaagcacagcgacttcttcaacgtgaaggagctgttctctgtgcgcagcctgtttgatgcccgggtgcacctgggccacaaggccggctgccgccaccgcttcatggagccctacatcttcggcagccggctggaccatgacatcatcgacctggagcagacagccacccacctgcagctggccctgaacttcaccgcccacatggcctacaggaagggcatcatcctcttcatcagcaggaaccggcagttctcctacctgattgagaacatggcccgggactgtggggagtatgcccacacccgctacttccggggcggcatgctgaccaatgcccggctgctgtttggccccaccgtgcggctgcctgacctgatcatcttcctgcacaccctgaacaacatctttgagccccacgtggccgtgagagatgctgccaagatgaacatccccaccgtgggcatcgtggacaccaactgcaacccctgcctgatcacctaccctgtgcctggaaatgatgacagccccctggccgtgcacctgtactgccgcctcttccagacagccatcacccgggccaaggagaagaggcagcaggtggaggccctgtaccgcctgcagggccagaaggagcccggggaccagggccctgcccaccccccaggagctgacatgagccacagcctgtag

SEQ ID NO: 160048 - DNA, 891 bp, synthetic construct; identical to SEQ ID NO: 160047
  misc_feature 1..891: note = Description of Artificial Sequence: Synthetic coding sequence
  source 1..891: mol_type = other DNA

SEQ ID NO: 160049 - DNA, 813 bp, synthetic construct
  misc_feature 1..813: note = Description of Artificial Sequence: Synthetic coding sequence
  source 1..813: mol_type = other DNA
agaagaggccccctgggcatgcgctggggcgccggcgtggtgcacagcggcctgggcgcccggaccagcatctacttccccccaggggcccgggcccccagccgctggctgggcttcctgggcaaggccacccccaggcctgcccggcccagcaggaggaccctgggcagcgccacagccctgatgatccgggagagcgaggacagcacagacttcaatgacaagatcctgaatgagcccctgaagcacagcgacttcttcaacgtgaaggagctgttctctgtgcgcagcctgtttgatgcccgggtgcacctgggccacaaggccggctgccgccaccgcttcatggagccctacatcttcggcagccggctggaccatgacatcatcgacctggagcagacagccacccacctgcagctggccctgaacttcaccgcccacatggcctacaggaagggcatcatcctcttcatcagcaggaaccggcagttctcctacctgattgagaacatggcccgggactgtggggagtatgcccacacccgctacttccggggcggcatgctgaccaatgcccggctgctgtttggccccaccgtgcggctgcctgacctgatcatcttcctgcacaccctgaacaacatctttgagccccacgtggccgtgagagatgctgccaagatgaacatccccaccgtgggcatcgtggacaccaactgcaacccctgcctgatcacctaccctgtgcctggaaatgatgacagccccctggccgtgcacctgtactgccgcctcttccagacagcctag

SEQ ID NO: 160050 - DNA, 264 bp, synthetic construct
  misc_feature 1..264: note = Description of Artificial Sequence: Synthetic coding sequence
  source 1..264: mol_type = other DNA
atggccaagcacctgaagttcatcgccaggacagtgatggtgcaggagggcaatgtggagagcgcctaccgcaccctgaaccgcatcctgaccatggatggcctgattgaggacatcaagcaccggcgctactatgagaagccctgcagaagacggcagcgggagagctatgagcgctgccgccgcatctacaacatggagatggccaggaagatcaacttcctgatgaggaagaacagagctgacccctggcagggctgctag

SEQ ID NO: 160051 - DNA, 264 bp, synthetic construct; identical to SEQ ID NO: 160050
  misc_feature 1..264: note = Description of Artificial Sequence: Synthetic coding sequence
  source 1..264: mol_type = other DNA

SEQ ID NO: 160052 - DNA, 1083 bp, synthetic construct
  misc_feature 1..1083: note = Description of Artificial Sequence: Synthetic coding sequence
  source 1..1083: mol_type = other DNA
atggcccccctgggcaccaccgtgctgctgtggagcctgctgcggagcagccctggggtggagcgggtgtgcttccgggcccgcatccagccctggcatggaggcctgctgcagcccctgccctgcagctttgagatgggcctgccccggcggcgcttcagcagcgaggccgctgagagcggcagccctgagaccaagaagcccaccttcatggatgaggaggtgcagagcatcctgaccaagatgacaggcctgaacctgcagaagaccttcaagccagccatccaggagctgaagccacccacctacaagctgatgacccaggcccagctggaggaggccacccggcaggccgtggaggccgccaaggtgcggctgaagatgcctcctgtgctggaggagcgggtgcccatcaatgatgtgctggccgaggacaagatcctggagggcacagagaccaccaagtatgtgttcacagacatctcctacagcatcccccaccgggagcgcttcatcgtggtgcgggagcccagcggcaccctgaggaaggcctcctgggaggagcgggacaggatgatccaggtgtacttccccaaggagggcaggaagatcctgacccccatcatcttcaaggaggagaacctgcggaccatgtacagccaggacagacatgtggatgtgctgaacctgtgctttgcccagtttgagccagacagcacagagtacatcaaggtgcaccacaagacctatgaagatattgacaagaggggcaagtatgacctgctgcggagcacccgctactttggaggcatggtgtggtactttgtgaacaacaagaagattgatggcctgctgattgaccagatccagagggacctgattgatgatgccaccaacctggtgcagctgtaccacgtgctgcacccagatggccagagcgcccagggcgccaaggaccaggccgctgagggcatcaacctgatcaaggtgtttgccaagacagaggcccagaagggggcctacatcgagctgaccctgcagacctaccaggaggccctgagccgccacagcgctgccagctag

SEQ ID NO: 160053 - DNA, 1080 bp, synthetic construct
  misc_feature 1..1080: note = Description of Artificial Sequence: Synthetic coding sequence
  source 1..1080: mol_type = other DNA
atggcccccctgggcaccaccgtgctgctgtggagcctgctgcggagcagccctggggtggagcgggtgtgcttccgggcccgcatccagccctggcatggaggcctgctgcagcccctgccctgcagctttgagatgggcctgccccggcggcgcttcagcagcgaggccgagagcggcagccctgagaccaagaagcccaccttcatggatgaggaggtgcagagcatcctgaccaagatgacaggcctgaacctgcagaagaccttcaagccagccatccaggagctgaagccacccacctacaagctgatgacccaggcccagctggaggaggccacccggcaggccgtggaggccgccaaggtgcggctgaagatgcctcctgtgctggaggagcgggtgcccatcaatgatgtgctggccgaggacaagatcctggagggcacagagaccaccaagtatgtgttcacagacatctcctacagcatcccccaccgggagcgcttcatcgtggtgcgggagcccagcggcaccctgaggaaggcctcctgggaggagcgggacaggatgatccaggtgtacttccccaaggagggcaggaagatcctgacccccatcatcttcaaggaggagaacctgcggaccatgtacagccaggacagacatgtggatgtgctgaacctgtgctttgcccagtttgagccagacagcacagagtacatcaaggtgcaccacaagacctatgaggacatcgacaagaggggcaagtatgacctgctgcggagcacccgctactttggaggcatggtgtggtactttgtgaacaacaagaagattgatggcctgctgattgaccagatccagagggacctgattgatgatgccaccaacctggtgcagctgtaccacgtgctgcacccagatggccagagcgcccagggcgccaaggaccaggccgctgagggcatcaacctgatcaaggtgtttgccaagacagaggcccagaagggggcctacatcgagctgaccctgcagacctaccaggaggccctgagccgccacagcgctgccagctag

SEQ ID NO: 160054 - DNA, 960 bp, synthetic construct
  misc_feature 1..960: note = Description of Artificial Sequence: Synthetic coding sequence
  source 1..960: mol_type = other DNA
atgagcagaaatgaaacagagcaccgctacctgggcacccactttggagctgagagcggcagccctgagaccaagaagcccaccttcatggatgaggaggtgcagagcatcctgaccaagatgacaggcctgaacctgcagaagaccttcaagccagccatccaggagctgaagccacccacctacaagctgatgacccaggcccagctggaggaggccacccggcaggccgtggaggccgccaaggtgcggctgaagatgcctcctgtgctggaggagcgggtgcccatcaatgatgtgctggccgaggacaagatcctggagggcacagagaccaccaagtatgtgttcacagacatctcctacagcatcccccaccgggagcgcttcatcgtggtgcgggagcccagcggcaccctgaggaaggcctcctgggaggagcgggacaggatgatccaggtgtacttccccaaggagggcaggaagatcctgacccccatcatcttcaaggaggagaacctgcggaccatgtacagccaggacagacatgtggatgtgctgaacctgtgctttgcccagtttgagccagacagcacagagtacatcaaggtgcaccacaagacctatgaggacatcgacaagaggggcaagtatgacctgctgcggagcacccgctactttggaggcatggtgtggtactttgtgaacaacaagaagattgatggcctgctgattgaccagatccagagggacctgattgatgatgccaccaacctggtgcagctgtaccacgtgctgcacccagatggccagagcgcccagggcgccaaggaccaggccgctgagggcatcaacctgatcaaggtgtttgccaagacagaggcccagaagggggcctacatcgagctgaccctgcagacctaccaggaggccctgagccgccacagcgctgccagctag

SEQ ID NO: 160055 - DNA, 1083 bp, synthetic construct; identical to SEQ ID NO: 160052
  misc_feature 1..1083: note = Description of Artificial Sequence: Synthetic coding sequence
  source 1..1083: mol_type = other DNA

SEQ ID NO: 160056 - DNA, 507 bp, synthetic construct
  misc_feature 1..507: note = Description of Artificial Sequence: Synthetic coding sequence
  source 1..507: mol_type = other DNA
atggcccccctgggcaccaccgtgctgctgtggagcctgctgcggagcagccctggggtggagcgggtgtgcttccgggcccgcatccagccctggcatggaggcctgctgcagcccctgccctgcagctttgagatgggcctgccccggcggcgcttcagcagcgaggccgagagcggcagccctgagaccaagaagcccaccttcatggatgaggaggtgcagagcatcctgaccaagatgacaggcctgaacctgcagaagaccttcaagccagccatccaggagctgaagccacccacctacaagctgatgacccaggcccagctggaggaggccacccggcaggccgtggaggccgccaaggtgcggctgaagatgcctcctgtgctggaggagcgggtgcccatcaatgatgtgctggccgaggacaagatcctggagggcacagagaccaccaagtatgtgttcacagacatctcctacagcatcccccaccgctgctag

SEQ ID NO: 160057 - DNA, 573 bp, synthetic construct
  misc_feature 1..573: note = Description of Artificial Sequence: Synthetic coding sequence
  source 1..573: mol_type = other DNA
atggccggcagccggctggagaccgtgggcagcatcttcagcaggacccgggacctggtgcgggccggcgtgctgaaggagaagcccctgtggtttgatgtgtatgatgccttcccccccctgcgggagcccgtcttccagaggccccgggtgcgctatggcaaggccaaggcccccatccaggacatctggtaccatgaagatcgcatccgggccaagttctacagcgtgtatggcagcggccagagggcctttgacctcttcaaccccaacttcaagagcacctgccagagatttgtggagaagtacacagagctgcagaagctgggggagacagatgaggagaagctgtttgtggagaccgggaaggccctgctggccgagggcgtcatcctgcggcgggtgggggaggcccggacccagcacggcggcagccacgtgtccaggaagtctgagcacctgtctgtgcggccccagacagccctggaggagaatgagacccagaaggaggtgccccaggaccagcacctggaggccccagctgaccagagcaagggcctgctgcccccatag

SEQ ID NO: 160058 - DNA, 504 bp, synthetic construct
  misc_feature 1..504: note = Description of Artificial Sequence: Synthetic coding sequence
  source 1..504: mol_type = other DNA
atggccgcctctgtgtgcagcggcctgctgggcccccgggtgctgtcctggagccgggagctgccctgtgcctggagggccctgcacaccagccctgtgtgtgccaagaacagagctgcccgggtgcgggtgtccaagggggacaagcctgtgacctatgaggaggcccacgccccccactacatcgcccacaggaagggctggctgagcctgcacactggaaacctggatggagaagatcatgctgctgagaggacagtggaggatgtgttcctgaggaagttcatgtggggcaccttccctggctgcctggccgaccagctggtgctgaagaggcggggcaaccagctggagatctgtgctgtggtgctgcggcagctgagcccccacaagtactacttcctggtgggctacagcgagaccctgctgagctacttctacaagtgccctgtgcggctgcacctgcagacagtgcccagcaaggtggtgtacaagtacctgtag

SEQ ID NO: 160059 - DNA, 522 bp, synthetic construct
  misc_feature 1..522: note = Description of Artificial Sequence: Synthetic coding sequence
  source 1..522: mol_type = other DNA
atgcccatgaagggccgcttccccatccggaggaccctgcagtacctgagccagggcaatgtggtgttcaaggacagcgtgaaggtgatgacagtgaactacaacacccatggagagctgggggagggcgccaggaagtttgtgttcttcaacatcccccagatccagtacaagaacccctgggtgcagatcatgatgttcaagaacatgacccccagccccttcctgcgcttctacctggacagcggggagcaggtgctggtggatgtggagaccaagagcaacaaggagatcatggagcacatcaggaagatcctgggcaagaatgaggagaccctgcgggaggaggaggaggagaagaagcagctgagccacccagccaactttggccccaggaagtactgcctgcgggagtgcatctgtgaggtggagggccaggtgccctgccccagcctggtgcccctgcccaaggagatgaggggcaagtacaaggccgccctgaaggcagatgcccaggactag

SEQ ID NO: 160060 - DNA, 333 bp, synthetic construct
  misc_feature 1..333: note = Description of Artificial Sequence: Synthetic coding sequence
  source 1..333: mol_type = other DNA
atgcccatgaagggccgcttccccatccggaggaccctgcagtacctgagccagggcaatgtggtgttcaaggacagcgtgaaggtgatgacagtgaactacaacacccatggagagctgggggagggcgccaggaagtttgtgttcttcaacatcccccagatccagtacaagaacccctgggtgcagatcatgatgttcaagaacatgacccccagccccttcctgcgcttctacctggacagcggggagcaggtgctggtggatgtggagaccaagagcaacaaggagatcatggagcacatcaggaagatcctgggcaagaatgaatag

SEQ ID NO: 160061 - DNA, 390 bp, synthetic construct
  misc_feature 1..390: note = Description of Artificial Sequence: Synthetic coding sequence
  source 1..390: mol_type = other DNA
atgcccatgaagggccgcttccccatccggaggaccctgcagtacctgagccagggcaatgtggtgttcaaggacagcgtgaaggtgatgacagtgaactacaacacccatggagagctgggggagggcgccaggaagtttgtgttcttcaacatcccccagatccagtacaagaacccctgggtgcagatcatgatgttcaagaacatgacccccagccccttcctgcgcttctacctgggcaagcccagcggcaagagaagaagaaggaagagcagcttcctgacccagcccaccagcgccctggagagcacagcctgtggcagcgcctctgtgaagtggaagggccgctgcccagccccagcctggtgccactaccccaggaggtag

SEQ ID NO: 160062 - DNA, 333 bp, synthetic construct; identical to SEQ ID NO: 160060
  misc_feature 1..333: note = Description of Artificial Sequence: Synthetic coding sequence
  source 1..333: mol_type = other DNA

SEQ ID NO: 160063 - DNA, 438 bp, synthetic construct
  misc_feature 1..438: note = Description of Artificial Sequence: Synthetic coding sequence
  source 1..438: mol_type = other DNA
atgcccatgaagggccgcttccccatccggaggaccctgcagtacctgagccagggcaatgtggtgttcaaggacagcgtgaaggtgatgacagtgaactacaacacccatggagagctgggggagggcgccaggaagtttgtgttcttcaacatcccccagatccagtacaagaacccctgggtgcagatcatgatgttcaagaacatgacccccagccccttcctgcgcttctacctggacagcggggagcaggtgctggtggatgtggagaccaagagcaacaaggagatcatggagcacatcaggaagatcctgggcaagaatgagcactacctggccgcccccagcaagcctgtgagcagcgctgtggtgcctgtgacccaggaggccgaggccggcggcagcctggagccccggcggctgcggctggagtag

SEQ ID NO: 160064 - DNA, 618 bp, synthetic construct
  misc_feature 1..618: note = Description of Artificial Sequence: Synthetic coding sequence
  source 1..618: mol_type = other DNA
atgctgcgggccctgagccggctgggcgccggcaccccctgccggccccgggcccccctggtgctgcctgcccggggcaggaagaccaggcatgaccccctggccaagagcaagattgagcgggtgaacatgcctcctgctgtggaccctgctgagttctttgtgctgatggagcgctaccagcactaccggcagacagtgcgggccctgaggatggagtttgtgtctgaggtgcagaggaaggtgcatgaggcccgggccggcgtgctggccgagaggaaggccctgaaggatgctgctgagcaccgggagctgatggcctggaaccaggccgagaacagaaggctgcacgagctgagaattgcccggctgcggcaggaggagcgggagcaggagcagaggcaggccctggagcaggccaggaaggccgaggaggtgcaggcctgggcccagaggaaggagcgggaggtgctgcagctgcaggaggaggtgaagaacttcatcacccgggagaacctggaggcccgggtggaggccgccctggacagcaggaagaactacaactgggccatcacccgggagggcctggtggtgcggccccagaggcgggacagctag

SEQ ID NO: 160065 - DNA, 1245 bp, synthetic construct
  misc_feature 1..1245: note = Description of Artificial Sequence: Synthetic coding sequence
  source 1..1245: mol_type = other DNA
atggccgccagcatcgtgagaagaggcatgctgctggcccggcaggtggtgctgccccagctgagccctgctgggaagcgctacctgctgagcagcgcctacgtggacagccacaagtgggaggcccgggagaaggagcactactgcctggccgacctggccagcctgatggacaagacctttgagaggaagctgcctgtgagcagcctgaccatcagccggctgattgacaacatcagcagccgggaggagattgaccacgccgagtactacctgtacaagttccgccacagccccaactgctggtacctgaggaactggaccatccacacctggatccggcagtgcctgaagtatgatgcccaggacaaggccctgtacaccctggtgaacaaggtgcagtatggcatcttcccagacaacttcaccttcaacctgctgatggacagcttcatcaagaaggagaactacaaggatgccctgtctgtggtgtttgaggtgatgatgcaggaggcctttgaggtgcccagcacccagctgctgagcctgtatgtgctcttccactgcctggccaagaagacagacttctcctgggaggaggagaggaactttggagccagcctgctgctgcccggcctgaagcagaagaacagcgtgggcttcagcagccagctgtatggctacgccctgctgggcaaggtggagctgcagcagggcctgcgggctgtgtaccacaacatgcccctcatctggaagccaggctacctggaccgggccctgcaggtgatggagaaggtggccgccagccctgaggacatcaagctgtgccgggaggccctggatgtgctgggcgctgtgctgaaggccctgaccagcgcagatggagccagcgaggagcagagccagaatgatgaggacaaccagggcagcgagaagctggtggagcagctggacatcgaggagacagagcagagcaagctgccccagtacctggagcgcttcaaggccctgcacagcaagctgcaggccctgggcaagattgaaagtgagggcctgctgagcctgaccacccagctggtgaaggagaagctgagcacctgtgaggccgaggacatcgccacctatgagcagaacctgcagcagtggcacctggacctggtgcagctgatccagcgggagcagcagcagcgggagcaggccaagcaggagtaccaggcccagaaggccgccaaggccagcgcctag

SEQ ID NO: 160066 - DNA, 1077 bp, synthetic construct
  misc_feature 1..1077: note = Description of Artificial Sequence: Synthetic coding sequence
  source 1..1077: mol_type = other DNA
atggacaagacctttgagaggaagctgcctgtgagcagcctgaccatcagccggctgattgacaacatcagcagccgggaggagattgaccacgccgagtactacctgtacaagttccgccacagccccaactgctggtacctgaggaactggaccatccacacctggatccggcagtgcctgaagtatgatgcccaggacaaggccctgtacaccctggtgaacaaggtgcagtatggcatcttcccagacaacttcaccttcaacctgctgatggacagcttcatcaagaaggagaactacaaggatgccctgtctgtggtgtttgaggtgatgatgcaggaggcctttgaggtgcccagcacccagctgctgagcctgtatgtgctcttccactgcctggccaagaagacagacttctcctgggaggaggagaggaactttggagccagcctgctgctgcccggcctgaagcagaagaacagcgtgggcttcagcagccagctgtatggctacgccctgctgggcaaggtggagctgcagcagggcctgcgggctgtgtaccacaacatgcccctcatctggaagccaggctacctggaccgggccctgcaggtgatggagaaggtggccgccagccctgaggacatcaagctgtgccgggaggccctggatgtgctgggcgctgtgctgaaggccctgaccagcgcagatggagccagcgaggagcagagccagaatgatgaggacaaccagggcagcgagaagctggtggagcagctggacatcgaggagacagagcagagcaagctgccccagtacctggagcgcttcaaggccctgcacagcaagctgcaggccctgggcaagattgaaagtgagggcctgctgagcctgaccacccagctggtgaaggagaagctgagcacctgtgaggccgaggacatcgccacctatgagcagaacctgcagcagtggcacctggacctggtgcagctgatccagcgggagcagcagcagcgggagcaggccaagcaggagtaccaggcccagaaggccgccaaggccagcgcctag

SEQ ID NO: 160067 - DNA, 1287 bp, synthetic construct
  misc_feature 1..1287: note = Description of Artificial Sequence: Synthetic coding sequence
  source 1..1287: mol_type = other DNA
atggccgccagcatcgtgagaagaggcatgctgctggcccggcaggtggtgctgccccagctgagccctgctgggaagcgctacctgctgagcagcgcctacgtggacagccacaagtgggaggcccgggagaaggagcactactgcctggccgacctggccagcctgatggacaagacctttgagaggaagctgcctgtgagcagcctgaccatcagccggctgattgacaacatcagcagccgggaggagattgaccacgccgagtactacctgtacaagaagggagaatgtagcagcagcaacccccagaactacagccgcttccgccacagccccaactgctggtacctgaggaactggaccatccacacctggatccggcagtgcctgaagtatgatgcccaggacaaggccctgtacaccctggtgaacaaggtgcagtatggcatcttcccagacaacttcaccttcaacctgctgatggacagcttcatcaagaaggagaactacaaggatgccctgtctgtggtgtttgaggtgatgatgcaggaggcctttgaggtgcccagcacccagctgctgagcctgtatgtgctcttccactgcctggccaagaagacagacttctcctgggaggaggagaggaactttggagccagcctgctgctgcccggcctgaagcagaagaacagcgtgggcttcagcagccagctgtatggctacgccctgctgggcaaggtggagctgcagcagggcctgcgggctgtgtaccacaacatgcccctcatctggaagccaggctacctggaccgggccctgcaggtgatggagaaggtggccgccagccctgaggacatcaagctgtgccgggaggccctggatgtgctgggcgctgtgctgaaggccctgaccagcgcagatggagccagcgaggagcagagccagaatgatgaggacaaccagggcagcgagaagctggtggagcagctggacatcgaggagacagagcagagcaagctgccccagtacctggagcgcttcaaggccctgcacagcaagctgcaggccctgggcaagattgaaagtgagggcctgctgagcctgaccacccagctggtgaaggagaagctgagcacctgtgaggccgaggacatcgccacctatgagcagaacctgcagcagtggcacctggacctggtgcagctgatccagcgggagcagcagcagcgggagcaggccaagcaggagtaccaggcccagaaggccgccaaggccagcgcctag

SEQ ID NO: 160068 - DNA, 564 bp, synthetic construct
  misc_feature 1..564: note = Description of Artificial Sequence: Synthetic coding sequence
  source 1..564: mol_type = other DNA
atggccgccctgtgcaggaccagggctgtggccgctgagagccacttcctgcgggtcttcctgttcttccggcccttccggggcgtgggcacagaaagtggcagcgagagcggcagcagcaatgccaaggagcccaagaccagggctgggggctttgccagcgccctggagcggcacagcgagctgctgcagaaggtggagcccctgcagaagggcagccccaagaatgtggagagctttgcctccatgctgcggcacagccccctgacccagatgggccctgccaaggacaagctggtgattggccgcatcttccacatcgtggagaatgacctgtacatcgactttggaggcaagttccactgtgtgtgcagaagacctgaggtggatggagagaagtaccagaagggcaccagggtgcggctgcggctgctggacctggagctgaccagccgcttcctgggcgccaccacagacaccaccgtgctggaggccaatgctgtgctgctgggcatccaggagagcaaggacagccgcagcaaggaggagcaccacgagaagtag

SEQ ID NO: 160069 - DNA, 1320 bp, synthetic construct
  misc_feature 1..1320: note = Description of Artificial Sequence: Synthetic coding sequence
  source 1..1320: mol_type = other DNA
atggctgctgcccgctgctggaggcccctgctgcggggcccccggctgagcctgcacacagctgccaatgctgctgccacagccacagagaccacctgccaggatgtggccgccacccctgtggcccgctacccacccatcgtggcctccatgacagctgacagcaaggccgcccggctgcggagaattgagcgctggcaggccaccgtgcacgccgctgagagcgtggatgagaagctgcgcatcctgaccaagatgcagttcatgaagtacatggtgtacccccagacctttgccctgaatgctgaccgctggtaccagtacttcaccaagacagtgttcctgagcggcctgcccccacctcctgctgagcctgagcctgagcctgagcctgagcctgagcccgccctggacctggccgccctgcgggctgtggcctgtgactgcctgctgcaggagcacttctacctgcggaggagaagaagagtgcacagatatgaggagagcgaggtgatcagcctgcccttcctggaccagctggtgtccaccctggtgggcctgctgagcccccacaacccagccctggccgccgccgccctggactaccgctgccctgtgcacttctactgggtgcggggggaggagatcatcccccggggccaccggcggggcagaattgatgacctgcgctaccagattgatgacaagcccaacaaccagatccgcatcagcaagcagctggccgagtttgtgcccctggactacagcgtgcccatcgagatccccaccatcaagtgcaagccagacaagctgcccctcttcaagaggcagtatgagaaccacatctttgtgggcagcaagacagctgacccctgctgctacggccacacccagttccacctgctgcctgacaagctgcggcgggagcggctgctgcggcagaactgtgccgaccagatcgaggtggtgttccgggccaatgccatcgccagcctgtttgcctggacaggagcccaggccatgtaccagggcttctggagcgaggctgatgtgacccggccctttgtgtcccaggccgtcatcacagatggcaagtacttctccttcttctgctaccagctgaacaccctggccctgaccacccaggccgaccagaacaaccccaggaagaacatctgctggggcacccagagcaagcccctgtatgagaccatcgaggacaatgatgtgaagggcttcaatgatgatgtgctgctgcagatcgtgcacttcctgctgaaccggcccaaggaggagaagagccagctgctggagaactag

SEQ ID NO: 160070 - DNA, 1188 bp, synthetic construct
  misc_feature 1..1188: note = Description of Artificial Sequence: Synthetic coding sequence
  source 1..1188: mol_type = other DNA
atgttcccccgggtgtccaccttcctgcccctgcggcccctgagccgccaccccctgagcagcggcagccctgagaccagcgctgctgccatcatgctgctgactgtgcgccacggcaccgtgcgctaccgcagcagcgccctgctggcccggaccaagaacaacatccagcgctacttcggcaccaacagcgtcatctgcagcaagaaggacaagcagagcgtgaggacagaggagaccagcaaggagaccagcgagagccaggacagcgagaaggagaacaccaagaaggacctgctgggcatcatcaagggcatgaaggtggagctgagcacagtgaatgtgaggaccaccaagccacccaagagaagacccctgaagagcctggaggccaccctgggccgcctgcggcgggccacagaatatgcccccaagaagagaattgagcccctgagccctgagctggtggccgccgccagcgctgtggccgacagcctgccctttgacaagcagaccaccaagtctgagctgctgagccagctgcagcagcacgaggaggagagccgggcccagagagatgccaagaggcccaagatctccttcagcaacatcatcagtgacatgaaggtggcccggagcgccacagcccgggtgcgcagcaggcctgagctgcgcatccagtttgatgagggctatgacaactacccaggccaggagaagacagatgacctgaagaagaggaagaacatcttcaccgggaagaggctgaacatctttgacatgatggctgtgaccaaggaggcccctgagacagacaccagccccagcctgtgggatgtggagtttgccaagcagctggccaccgtgaatgagcagcccctgcagaatggatttgaggagctgatccagtggaccaaggagggcaagctgtgggagttccccatcaacaatgaagctggctttgatgatgatggcagcgagttccacgagcacatcttcctggagaagcacctggagagcttccccaagcagggccccatccgccacttcatggagctggtgacctgtggcctgagcaagaacccctacctgtctgtgaagcagaaggtggagcacatcgagtggttcaggaactacttcaatgagaagaaggacatcctgaaggagagcaacatccagttcaactag

SEQ ID NO: 160071 - DNA, 321 bp, synthetic construct
  misc_feature 1..321: note = Description of Artificial Sequence: Synthetic coding sequence
  source 1..321: mol_type = other DNA
atgagcagcctgtctgaatatgccttcaggatgagccggctgagcgcccggctgtttggagaggtgacccggcccaccaacagcaagtccatgaaggtggtgaagctgttcagcgagctgcccctggccaagaagaaggagacctatgactggtaccccaaccaccacacctatgcagagctgatgcagaccctgcgcttcctgggcctgtacagagatgagcaccaggacttcatggatgagcagaagaggctgaagaagctgcggggcaaggagaagcccaagaagggggagggcaagagagctgccaagaggaagtag

SEQ ID NO: 160072 - DNA, 321 bp, synthetic construct; identical to SEQ ID NO: 160071
  misc_feature 1..321: note = Description of Artificial Sequence: Synthetic coding sequence
  source 1..321: mol_type = other DNA

SEQ ID NO: 160073 - DNA, 321 bp, synthetic construct; identical to SEQ ID NO: 160071
  misc_feature 1..321: note = Description of Artificial Sequence: Synthetic coding sequence
  source 1..321: mol_type = other DNA

SEQ ID NO: 160074 - DNA, 321 bp, synthetic construct; identical to SEQ ID NO: 160071
  misc_feature 1..321: note = Description of Artificial Sequence: Synthetic coding sequence
  source 1..321: mol_type = other DNA

SEQ ID NO: 160075 - DNA, 339 bp, synthetic construct
  misc_feature 1..339: note = Description of Artificial Sequence: Synthetic coding sequence
  source 1..339: mol_type = other DNA
atgagcagcctgtctgaatatgccttcaggatgagccggctgagcgcccggctgtttggagaggtgacccggcccaccaacagcaagtccatgaaggtggtgaagctgttcagcgagctgcccctggccaagaagaaggagacctatgactggtaccccaaccaccacacctatgcagagctgatgcagaccctgcgcttcctgggcctgtacagagatgagcaccaggacttcatggatgagcagaagaggctgaagaagctgcggggcaaggagaagcccaagaagggggagggcaagagagctgccaagaggaagaagaagaagaagaagaggtag

SEQ ID NO: 160076 - DNA, 678 bp, synthetic construct
  misc_feature 1..678: note = Description of Artificial Sequence: Synthetic coding sequence
  source 1..678: mol_type = other DNA
atggccaggaagaaggtgcggccccggctgattgctgagctggcccggcgggtgcgggccctgcgggagcagctgaaccggccccgggacagccagctgtatgctgtggactatgagaccctgacccggcccttcagcggccggcggctgcctgtgcgggcctgggcagatgtgagaagagagagccggctgctgcagctgctgggccgcctgcccctgtttggcctgggccgcctggtgaccaggaagtcctggctgtggcagcatgatgagccctgctactggaggctgaccagggtgcggccagactacacagcccagaacctggaccacggcaaggcctggggcatcctgaccttcaaggatgccagcttcagcagcagcggcaagacagaaagtgaggcccgggagattgagcacgtgatgtaccatgactggaggctggtgcccaagcatgaggaggaggccttcaccgccttcaccccagcccctgaggacagcctggcctctgtgccctacccacccctgctgcgggccatgatcatcgccgagcggcagaagaatggagacaccagcacagaggagcccatgctgaatgtgcagaggatccgcatggagccctgggactacccagccaagcaggaggacaagggccgggccaagggcacccctgtgtag

SEQ ID NO: 160077 - DNA, 657 bp, synthetic construct
  misc_feature 1..657: note = Description of Artificial Sequence: Synthetic coding sequence
  source 1..657: mol_type = other DNA
atggccaggaagaaggtgcggccccggctgattgctgagctggcccggcgggtgcgggccctgcgggagcagctgaaccggccccgggacagccagctgtatgctgtggactatgagaccctgacccggcccttcagcggccggcggctgcctgtgcgggcctgggcagatgtgagaagagagagccggctgctgcagctgctgggccgcctgcccctgtttggcctgggccgcctggtgaccaggaagtcctggctgtggcagcatgatgagccctgctactggaggctgaccagggtgcggccagactacacagcccagaacctggaccacggcaaggcctggggcatcctgaccttcaagggcaagacagagagcgaggcccgggagattgaacatgtgatgtaccatgactggaggctggtgcccaagcatgaggaggaggccttcaccgccttcaccccagcccctgaggacagcctggcctctgtgccctacccacccctgctgcgggccatgatcatcgccgagcggcagaagaatggagacaccagcacagaggagcccatgctgaatgtgcagaggatccgcatggagccctgggactacccagccaagcaggaggacaagggccgggccaagggcacccctgtgtag

SEQ ID NO: 160078 - DNA, 972 bp, synthetic construct
  misc_feature 1..972: note = Description of Artificial Sequence: Synthetic coding sequence
  source 1..972: mol_type = other DNA
atggctgctgctgccctgcctgcctggctgagcctgcagagccgggcccggaccctgcgggccttcagcacagctgtgtacagcgccacccctgtgcccacccccagcctgcctgagaggaccccaggaaatgaaagaccacccaggaggaaggccctgccccccaggacagagaagatggctgtggaccaggactggcccagcgtgtaccctgtggccgcccccttcaagcccagcgctgtgcccctgcctgtgaggatgggctaccctgtgaagaagggcgtgcccatggccaaggagggcaacctggagctgctgaagatccccaacttcctgcacctgacccctgtggccatcaagaagcactgtgaggccctgaaggacttctgcacagagtggccagctgccctggacagtgatgagaagtgtgagaagcacttccccattgaaattgacagcacagattatgtgagcagcggccccagcgtgaggaacccccgggcccgggtggtggtgctgcgggtgaagctgagcagcctgaacctggatgaccacgccaagaagaagctgatcaagctggtgggggagcgctactgcaagaccacagatgtgctgaccatcaagacagaccgctgccccctgcggcggcagaactatgactatgctgtgtacctgctgactgtgctgtaccacgagagctggaacacagaggagtgggagaagagcaagacagaggccgacatggaggagtacatctgggagaacagcagcagcgagaggaacatcctggagaccctgctgcagatgaaggctgctgagaagaacatggagatcaacaaggaggagctgctgggcaccaaggagattgaggagtacaagaagtctgtggtgtccctgaagaatgaggaggagaatgaaaacagcatcagccagtacaaggagagcgtgaagaggctgctgaatgtgacctag

SEQ ID NO: 160079 - DNA, 864 bp, synthetic construct
  misc_feature 1..864: note = Description of Artificial Sequence: Synthetic coding sequence
  source 1..864: mol_type = other DNA
atggctgctgctgccctgcctgcctggctgagcctgcagagccgggcccggaccctgcgggccttcagcacagctgtgtacagcgccacccctgtgcccacccccagcctgcctgagaggaccccaggaaatgaaagaccacccaggaggaaggccctgccccccaggacagagaagatggctgtggaccaggactggcccagcgtgtaccctgtggccgcccccttcaagcccagcgctgtgcccctgcctgtgaggatgggctaccctgtgaagaagggcgtgcccatggccaaggagggcaacctggagctgctgaagatccccaacttcctgcacctgacccctgtggccatcaagaagcactgtgaggccctgaaggacttctgcacagagtggccagctgccctggacagtgatgagaagtgtgagaagcacttccccattgaaattgacagcacagattatgtgagcagcggccccagcgtgaggaacccccgggcccgggtggtggtgctgcggcgctgccccctgcggcggcagaactatgactatgctgtgtacctgctgactgtgctgtaccacgagagctggaacacagaggagtgggagaagagcaagacagaggccgacatggaggagtacatctgggagaacagcagcagcgagaggaacatcctggagaccctgctgcagatgaaggctgctgagaagaacatggagatcaacaaggaggagctgctgggcaccaaggagattgaggagtacaagaagtctgtggtgtccctgaagaatgaggaggagaatgaaaacagcatcagccagtacaaggagagcgtgaagaggctgctgaatgtgacctag

SEQ ID NO: 160080 - DNA, 585 bp, synthetic construct
  misc_feature 1..585: note = Description of Artificial Sequence: Synthetic coding sequence
  source 1..585: mol_type = other DNA
atggctgctgctgccctgcctgcctggctgagcctgcagagccgggcccggaccctgcgggccttcagcacagctgtgtacagcgccacccctgtgcccacccccagcctgcctgagaggaccccaggaaatgaaagaccacccaggaggaaggccctgccccccaggacagagaagatggctgtggaccaggactggcccagcgtgtaccctgtggccgcccccttcaagcccagcgctgtgcccctgcctgtgaggatgggctaccctgtgaagaagggcgtgcccatggccaaggagggcaacctggagctgctgaagatccccaacttcctgcacctgacccctgtggccatcaagaagcactgtgaggccctgaaggacttctgcacagagtggccagctgccctggacagtgatgagaagtgtgagaagcacttccccattgaaattgacagcacagattatgtgagcagcggccccagcgtgaggaacccccgggcccgggtggtggtgctgcgggtgcccttcaaggaggccgagctgcggctgtgcagcgtgtccaccaacagcgtcatcccctag

SEQ ID NO: 160081 - DNA, 312 bp, synthetic construct
  misc_feature 1..312: note = Description of Artificial Sequence: Synthetic coding sequence
  source 1..312: mol_type = other DNA
atgatgggcagcaagatggccagcgccagccgggtggtgcaggtggtgaagccccacacccccctcatccgcttcccagaccggcgggacaaccccaagcccaacgtgtctgaggccctgcggtctgctggcctgcccagccacagcagcgtcatcagccagcacagcaagggcagcaagagcccagacctgctgatgtaccagggccccccagacacagctgagatcatcaagaccctgccccagaagtacagaaggaagctggtgtcccaggaggagatggagttcatccagaggggcggccctgagtag

SEQ ID NO: 160082 - DNA, 1293 bp, synthetic construct
  misc_feature 1..1293: note = Description of Artificial Sequence: Synthetic coding sequence
  source 1..1293: mol_type = other DNA
atggccacagctgtgcgggctgtgggctgcctgcctgtgctgtgcagcggcacagctggccacctgctgggccggcagtgcagcctgaacaccctgcctgctgccagcatcctggcctggaagtctgtgctgggcaatggccacctgagcagcctgggcacccgggacacccacccctatgccagcctgagccgggccctgcagacccagtgctgcatcagcagccccagccacctgatgagccagcagtaccggccctacagcttcttcaccaagctgacagcagatgagctgtggaagggggccctggccgagaccggggccggggccaagaagggccggggcaagaggaccaagaagaagaagaggaaggacctgaacagaggccagatcatcggggagggccgctatggcttcctgtggccaggcctgaatgtgcccctgatgaagaatggagctgtgcagaccatcgcccagaggagcaaggaggagcaggagaaggtggaggccgacatgatccagcagcgggaggagtgggacaggaagaagaagatgaaggtgaagcgggagcggggctggagcggcaacagctggggcggcatcagcctgggccccccagaccccggcccctgtggggagacctatgaggactttgacacccgcatcctggaggtgagaaatgtgttcaccatgacagccaaggagggcaggaagaagagcatccgggtgctggtggccgtgggcaatggaaaaggagctgctggcttcagcatcggcaaggccacagacaggatggatgccttcaggaaggccaagaacagagctgtgcaccacctgcactacatcgagagatatgaggaccacaccatcttccatgacatcagcctgcgcttcaagaggacccacatcaagatgaagaagcagcccaagggctacggcctgcgctgccaccgggccatcatcaccatctgccgcctgattggcatcaaggacatgtatgccaaggtgtctggcagcatcaacatgctgagcctgacccagggcctcttccggggcctgagccggcaggagacccaccagcagctggccgacaagaagggcctgcacgtggtggagatccgggaggagtgtggccccctgcccatcgtggtggccagcccccggggccccctgaggaaggaccctgagccagaagatgaggtgcctgatgtgaagctggactgggaggatgtgaagacagcccagggcatgaagaggtctgtgtggagcaacctgaagagagctgccacctag

SEQ ID NO: 160083 - DNA, 378 bp, synthetic construct
  misc_feature 1..378: note = Description of Artificial Sequence: Synthetic coding sequence
  source 1..378: mol_type = other DNA
atgcccaggtatgagctggccctgatcctgaaggccatgcagaggcctgagacagctgccaccctgaagaggaccatcgaggccctgatggacagaggagccatcgtgcgggacctggagaacctgggggagcgggccctgccctaccgcatcagcgcccacagccagcagcacaacagaggaggctacttcctggtggacttctacgcccccacagctgctgtggagagcatggtggagcacctgagccgggacattgatgtgatccggggcaacatcgtgaagcaccccctgacccaggagctgaaggaatgtgagggcatcgtgcctgtgcccctggccgagaagctgtacagcaccaagaagaggaagaagtag

SEQ ID NO: 160084 - DNA, 729 bp, synthetic construct
  misc_feature 1..729: note = Description of Artificial Sequence: Synthetic coding sequence
  source 1..729: mol_type = other DNA
atggccgccccagctgtgaaggtggcccggggctggagcggcctggccctgggcgtgcggcgggctgtgctgcagctgcccggcctgacccaggtgcgctggagccgctacagccctgagttcaaggaccccctgattgacaaggagtactacaggaagcctgtggaggagctgacagaggaggagaagtatgtgcgggagctgaagaagacccagctgatcaaggccgccccagctgggaagaccagctctgtgtttgaagatcctgtgatcagcaagttcaccaacatgatgatgattggaggcaacaaggtgctggcccggagcctgatgatccagaccctggaggccgtgaagaggaagcagtttgagaagtaccacgccgccagcgctgaggagcaggccaccattgaaagaaacccctacaccatcttccaccaggccctgaagaactgtgagcccatgattggcctggtgcccatcctgaagggcggccgcttctaccaggtgcctgtgcccctgcctgacagaagaagacgcttcctggccatgaagtggatgatcacagagtgccgggacaagaagcaccagaggaccctgatgcctgagaagctgagccacaagctgctggaggccttccacaaccagggccctgtgatcaagaggaagcatgacctgcacaagatggccgaggccaacagagccctggcccactaccgctggtggtag

SEQ ID NO: 160085 - DNA, 1191 bp, synthetic construct
  misc_feature 1..1191: note = Description of Artificial Sequence: Synthetic coding sequence
  source 1..1191: mol_type = other DNA
atggccgccccctgtgtgtcctatggaggagctgtgtcctaccgcctgctgctgtggggccggggcagcctggccaggaagcagggcctgtggaagacagctgcccctgagctgcagaccaacgtgcgcagccagatcctgcggctgcggcacacagccttcgtcatccccaagaagaatgtgcccaccagcaagcgggagacctacacagaggacttcatcaagaagcagatcgaggagttcaacatcggcaagaggcacctggccaacatgatgggagaggaccctgagaccttcacccaggaggacatcgaccgggccatcgcctacctgttccccagcggcctgtttgagaagagggcccggcctgtgatgaagcaccctgagcagatcttcccccggcagagggccatccagtggggagaagatggccggcccttccactacctgttctacacaggcaagcagagctactacagcctgatgcatgatgtgtatggcatgctgctgaacctggagaagcaccagagccacctgcaggccaagagcctgctgcctgagaagacagtgaccagagatgtgattggcagccgctggctgatcaaggaggagctggaggagatgctggtggagaagctgagtgacctggactacatgcagttcatccggctgctggagaagctgctgaccagccagtgtggggctgctgaggaggagtttgtgcagcgcttcagaagatctgtgaccctggagagcaagaagcagctgattgagcctgtgcagtatgatgagcagggcatggccttcagcaagtctgagggcaagaggaagacagccaaggccgaggccatcgtgtacaagcacggcagcggccgcatcaaggtgaatggcatcgactaccagctgtacttccccatcacccaggaccgggagcagctgatgttccccttccactttgtggaccggctgggcaagcatgatgtgacctgcaccgtgtctgggggcggccgcagcgcccaggccggggccatccggctggccatggccaaggccctgtgcagctttgtgacagaagatgaggtggagtggatgaggcaggccggcctgctgaccacagacccccgggtgcgggagaggaagaagccaggccaggagggcgcccggaggaagttcacctggaagaagaggtag

SEQ ID NO: 160086 - DNA, 1122 bp, synthetic construct
  misc_feature 1..1122: note = Description of Artificial Sequence: Synthetic coding sequence
  source 1..1122: mol_type = other DNA
atgtgggtgtgcagcaccctgtggagggtgaggaccccagcccggcagtggaggggcctgctgcctgccagcggctgccacggccctgctgccagcagctacagcgccagcgctgagcccgcccgggtgcgggccctggtgtatggccaccacggggaccctgccaaggtggtggagctgaagaacctggagctggccgctgtgcggggcagtgatgtgcgggtgaagatgctggccgcccccatcaaccccagcgacatcaacatgatccagggcaactacggcttcctgcctgagctgcctgctgtgggcggcaatgaaggagtggcccaggtggtggccgtgggcagcaatgtgacaggcctgaagccaggggactgggtgatcccagccaatgccggcctgggcacctggaggacagaggccgtgttttctgaggaggccctgatccaggtgcccagcgacatccccctgcagagcgctgccaccctgggcgtgaacccctgcacagcctacaggatgctgatggactttgagcagctgcagcccggggacagcgtcatccagaatgccagcaacagcggcgtgggccaggccgtcatccagattgctgctgccctgggcctgcggaccatcaacgtggtgcgggacagaccagacatccagaagctgagtgaccggctgaagagcctgggcgctgagcacgtgatcacagaggaggagctgcggcggcctgagatgaagaacttcttcaaggacatgccccagccccggctggccctgaactgtgtgggcggcaagagcagcacagagctgctgcggcagctggcccggggcggcaccatggtgacctatggaggcatggccaagcagcctgtggtggcctctgtgtccctgctgatcttcaaggacctgaagctgcggggcttctggctgagccagtggaagaaggaccacagcccagaccagttcaaggagctgatcctgaccctgtgtgacctgatccggcggggccagctgacagccccagcctgcagccaggtgcccctgcaggactaccagagcgccctggaggcctccatgaagcccttcatcagcagcaagcagatcctgaccatgtag

SEQ ID NO: 160087 - DNA, 894 bp, synthetic construct
  misc_feature 1..894: note = Description of Artificial Sequence: Synthetic coding sequence
  source 1..894: mol_type = other DNA
atgctggccgcccccatcaaccccagcgacatcaacatgatccagggcaactacggcttcctgcctgagctgcctgctgtgggcggcaatgaaggagtggcccaggtggtggccgtgggcagcaatgtgacaggcctgaagccaggggactgggtgatcccagccaatgccggcctgggcacctggaggacagaggccgtgttttctgaggaggccctgatccaggtgcccagcgacatccccctgcagagcgctgccaccctgggcgtgaacccctgcacagcctacaggatgctgatggactttgagcagctgcagcccggggacagcgtcatccagaatgccagcaacagcggcgtgggccaggccgtcatccagattgctgctgccctgggcctgcggaccatcaacgtggtgcgggacagaccagacatccagaagctgagtgaccggctgaagagcctgggcgctgagcacgtgatcacagaggaggagctgcggcggcctgagatgaagaacttcttcaaggacatgccccagccccggctggccctgaactgtgtgggcggcaagagcagcacagagctgctgcggcagctggcccggggcggcaccatggtgacctatggaggcatggccaagcagcctgtggtggcctctgtgtccctgctgatcttcaaggacctgaagctgcggggcttctggctgagccagtggaagaaggaccacagcccagaccagttcaaggagctgatcctgaccctgtgtgacctgatccggcggggccagctgacagccccagcctgcagccaggtgcccctgcaggactaccagagcgccctggaggcctccatgaagcccttcatcagcagcaagcagatcctgaccatgtag

SEQ ID NO: 160088 - DNA, 789 bp, synthetic construct
  misc_feature 1..789: note = Description of Artificial Sequence: Synthetic coding sequence
  source 1..789: mol_type = other DNA
atgatccagggcaactacggcttcctgcctgagctgcctgctgtgggcggcaatgaaggagtggcccaggtggtggccgtgggcagcaatgtgacaggcctgaagccaggggactgggtgatcccagccaatgccggcctgggcacctggaggacagaggccgtgttttctgaggaggccctgatccaggtgcccagcgacatccccctgcagagcgctgccaccctgggcgtgaacccctgcacagcctacaggatgctgatggactttgagcagctgcagcccggggacagcgtcatccagaatgccagcaacagcggcgtgggccaggccgtcatccagattgctgctgccctgggcctgcggaccatcaacgtggtgcgggacagaccagacatccagaagctgagtgaccggctgaagagcctgggcgctgagcacgtgatcacagaggaggagctgcggcggcctgagatgaagaacttcttcaagatcaggaagctgcggctgaggaaggaggagatgctgaaccagaaccacatcgtgtacaagggcagccgggagagcgagctggcctctgtgagccccaacagcaagcccctgaacctgcctgagcccccaccccacaacatgcccaggcatgccccagccacagcctgcagccagctgtgctggtgggagaagctgcacagagctgctgctgctgtgtctgcctggaggaaccacggcaacctgtggggagatggccaggccgcccggcgcagcctgtgtgagcccgcccacttctag

SEQ ID NO: 160089 - DNA, 570 bp, synthetic construct
  misc_feature 1..570: note = Description of Artificial Sequence: Synthetic coding sequence
  source 1..570: mol_type = other DNA
gccaccctgggcgtgaacccctgcacagcctacaggatgctgatggactttgagcagctgcagcccggggacagcgtcatccagaatgccagcaacagcggcgtgggccaggccgtcatccagattgctgctgccctgggcctgcggaccatcaacgtggtgcgggacagaccagacatccagaagctgagtgaccggctgaagagcctgggcgctgagcacgtgatcacagaggaggagctgcggcggcctgagatgaagaacttcttcaagatcaggaagctgcggctgaggaaggaggagatgctgaaccagaaccacatcgtgtacaagggcagccgggagagcgagctggcctctgtgagccccaacagcaagcccctgaacctgcctgagcccccaccccacaacatgcccaggcatgccccagccacagcctgcagccagctgtgctggtgggagaagctgcacagagctgctgctgctgtgtctgcctggagaaatcatggcaacctgtggggagatggccaggccgcccggcgcagcctgtgtgagcccgcccacttctag

SEQ ID NO: 160090 - DNA, 1200 bp, synthetic construct
  misc_feature 1..1200: note = Description of Artificial Sequence: Synthetic coding sequence
  source 1..1200: mol_type = other DNA
atgcagagcctgagcctgggccagaccagcatcagcaagggcctgaactacctgaccatcatggcccctggcaacctgtggcacatgaggaacaacttcctgtttggcagccgctgctggatgacccgcttctctgctgagaacatcttcaagtctgtgtccttccggctgtttggagtgaagtgccacaacacagattctgagcccctgaagaatgaagacctgctgaagaacctgctgaccatgggcgtggacatcgacatggccaggaagaggcagcccggggtcttccacaggatgatcaccaatgagcaggacctgaagatgttcctgctgagcaagggggccagcaaggaggtgattgccagcatcatcagccgctacccccgggccatcaccaggaccccagagaacctgagcaagcgctgggacctgtggaggaagatcgtgaccagtgacctggagatcgtgaacatcctggagaggagccctgagagcttcttccgcagcaacaacaacctgaacctggagaacaacatcaagttcctgtacagcgtgggcctgaccaggaagtgcctgtgccgcctgctgaccaatgcccccaggaccttcagcaacagcctggacctgaacaagcagatggtggagttcctgcaggccgccggcctgagcctgggccacaatgaccctgctgactttgtgaggaagatcatcttcaagaaccccttcatcctgatccagagcaccaagagggtgaaggccaacatcgagttcctgcggagcaccttcaacctgaacagcgaggagctgctggtgctgatctgtggccctggagctgagatcctggacctgagcaatgactatgcccggcgctcctatgccaacatcaaggagaagctgttcagcctgggctgcacagaggaggaggtgcagaagtttgtgctgagctacccagatgtgatcttcctggccgagaagaagttcaatgacaagattgactgcctgatggaggagaacatcagcatcagccagatcatcgagaacccccgggtgctggacagcagcatcagcaccctgaagagccgcatcaaggagctggtgaatgccggctgcaacctgagcaccctgaacatcaccctgctgtcctggagcaagaagagatatgaggccaagctgaagaagctgagcagatttgcctag

SEQ ID NO: 160091 - DNA, 477 bp, synthetic construct
  misc_feature 1..477: note = Description of Artificial Sequence: Synthetic coding sequence
  source 1..477: mol_type = other DNA
atgcagagcctgagcctgggccagaccagcatcagcaagggcctgaactacctgaccatcatggcccctggcaacctgtggcacatgaggaacaacttcctgtttggcagccgctgctggatgacccgcttctctgctgagaacatcttcaagtctgtgtccttccggctgtttggagtgaagtgccacaacacagattctgagcccctgaagaatgaagacctgctgaagaacctgctgaccatgggcgtggacatcgacatggccaggaagaggcagcccggggtcttccacaggatgatcaccaatgagcaggacctgaagatgttcctgctgagcaagggggccagcaaggaggtgattgccagcatcatcagccgctacccccgggccatcaccaggaccccagagaacctgagcaagcgctgggacctgtggaggaagatcgtgaccagtgacctggagatcgtgaactag

SEQ ID NO: 160092 - DNA, 2184 bp, synthetic construct
  misc_feature 1..2184: note = Description of Artificial Sequence: Synthetic coding sequence
  source 1..2184: mol_type = other DNA
atgaaccagaagctgctgaagctggagaacctgctgcgcttccacaccatctaccggcagctgcacagcctgtgccagaggcgggccctgcggcagtggaggcatggcttcagcagcgcctaccctgtgtggacagcccagctgtgtgcctggccctggcccacagatgtgctgactggagctgccctgagccagtaccgcctgctggtgaccaagaaggaggagggcccctggaagagccagctgagcagcaccaagagcaagaaggtggtggaggtgtggattggcatgaccatcgaggagctggcccgggccatggagaagaacacagattatgtgtatgaggccctgctgaacacagacatcgacatcgacagcctggaggccgacagccacctggatgaggtgtggatcaaggaggtgatcaccaaggccggcatgaagctgaagtggagcaagctgaagcaggacaaggtgaggaagaacaaggatgctgtgagaagaccccaggccgaccctgccctgctgacccccaggagccctgtggtgaccatcatgggccacgtggaccacggcaagaccaccctgctggacaagttcaggaagacccaggtggccgctgtggagaccggcggcatcacccagcacatcggggccttcctggtgtccctgcccagcggggagaagatcaccttcctggacaccccaggccatgctgccttcagcgccatgagggcccggggggcccaggtgacagacatcgtggtgctggtggtggccgcagatgatggagtgatgaagcagacagtggagagcatccagcacgccaaggatgcccaggtgcccatcatcctggccgtgaacaagtgtgacaaggccgaggccgaccctgagaaggtgaagaaggagctgctggcctatgatgtggtgtgtgaggactatggaggagatgtgcaggccgtgcctgtgtctgccctgactggagacaacctgatggccctggccgaggccaccgtggccctggccgagatgctggagctgaaggctgaccccaacggccctgtggagggcaccgtcatcgagagcttcacagacaagggccggggcctggtgaccacagccatcatccagaggggcaccctgaggaaaggatctgtgctggtggccggcaagtgctgggccaaggtgcggctgatgtttgatgaaaatggcaagaccattgatgaggcctaccccagcatgcctgtgggcatcaccggctggagggacctgcccagcgctggggaggagatcctggaggtggagagcgagccccgggcccgggaggtggtggactggaggaaatatgagcaggagcaggagaagggccaggaggacctgaagatcatcgaggagaagaggaaggagcacaaggaggcccaccagaaggcccgggagaagtatggccacctgctgtggaagaagaggagcatcctgcgcttcctggagaggaaggagcagatccccctgaagcccaaggagaagcgggagcgggacagcaatgtgctgagcgtcatcatcaagggagatgtggatggctctgtggaggccatcctgaacatcatcgacacctatgatgccagccatgaatgtgagctggagctggtgcactttggagtgggagatgtgtctgccaatgatgtgaacctggccgagacctttgatggagtcatctacggcttcaacgtgaatgctggaaatgtcatccagcagagcgctgccaagaagggcgtgaagatcaagctgcacaagatcatctaccgcctggtggaggacctgcaggaggagctgagcagccggctgccctgtgctgtggaggagcaccctgtgggggaggccagcatcctggccaccttctctgtgacagagggcaagaagaaggtgcctgtggccggctgccgggtgcagaagggccagctggagaagcagaagaagttcaagctgaccagaaatggccacgtgatctggaagggcagcctgaccagcctgaagcaccacaaggatgacatcagcatcgtgaagacaggcatggactgtggcctgagcctggatgaggacaacatggagttccaggtgggggacagaattgtgtgctatgaggagaagcagatccaggccaagacctcctgggaccccggcttctag

SEQ ID NO: 160093 - DNA, 219 bp, synthetic construct
  misc_feature 1..219: note = Description of Artificial Sequence: Synthetic coding sequence
  source 1..219: mol_type = other DNA
atgaaccagaagctgctgaagctggagaacctgctgcgcttccacaccatctaccggcagctgcacagcctgtgccagaggcgggccctgcggcagtggaggcatggcttcagcagcgcctaccctgtgtggacagcccagctgtgtgcctggccctggcccacagatgtgctgactggagctgccctgagccagtaccgcctgctggtgaccaagtag

SEQ ID NO: 160094 - DNA, 2184 bp, synthetic construct; identical to SEQ ID NO: 160092
  misc_feature 1..2184: note = Description of Artificial Sequence: Synthetic coding sequence
  source 1..2184: mol_type = other DNA

SEQ ID NO: 160095 - DNA, 2184 bp, synthetic construct; identical to SEQ ID NO: 160092
  misc_feature 1..2184: note = Description of Artificial Sequence: Synthetic coding sequence
  source 1..2184: mol_type = other DNA

SEQ ID NO: 160096 - DNA, 213 bp, synthetic construct
  misc_feature 1..213: note = Description of Artificial Sequence: Synthetic coding sequence
  source 1..213: mol_type = other DNA
atgaaccagaagctgctgaagctggagaacctgctgcgcttccacaccatctaccggcagctgcacagcctgtgccagaggcgggccctgcggcagtggaggcatggcttcagcagcgcctaccctgtgtggacagcccagctgtgtgcctggccctggcccacagatgtgctgactggagctgccctgagccagtaccgcctgctggtgtag

SEQ ID NO: 160097 - DNA, 24 bp, synthetic construct
  misc_feature 1..24: note = Description of Artificial Sequence: Synthetic coding sequence
  source 1..24: mol_type = other DNA
atgaaccagaagctgctgaagtag

SEQ ID NO: 160098 - DNA, 33 bp, synthetic construct; identical to SEQ ID NO: 89302
  misc_feature 1..33: note = Description of Artificial Sequence: Synthetic coding sequence
  source 1..33: mol_type = other DNA

SEQ ID NO: 160099 - DNA, 81 bp, synthetic construct
  misc_feature 1..81: note = Description of Artificial Sequence: Synthetic coding sequence
  source 1..81: mol_type = other DNA
atgaaccagaagctgctgaagctggagaacctgctgcgcttccacaccatctaccggcagctgcacagcctgtgccagtag

SEQ ID NO: 160100 - DNA, 216 bp, synthetic construct
  misc_feature 1..216: note = Description of Artificial Sequence: Synthetic coding sequence
  source 1..216: mol_type = other DNA
atgaaccagaagctgctgaagctggagaacctgctgcgcttccacaccatctaccggcagctgcacagcctgtgccagaggcgggccctgcggcagtggaggcatggcttcagcagcgcctaccctgtgtggacagcccagctgtgtgcctggccctggcccacagatgtgctgactggagctgccctgagccagtaccgcctgctggtgacctag

SEQ ID NO: 160101 - DNA, 1398 bp, synthetic construct
  misc_feature 1..1398: note = Description of Artificial Sequence: Synthetic coding sequence
  source 1..1398: mol_type = other DNA
atgaaccagaagctgctgaagctggagaacctgctgcgcttccacaccatctaccggcagctgcacagcctgtgccagaggcgggccctgcggcagtggaggcatggcttcagcagcgcctaccctgtgtggacagcccagctgtgtgcctggccctggcccacagatgtgctgactggagctgccctgagccagtaccgcctgctggtgaccaagaaggaggagggcccctggaagagccagctgagcagcaccaagagcaagaaggtggtggaggtgtggattggcatgaccatcgaggagctggcccgggccatggagaagaacacagattatgtgtatgaggccctgctgaacacagacatcgacatcgacagcctggaggccgacagccacctggatgaggtgtggatcaaggaggtgatcaccaaggccggcatgaagctgaagtggagcaagctgaagcaggacaaggtgaggaagaacaaggatgctgtgagaagaccccaggccgaccctgccctgctgacccccaggagccctgtggtgaccatcatgggccacgtggaccacggcaagaccaccctgctggacaagttcaggaagacccaggtggccgctgtggagaccggcggcatcacccagcacatcggggccttcctggtgtccctgcccagcggggagaagatcaccttcctggacaccccaggccatgctgccttcagcgccatgagggcccggggggcccaggtgacagacatcgtggtgctggtggtggccgcagatgatggagtgatgaagcagacagtggagagcatccagcacgccaaggatgcccaggtgcccatcatcctggccgtgaacaagtgtgacaaggccgaggccgaccctgagaaggtgaagaaggagctgctggcctatgatgtggtgtgtgaggactatggaggagatgtgcaggccgtgcctgtgtctgccctgactggagacaacctgatggccctggccgaggccaccgtggccctggccgagatgctggagctgaaggctgaccccaacggccctgtggagggcaccgtcatcgagagcttcacagacaagggccggggcctggtgaccacagccatcatccagaggggcaccctgaggaaaggatctgtgctggtggccggcaagtgctgggccaaggtgcggctgatgtttgatgaaaatggcaagaccattgatgaggcctaccccagcatgcctgtgggcatcaccggctggagggacctgcccagcgctggggaggagatcctggaggtggagagcgagccccgggcccgggaggtggtggactggaggaaatatgagcaggagcaggagaagggccaggaggacctgaagaaggagaagaactag

SEQ ID NO: 160102 - DNA, 456 bp, synthetic construct
  misc_feature 1..456: note = Description of Artificial Sequence: Synthetic coding sequence
  source 1..456: mol_type = other DNA
atgaacagacacctgtgtgtgtggctgttccgccaccccagcctgaatggctacctgcagtgccacatccagctgcacagccaccagttccggcagatccacctggacacccggctgcaggtgttccggcagaacagaaactgcatcctgcacctgctgagcaagaactggagccgccgctactgccaccaggacaccaagatgctgtggaagcacaaggccctgcagaagtacatggagaacctgagcaaggagtaccagaccctggagcagtgcctgcagcacatccctgtgaatgaagaaaatagaagaagcctgaacagaagacatgctgagctggcccccctggccgccatctaccaggagatccaggagacagagcaggccatcgaggagctggagagcatgtgcaagaagacagagagctgcagcgtggcccaggccggcatgcagtag

SEQ ID NO: 160103 - DNA, 1338 bp, synthetic construct
  misc_feature 1..1338: note = Description of Artificial Sequence: Synthetic coding sequence
  source 1..1338: mol_type = other DNA
atgaacagacacctgtgtgtgtggctgttccgccaccccagcctgaatggctacctgcagtgccacatccagctgcacagccaccagttccggcagatccacctggacacccggctgcaggtgttccggcagaacagaaactgcatcctgcacctgctgagcaagaactggagccgccgctactgccaccaggacaccaagatgctgtggaagcacaaggccctgcagaagtacatggagaacctgagcaaggagtaccagaccctggagcagtgcctgcagcacatccctgtgaatgaagaaaatagaagaagcctgaacagaagacatgctgagctggcccccctggccgccatctaccaggagatccaggagacagagcaggccatcgaggagctggagagcatgtgcaagagcctgaacaagcaggatgagaagcagctgcaggagctggccctggaggagcggcagaccatcgaccagaagatcaacatgctgtacaatgagctgttccagagcctggtgcccaaggagaagtatgacaagaatgatgtgatcctggaggtgacagctggccgcaccactggaggagacatctgccagcagttcacccgggagatctttgacatgtaccagaactacagctgctacaagcactggcagtttgagctgctgaactacaccccagctgactatggaggcctgcaccacgccgccgcccgcatctctggagatggagtgtacaagcacctgaagtatgaaggaggcatccaccgggtgcagagaattcctgaggtgggcctgagcagcaggatgcagaggatccacacaggcaccatgtctgtgattgtgctgccccagccagatgaggtggatgtgaagctggaccccaaggacctgagaattgacaccttccgggccaagggggccggcggccagcacgtgaacaagacagacagcgctgtgcggctggtgcacatccccaccggcctggtggtggagtgccagcaggagaggagccagatcaagaacaaggagatcgccttccgggtgctgcgggcccggctgtaccagcagatcatcgagaaggacaagaggcagcagcagagcgccaggaagctgcaggtgggcacccgggcccagagcgagcgcatccgcacctacaacttcacccaggacagagtgtctgaccaccgcatcgcctatgaggtgcgggacatcaaggagttcctgtgtggcggcaagggcctggaccagctgatccagaggctgctgcagagcgcagatgaggaggccatcgccgagctgctggatgagcacctgaagagcgccaagtag

SEQ ID NO: 160104 - DNA, 1338 bp, synthetic construct; identical to SEQ ID NO: 160103
  misc_feature 1..1338: note = Description of Artificial Sequence: Synthetic coding sequence
  source 1..1338: mol_type = other DNA

SEQ ID NO: 160105 - DNA, 1407 bp, synthetic construct
  misc_feature 1..1407: note = Description of Artificial Sequence: Synthetic coding sequence
  source 1..1407: mol_type = other DNA
atgggaaatggagaggtggtgctcttcagtgatgctgagatgaacagacacctgtgtgtgtggctgttccgccaccccagcctgaatggctacctgcagtgccacatccagctgcacagccaccagttccggcagatccacctggacacccggctgcaggtgttccggcagaacagaaactgcatcctgcacctgctgagcaagaactggagccgccgctactgccaccaggacaccaagatgctgtggaagcacaaggccctgcagaagtacatggagaacctgagcaaggagtaccagaccctggagcagtgcctgcagcacatccctgtgaatgaggagaacagaagaagcctgaacagaagacatgctgagctggcccccctggccgccatctaccaggagatccaggagacagagcaggccatcgaggagctggagagcatgtgcaagagcctgaacaagcaggatgagaagcagctgcaggagctggccctggaggagcggcagaccatcgaccagaagatcaacatgctgtacaatgaactcttccagagcctggtgcccaaggagaagtatgacaagaatgatgtgatcctggaggtgacagctggccgcaccaccggcggggacatctgccagcagttcacccgggagatctttgacatgtaccagaactacagctgctacaagcactggcagtttgagctgctgaactacaccccagctgactatggaggcctgcaccacgccgccgcccgcatctctggagatggagtgtacaagcacctgaagtatgagggcggcatccaccgggtgcagagaattcctgaggtgggcctgagcagcaggatgcagaggatccacacaggcaccatgtctgtcatcgtgctgccccagccagatgaggtggatgtgaagctggaccccaaggacctgagaattgacaccttccgggccaagggagctgggggccagcacgtgaacaagacagattctgctgtgcggctggtgcacatccccaccggcctggtggtggagtgccagcaggagaggagccagatcaagaacaaggagatcgccttccgggtgctgcgggcccggctgtaccagcagatcatcgagaaggacaagaggcagcagcagagcgccaggaagctgcaggtgggcacccgggcccagagcgagcgcatccgcacctacaacttcacccaggacagagtgtctgaccacagaattgcctatgaggtgcgggacatcaaggcccagagccacagcactggaggcagccgggaccctgcccacagcaccttcctgagcctggacagcgtgcgcagccctggcatcctgatcatgaccagctctgtgaggaacttctacgtggtgggccgggcctggatctcctag

SEQ ID NO: 160106 - DNA, 2274 bp, synthetic construct
  misc_feature 1..2274: note = Description of Artificial Sequence: Synthetic coding sequence
  source 1..2274: mol_type = other DNA
atgagcctgctcttcagccgctgcaacagcatcgtgacagtgaagaagaacaagaggcacatggccgaggtgaatgccagccccctgaagcactttgtgacagccaagaagaagatcaatggcatctttgagcagctgggcgcctacatccaggagagcgccaccttcctggaggacacctacagaaatgctgagctggaccctgtgaccacagaggagcaggtgctggatgtgaagggctacctgagcaaggtgcggggcatcagcgaggtgctggcccggcggcacatgaaggtggccttcttcggccgcaccagcaatggcaagagcaccgtcatcaatgccatgctgtgggacaaggtgctgcccagcggcatcggccacaccaccaactgcttcctgcgggtggagggcacagatggccacgaggccttcctgctgacagagggcagcgaggagaagaggtctgccaagacagtgaaccagctggcccacgccctgcaccaggacaagcagctgcatgctggcagcctggtgtctgtgatgtggcccaacagcaaatgtcccctgctgaaggatgacctggtgctgatggacagccctggcattgatgtgaccacagagctggacagctggattgacaagttctgcctggatgctgatgtgtttgtgctggtggccaacagcgagagcaccctgatgcagacagagaagcacttcttccacaaggtgtctgagcggctgagccggcccaacatcttcatcctgaacaaccgctgggatgccagcgccagcgagcctgagtacatggaggaggtgcggcggcagcacatggagcgctgcaccagcttcctggtggatgagctgggcgtggtggacaggagccaggccggggaccgcatcttctttgtgtctgccaaggaggtgctgaatgcccgcatccagaaggcccagggcatgcctgagggcggcggggccctggccgagggcttccaggtgaggatgtttgagttccagaactttgaaagaagatttgaggagtgcatcagccagagcgctgtgaagaccaagtttgagcagcacacagtgcgggccaagcagattgctgaggccgtgcggctcatcatggacagcctgcacatggccgcccgggagcagcaggtgtactgtgaggagatgagggaggagcggcaggaccggctgaagttcatcgacaagcagctggagctgctggcccaggactacaagctgcgcatcaagcagatcacagaggaggtggagcggcaggtgtccacagccatggccgaggagatccggcggctgtctgtgctggtggatgactaccagatggacttccaccccagccctgtggtgctgaaggtgtacaagaatgagctgcaccgccacatcgaggagggcctgggcaggaacatgtctgaccgctgcagcacagccatcaccaacagcctgcagaccatgcagcaggacatgattgatggcctgaagcccctgctgcctgtgtctgtgcgcagccagattgacatgctggtgccccggcagtgcttcagcctgaactatgacctgaactgtgacaagctgtgtgccgacttccaggaggacatcgagttccacttcagcctgggctggaccatgctggtgaaccgcttcctgggccccaagaacagcagaagagccctgatgggctacaatgaccaggtgcagaggcccatccccctgaccccagccaaccccagcatgccacccctgccccagggcagcctgacccaggaggagttcatggtgtccatggtgacaggcctggccagcctgaccagcaggacctccatgggcatcctggtggtgggcggcgtggtgtggaaggctgtgggctggaggctcatcgccctgagctttggcctgtatggcctgctgtatgtgtatgagcggctgacctggaccaccaaggccaaggagcgggccttcaagaggcagtttgtggagcacgccagcgagaagctgcagctggtgatctcctacacaggcagcaactgcagccaccaggtgcagcaggagctgagcggcacctttgcccacctgtgccagcaggtggatgtgacccgggagaacctggagcaggagattgctgccatgaacaagaagattgaggtgctggacagcctgcagagcaaggccaagctgctgaggaacaaggccggctggctggacagcgagctgaacatgttcacccaccagtacctgcagcccagcaggtag

SEQ ID NO: 160107 - DNA, 1311 bp, synthetic construct
  misc_feature 1..1311: note = Description of Artificial Sequence: Synthetic coding sequence
  source 1..1311: mol_type = other DNA
atgcacccccacctgagcaccctgagcctgcccaggagaagatccatggccttcctgagctcctggggcgccctggccgagggcttccaggtgaggatgtttgagttccagaactttgaaagaagatttgaggagtgcatcagccagagcgctgtgaagaccaagtttgagcagcacacagtgcgggccaagcagattgctgaggccgtgcggctcatcatggacagcctgcacatggccgcccgggagcagcaggtgtactgtgaggagatgagggaggagcggcaggaccggctgaagttcatcgacaagcagctggagctgctggcccaggactacaagctgcgcatcaagcagatcacagaggaggtggagcggcaggtgtccacagccatggccgaggagatccggcggctgtctgtgctggtggatgactaccagatggacttccaccccagccctgtggtgctgaaggtgtacaagaatgagctgcaccgccacatcgaggagggcctgggcaggaacatgtctgaccgctgcagcacagccatcaccaacagcctgcagaccatgcagcaggacatgattgatggcctgaagcccctgctgcctgtgtctgtgcgcagccagattgacatgctggtgccccggcagtgcttcagcctgaactatgacctgaactgtgacaagctgtgtgccgacttccaggaggacatcgagttccacttcagcctgggctggaccatgctggtgaaccgcttcctgggccccaagaacagcagaagagccctgatgggctacaatgaccaggtgcagaggcccatccccctgaccccagccaaccccagcatgccacccctgccccagggcagcctgacccaggaggagttcatggtgtccatggtgacaggcctggccagcctgaccagcaggacctccatgggcatcctggtggtgggcggcgtggtgtggaaggctgtgggctggaggctcatcgccctgagctttggcctgtatggcctgctgtatgtgtatgagcggctgacctggaccaccaaggccaaggagcgggccttcaagaggcagtttgtggagcacgccagcgagaagctgcagctggtgatctcctacacaggcagcaactgcagccaccaggtgcagcaggagctgagcggcacctttgcccacctgtgccagcaggtggatggagagaccctgtctgagaggtccatggccaagagcaccctgatgctgctgaccctgctcttcctgtgcagctttgctggggcccaggatgtgctgacccagtag

SEQ ID NO: 160108 - DNA, 297 bp, synthetic construct
  misc_feature 1..297: note = Description of Artificial Sequence: Synthetic coding sequence
  source 1..297: mol_type = other DNA
atgagcctgctcttcagccgctgcaacagcatcgtgacagtgaagaagaacaagaggcacatggccgaggtgaatgccagccccctgaagcactttgtgacagccaagaagaagatcaatggcatctttgagcagctgggcgcctacatccaggagagcgccaccttcctggaggacacctacagaaatgctgagctggaccctgtgaccacagaggagcaggtgctggatgtgaagggctacctgagcaaggtgcggggcatcagcgaggtgctggcccggcggcacatgaagtag

SEQ ID NO: 160109 - DNA, 2274 bp, synthetic construct; identical to SEQ ID NO: 160106
  misc_feature 1..2274: note = Description of Artificial Sequence: Synthetic coding sequence
  source 1..2274: mol_type = other DNA

SEQ ID NO: 160110 - DNA, 1395 bp, synthetic construct
  misc_feature 1..1395: note = Description of Artificial Sequence: Synthetic coding sequence
  source 1..1395: mol_type = other DNA
atgagcctgcacttcctgtactactgcagcgagcccaccctggatgtgaagatcgccttctgccagggctttgacaagcaggtggatgtgtcctacatcgccaagcactacaacatgagcaagagcaaggtggacaaccagttctacagcgtggaggtgggggacagcaccttcaccgtgctgaagcgctaccagaacctgaagcccatcggcagcggggcccagggcatcgtgtgtgccgcctatgatgctgtgctggacagaaatgtggccatcaagaagctgagccggcccttccagaaccagacccacgccaagagggcctaccgggagctggtgctgatgaagtgtgtgaaccacaagaacatcatcagcctgctgaatgtgttcaccccccagaagaccctggaggagttccaggatgtgtacctggtgatggagctgatggatgccaacctgtgccaggtgatccagatggagctggaccacgagaggatgagctacctgctgtaccagatgctgtgtggcatcaagcacctgcacagcgctggcatcatccaccgggacctgaagcccagcaacatcgtggtgaagagtgactgcaccctgaagatcctggactttggcctggccaggacagctggcaccagcttcatgatgaccccctacgtggtgacccgctactaccgggcccctgaggtgatcctgggcatgggctacaaggaaaatgtggacatctggagcgtgggctgcatcatgggagagatggtgcgccacaagatcctcttccctggccgggactacatcgaccagtggaacaaggtgattgagcagctgggcaccccctgcccagagttcatgaagaagctgcagcccaccgtgagaaattatgtggagaaccggcccaagtatgccggcctgaccttccccaagctgttcccagacagcctcttccctgctgacagcgagcacaacaagctgaaggccagccaggcccgggacctgctgagcaagatgctggtgattgatcctgccaagaggatctctgtggatgatgccctgcagcacccctacatcaacgtgtggtatgaccctgctgaggtggaggcccccccaccccagatctatgacaagcagctggatgagcgggagcacaccatcgaggagtggaaggagctgatctacaaggaggtgatgaacagcgaggagaagaccaagaatggagtggtgaagggccagcccagccccagcggggctgctgtgaacagcagcgagagcctgccccccagcagctctgtgaatgacatcagctccatgagcacagaccagaccctggccagtgacacagacagcagcctggaggccagcgctggccccctgggctgctgcaggtag

SEQ ID NO: 160111 - DNA, 1269 bp, synthetic construct
  misc_feature 1..1269: note = Description of Artificial Sequence: Synthetic coding sequence
  source 1..1269: mol_type = other DNA
atgagcctgcacttcctgtactactgcagcgagcccaccctggatgtgaagatcgccttctgccagggctttgacaagcaggtggatgtgtcctacatcgccaagcactacaacatgagcaagagcaaggtggacaaccagttctacagcgtggaggtgggggacagcaccttcaccgtgctgaagcgctaccagaacctgaagcccatcggcagcggggcccagggcatcgtgtgtgccgcctatgatgctgtgctggacagaaatgtggccatcaagaagctgagccggcccttccagaaccagacccacgccaagagggcctaccgggagctggtgctgatgaagtgtgtgaaccacaagaacatcatcagcctgctgaatgtgttcaccccccagaagaccctggaggagttccaggatgtgtacctggtgatggagctgatggatgccaacctgtgccaggtgatccagatggagctggaccacgagaggatgagctacctgctgtaccagatgctgtgtggcatcaagcacctgcacagcgctggcatcatccaccgggacctgaagcccagcaacatcgtggtgaagagtgactgcaccctgaagatcctggactttggcctggccaggacagctggcaccagcttcatgatgaccccctacgtggtgacccgctactaccgggcccctgaggtgatcctgggcatgggctacaaggaaaatgtggacatctggagcgtgggctgcatcatgggagagatggtgcgccacaagatcctcttccctggccgggactacatcgaccagtggaacaaggtgattgagcagctgggcaccccctgcccagagttcatgaagaagctgcagcccaccgtgagaaattatgtggagaaccggcccaagtatgccggcctgaccttccccaagctgttcccagacagcctcttccctgctgacagcgagcacaacaagctgaaggccagccaggcccgggacctgctgagcaagatgctggtgattgatcctgccaagaggatctctgtggatgatgccctgcagcacccctacatcaacgtgtggtatgaccctgctgaggtggaggcccccccaccccagatctatgacaagcagctggatgagcgggagcacaccatcgaggagtggaaggagctgatctacaaggaggtgatgaacagcgaggagaagaccaagaatggagtggtgaagggccagcccagccccagcgcccaggtgcagcagtag

SEQ ID NO: 160112 - DNA, 960 bp, synthetic construct
  misc_feature 1..960: note = Description of Artificial Sequence: Synthetic coding sequence
  source 1..960: mol_type = other DNA
atggagctgatggatgccaacctgtgccaggtgatccagatggagctggaccacgagaggatgagctacctgctgtaccagatgctgtgtggcatcaagcacctgcacagcgctggcatcatccaccgggacctgaagcccagcaacatcgtggtgaagagtgactgcaccctgaagatcctggactttggcctggccaggacagctggcaccagcttcatgatgaccccctacgtggtgacccgctactaccgggcccctgaggtgatcctgggcatgggctacaaggaaaatgtggacatctggagcgtgggctgcatcatgggagagatggtgcgccacaagatcctcttccctggccgggactacatcgaccagtggaacaaggtgattgagcagctgggcaccccctgcccagagttcatgaagaagctgcagcccaccgtgaggaactacgtggagaaccggcccaagtatgccggcctgaccttccccaagctgttcccagacagcctcttccctgctgacagcgagcacaacaagctgaaggccagccaggcccgggacctgctgagcaagatgctggtgattgatcctgccaagaggatctctgtggatgatgccctgcagcacccctacatcaacgtgtggtatgaccctgctgaggtggaggcccccccaccccagatctatgacaagcagctggatgagcgggagcacaccatcgaggagtggaaggagctgatctacaaggaggtgatgaacagcgaggagaagaccaagaatggagtggtgaagggccagcccagccccagcggggctgctgtgaacagcagcgagagcctgccccccagcagctctgtgaatgacatcagctccatgagcacagaccagaccctggccagtgacacagacagcagcctggaggccagcgctggccccctgggctgctgcaggtag

SEQ ID NO: 160113 - DNA, 834 bp, synthetic construct
  misc_feature 1..834: note = Description of Artificial Sequence: Synthetic coding sequence
  source 1..834: mol_type = other DNA
atggagctgatggatgccaacctgtgccaggtgatccagatggagctggaccacgagaggatgagctacctgctgtaccagatgctgtgtggcatcaagcacctgcacagcgctggcatcatccaccgggacctgaagcccagcaacatcgtggtgaagagtgactgcaccctgaagatcctggactttggcctggccaggacagctggcaccagcttcatgatgaccccctacgtggtgacccgctactaccgggcccctgaggtgatcctgggcatgggctacaaggaaaatgtggacatctggagcgtgggctgcatcatgggagagatggtgcgccacaagatcctcttccctggccgggactacatcgaccagtggaacaaggtgattgagcagctgggcaccccctgcccagagttcatgaagaagctgcagcccaccgtgaggaactacgtggagaaccggcccaagtatgccggcctgaccttccccaagctgttcccagacagcctcttccctgctgacagcgagcacaacaagctgaaggccagccaggcccgggacctgctgagcaagatgctggtgattgatcctgccaagaggatctctgtggatgatgccctgcagcacccctacatcaacgtgtggtatgaccctgctgaggtggaggcccccccaccccagatctatgacaagcagctggatgagcgggagcacaccatcgaggagtggaaggagctgatctacaaggaggtgatgaacagcgaggagaagaccaagaatggagtggtgaagggccagcccagccccagcgcccaggtgcagcagtag

SEQ ID NO: 160114 - DNA, 1269 bp, synthetic construct; identical to SEQ ID NO: 160111
  misc_feature 1..1269: note = Description of Artificial Sequence: Synthetic coding sequence
  source 1..1269: mol_type = other DNA

SEQ ID NO: 160115 - DNA, 1281 bp, synthetic construct
  misc_feature 1..1281: note = Description of Artificial Sequence: Synthetic coding sequence
  source 1..1281: mol_type = other DNA
atgagcaagagcaaggtggacaaccagttctacagcgtggaggtgggggacagcaccttcaccgtgctgaagcgctaccagaacctgaagcccatcggcagcggggcccagggcatcgtgtgtgccgcctatgatgctgtgctggacagaaatgtggccatcaagaagctgagccggcccttccagaaccagacccacgccaagagggcctaccgggagctggtgctgatgaagtgtgtgaaccacaagaacatcatcagcctgctgaatgtgttcaccccccagaagaccctggaggagttccaggatgtgtacctggtgatggagctgatggatgccaacctgtgccaggtgatccagatggagctggaccacgagaggatgagctacctgctgtaccagatgctgtgtggcatcaagcacctgcacagcgctggcatcatccaccgggacctgaagcccagcaacatcgtggtgaagagtgactgcaccctgaagatcctggactttggcctggccaggacagctggcaccagcttcatgatgaccccctacgtggtgacccgctactaccgggcccctgaggtgatcctgggcatgggctacaaggaaaatgtggacatctggagcgtgggctgcatcatgggagagatggtgcgccacaagatcctcttccctggccgggactacatcgaccagtggaacaaggtgattgagcagctgggcaccccctgcccagagttcatgaagaagctgcagcccaccgtgagaaattatgtggagaaccggcccaagtatgccggcctgaccttccccaagctgttcccagacagcctcttccctgctgacagcgagcacaacaagctgaaggccagccaggcccgggacctgctgagcaagatgctggtgattgatcctgccaagaggatctctgtggatgatgccctgcagcacccctacatcaacgtgtggtatgaccctgctgaggtggaggcccccccaccccagatctatgacaagcagctggatgagcgggagcacaccatcgaggagtggaaggagctgatctacaaggaggtgatgaacagcgaggagaagaccaagaatggagtggtgaagggccagcccagccccagcggggctgctgtgaacagcagcgagagcctgccccccagcagctctgtgaatgacatcagctccatgagcacagaccagaccctggccagtgacacagacagcagcctggaggccagcgctggccccctgggctgctgcaggtag

SEQ ID NO: 160116 - DNA, 1281 bp, synthetic construct; identical to SEQ ID NO: 160115
  misc_feature 1..1281: note = Description of Artificial Sequence: Synthetic coding sequence
  source 1..1281: mol_type = other DNA

SEQ ID NO: 160117 - DNA, 960 bp, synthetic construct
  misc_feature 1..960: note = Description of Artificial Sequence: Synthetic coding sequence
  source 1..960: mol_type = other DNA
atggagctgatggatgccaacctgtgccaggtgatccagatggagctggaccacgagaggatgagctacctgctgtaccagatgctgtgtggcatcaagcacctgcacagcgctggcatcatccaccgggacctgaagcccagcaacatcgtggtgaagagtgactgcaccctgaagatcctggactttggcctggccaggacagctggcaccagcttcatgatgaccccctacgtggtgacccgctactaccgggcccctgaggtgatcctgggcatgggctacaaggaaaatgtggacatgtggagcgtgggctgcatcatgggagagatgatcaagggagctgtgctcttccctggaacagaccacatcgaccagtggaacaaggtgattgagcagctgggcaccccctgcccagagttcatgaagaagctgcagcccaccgtgaggaactacgtggagaaccggcccaagtatgccggcctgaccttccccaagctgttcccagacagcctcttccctgctgacagcgagcacaacaagctgaaggccagccaggcccgggacctgctgagcaagatgctggtgattgatcctgccaagaggatctctgtggatgatgccctgcagcacccctacatcaacgtgtggtatgaccctgctgaggtggaggcccccccaccccagatctatgacaagcagctggatgagcgggagcacaccatcgaggagtggaaggagctgatctacaaggaggtgatgaacagcgaggagaagaccaagaatggagtggtgaagggccagcccagccccagcggggctgctgtgaacagcagcgagagcctgccccccagcagctctgtgaatgacatcagctccatgagcacagaccagaccctggccagtgacacagacagcagcctggaggccagcgctggccccctgggctgctgcaggtag

SEQ ID NO: 160118 - DNA, 102 bp, synthetic construct
  misc_feature 1..102: note = Description of Artificial Sequence: Synthetic coding sequence
  source 1..102: mol_type = other DNA
atgagcaagagcaaggtggacaaccagttctacagcgtggaggtgggggacagcaccttcaccgtgctgaagcgctaccagaacctgaagcccatcggctag

SEQ ID NO: 160119 - DNA, 156 bp, synthetic construct
  misc_feature 1..156: note = Description of Artificial Sequence: Synthetic coding sequence
  source 1..156: mol_type = other DNA
atgagcctgcacttcctgtactactgcagcgagcccaccctggatgtgaagatcgccttctgccagggctttgacaagcaggtggatgtgtcctacatcgccaagcactacaacatgagcaagagcaaggtggacaaccagttctacagcgtgtag

SEQ ID NO: 160120 - DNA, 276 bp, synthetic construct
  misc_feature 1..276: note = Description of Artificial Sequence: Synthetic coding sequence
  source 1..276: mol_type = other DNA
atgagcctgcacttcctgtactactgcagcgagcccaccctggatgtgaagatcgccttctgccagggctttgacaagcaggtggatgtgtcctacatcgccaagcactacaacatgagcaagagcaaggtggacaaccagttctacagcgtggaggtgggggacagcaccttcaccgtgctgaagcgctaccagaacctgaagcccatcggcagcggggcccagggcatcgtgtgtgccgcctatgatgctgtgctggacagaaatgtggcctag

SEQ ID NO: 160121 - DNA, 225 bp, synthetic construct
  misc_feature 1..225: note = Description of Artificial Sequence: Synthetic coding sequence
  source 1..225: mol_type = other DNA
atgagcaagagcaaggtggacaaccagttctacagcgtggaggtgggggacagcaccttcaccgtgctgaagcgctaccagaacctgaagcccatcggcagcggggcccagggcatcgtgtgtgccgcctatgatgctgtgctggacagaaatgtggccatcaagaagctgagccggcccttccagaaccagacccacgccaagagggcctaccgggagctgtag

SEQ ID NO: 160122 - DNA, 366 bp, synthetic construct
  misc_feature 1..366: note = Description of Artificial Sequence: Synthetic coding sequence
  source 1..366: mol_type = other DNA
atgagcctgcacttcctgtactactgcagcgagcccaccctggatgtgaagatcgccttctgccagggctttgacaagcaggtggatgtgtcctacatcgccaagcactacaacatgagcaagagcaaggtggacaaccagttctacagcgtggaggtgggggacagcaccttcaccgtgctgaagcgctaccagaacctgaagcccatcggcagcggggcccagggcatcgtgtgtgccgcctatgatgctgtgctggacagaaatgtggccatcaagaagctgagccggcccttccagaaccagacccacgccaagagggcctaccgggagctggtgctgatgaagtgtgtgaaccacaagtag

SEQ ID NO: 160123 - DNA, 354 bp, synthetic construct
  misc_feature 1..354: note = Description of Artificial Sequence: Synthetic coding sequence
  source 1..354: mol_type = other DNA
atgagcctgcacttcctgtactactgcagcgagcccaccctggatgtgaagatcgccttctgccagggctttgacaagcaggtggatgtgtcctacatcgccaagcactacaacatgagcaagagcaaggtggacaaccagttctacagcgtggaggtgggggacagcaccttcaccgtgctgaagcgctaccagaacctgaagcccatcggcagcggggcccagggcatcgtgtgtgccgcctatgatgctgtgctggacagaaatgtggccatcaagaagctgagccggcccttccagaaccagacccacgccaagagggcctaccgggagctggtgctgatgaagtgctag

SEQ ID NO: 160124 - DNA, 426 bp, synthetic construct
  misc_feature 1..426: note = Description of Artificial Sequence: Synthetic coding sequence
  source 1..426: mol_type = other DNA
atgagcctgcacttcctgtactactgcagcgagcccaccctggatgtgaagatcgccttctgccagggctttgacaagcaggtggatgtgtcctacatcgccaagcactacaacatgagcaagagcaaggtggacaaccagttctacagcgtggaggtgggggacagcaccttcaccgtgctgaagcgctaccagaacctgaagcccatcggcagcggggcccagggcatcgtgtgtgccgcctatgatgctgtgctggacagaaatgtggccatcaagaagctgagccggcccttccagaaccagacccacgccaagagggcctaccgggagctggtgctgatgaagtgtgtgaaccacaagaacatcatcagcctgctgaatgtgttcaccccccagaagaccctggaggagttccaggactag

SEQ ID NO: 160125 - DNA, 255 bp, synthetic construct
  misc_feature 1..255: note = Description of Artificial Sequence: Synthetic coding sequence
  source 1..255: mol_type = other DNA
atgagcaagagcaaggtggacaaccagttctacagcgtggaggtgggggacagcaccttcaccgtgctgaagcgctaccagaacctgaagcccatcggcagcggggcccagggcatcgtgtgtgccgcctatgatgctgtgctggacagaaatgtggccatcaagaagctgagccggcccttccagaaccagacccacgccaagagggcctaccgggagctggtgctgatgaagtgtgtgaaccacaagaactag

SEQ ID NO: 160126 - DNA, 159 bp, synthetic construct
  misc_feature 1..159: note = Description of Artificial Sequence: Synthetic coding sequence
  source 1..159: mol_type = other DNA
atgagcaagagcaaggtggacaaccagttctacagcgtggaggtgggggacagcaccttcaccgtgctgaagcgctaccagaacctgaagcccatcggcagcggggcccagggcatcgtgtgtgccgcctatgatgctgtgctggacagaaatgtgtag

SEQ ID NO: 160127 - DNA, 147 bp, synthetic construct
  misc_feature 1..147: note = Description of Artificial Sequence: Synthetic coding sequence
  source 1..147: mol_type = other DNA
atgagcctgcacttcctgtactactgcagcgagcccaccctggatgtgaagatcgccttctgccagggctttgacaagcaggtggatgtgtcctacatcgccaagcactacaacatgagcaagagcaaggtggacaaccagttctag

SEQ ID NO: 160128 - DNA, 1008 bp, synthetic construct
  misc_feature 1..1008: note = Description of Artificial Sequence: Synthetic coding sequence
  source 1..1008: mol_type = other DNA
tgaaatgtggccatcaagaagctgagccggcccttccagaaccagacccacgccaagagggcctaccgggagctggtgctgatgaagtgtgtgaaccacaagaacatcatcagcctgctgaatgtgttcaccccccagaagaccctggaggagttccaggatgtgtacctggtgatggagctgatggatgccaacctgtgccaggtgatccagatggagctggaccacgagaggatgagctacctgctgtaccagatgctgtgtggcatcaagcacctgcacagcgctggcatcatccaccgggacctgaagcccagcaacatcgtggtgaagagtgactgcaccctgaagatcctggactttggcctggccaggacagctggcaccagcttcatgatgaccccctacgtggtgacccgctactaccgggcccctgaggtgatcctgggcatgggctacaaggaaaatgtggacatgtggagcgtgggctgcatcatgggagagatgatcaagggagctgtgctcttccctggaacagaccacatcgaccagtggaacaaggtgattgagcagctgggcaccccctgcccagagttcatgaagaagctgcagcccaccgtgaggaactacgtggagaaccggcccaagtatgccggcctgaccttccccaagctgttcccagacagcctcttccctgctgacagcgagcacaacaagctgaaggccagccaggcccgggacctgctgagcaagatgctggtgattgatcctgccaagaggatctctgtggatgatgccctgcagcacccctacatcaacgtgtggtatgaccctgctgaggtggaggcccccccaccccagatctatgacaagcagctggatgagcgggagcacaccatcgaggagtggaaggagctgatctacaaggaggtgatgaacagcgaggagaagaccaagaatggagtggtgaagggccagcccagccccagcgcccaggtgcagcagtag

SEQ ID NO: 160129 - DNA, 1764 bp, synthetic construct
  misc_feature 1..1764: note = Description of Artificial Sequence: Synthetic coding sequence
  source 1..1764: mol_type = other DNA
atggccgagaagggggactgcatcgcctctgtgtatggctatgacctgggcggccgctttgtggacttccagcccctgggcttcggcgtgaatggcctggtgctgtctgctgtggacagccgggcctgcaggaaggtggccgtgaagaagatcgccctgagtgatgcccgctccatgaagcacgccctgcgggagatcaagatcatccggcggctggaccatgacaacatcgtgaaggtgtatgaggtgctgggccccaagggcacagacctgcagggcgagctgttcaagttctctgtggcctacatcgtgcaggagtacatggagacagacctggcccggctgctggagcagggcaccctggccgaggagcacgccaagctgttcatgtaccagctgctgcggggcctgaagtacatccacagcgccaacgtgctgcaccgggacctgaagccagccaacatcttcatcagcacagaggacctggtgctgaagatcggggactttggcctggcccgcatcgtggaccagcactacagccacaagggctacctgtctgagggcctggtgaccaagtggtaccgcagcccccggctgctgctgagccccaacaactacaccaaggccatcgacatgtgggccgccggctgcatcctggccgagatgctgaccggccgcatgctgtttgctggggcccacgagctggagcagatgcagctgatcctggagaccatccctgtgatccgggaggaggacaaggatgagctgctgcgggtgatgcccagctttgtgagcagcacctgggaggtgaagaggcccctgaggaagctgctgcctgaggtgaacagcgaggccatcgacttcctggagaagatcctgaccttcaaccccatggaccggctgacagctgagatgggcctgcagcacccctacatgagcccctacagctgcccagaagatgagcccaccagccagcaccccttcagaattgaagatgaaattgatgacatcgtgctgatggccgccaaccagagccagctgagcaactgggacacctgcagcagccgctaccctgtgtccctgagcagtgacctggagtggaggccagaccgctgccaggatgccagcgaggtgcagagggacccccgggccggcagcgcccccctggctgaagatgtgcaggtggaccccaggaaggacagccacagcagcagcgagcgcttcctggagcagagccacagctccatggagcgggcctttgaggccgactatggccgcagctgtgactacaaggtgggcagccccagctacctggacaagctgctgtggagggacaacaagccccaccactacagcgagcccaagctgatcctggacctgagccactggaagcaggccgccggggccccacccacagccaccggcctggccgacacaggagccagagaagatgagcccgccagcctcttcctggagatcgcccagtgggtgaagagcacccagggcggccctgagcacgccagccccccagcagatgatcctgagcggcggctgagcgccagccccccaggccggcctgcccctgtggatggaggagccagcccccagtttgacctggatgtgttcatcagccgggccctgaagctgtgcaccaagccagaggacctgcctgacaacaagctgggggacctgaatggagcctgcatccctgagcaccctggggacctggtgcagacagaggccttcagcaaggagcgctggtag

SEQ ID NO: 160130 - DNA, 1131 bp, synthetic construct
  misc_feature 1..1131: note = Description of Artificial Sequence: Synthetic coding sequence
  source 1..1131: mol_type = other DNA
atgtgggccgccggctgcatcctggccgagatgctgactggaaggatgctgtttgctggggcccacgagctggagcagatgcagctgatcctggagaccatccctgtgatccgggaggaggacaaggatgagctgctgcgggtgatgcccagctttgtgagcagcacctgggaggtgaagaggcccctgaggaagctgctgcctgaggtgaacagcgaggccatcgacttcctggagaagatcctgaccttcaaccccatggaccggctgacagctgagatgggcctgcagcacccctacatgagcccctacagctgcccagaagatgagcccaccagccagcaccccttcagaattgaagatgaaattgatgacatcgtgctgatggccgccaaccagagccagctgagcaactgggacacctgcagcagccgctaccctgtgtccctgagcagtgacctggagtggaggccagaccgctgccaggatgccagcgaggtgcagagggaccccagggctggcagcgcccccctggccgaggatgtgcaggtggaccccaggaaggacagccacagcagcagcgagcgcttcctggagcagagccacagctccatggagcgggcctttgaagctgactatggccgcagctgtgactacaaggtgggcagccccagctacctggacaagctgctgtggagggacaacaagccccaccactacagcgagcccaagctgatcctggacctgagccactggaagcaggccgccggggccccacccacagccaccggcctggccgacaccggggcccgggaggatgagcccgccagcctcttcctggagatcgcccagtgggtgaagagcacccagggcggccctgagcacgccagccccccagcagatgatcctgagcggcggctgagcgccagccccccaggccgcccagcccctgtggatggaggagccagcccccagtttgacctggatgtgttcatcagccgggccctgaagctgtgcaccaagccagaggacctgcctgacaacaagctgggggacctgaatggagcctgcatccctgagcaccctggggacctggtgcagacagaggccttcagcaaggagcgctggtag

SEQ ID NO: 160131 - DNA, 2034 bp, synthetic construct
  misc_feature 1..2034: note = Description of Artificial Sequence: Synthetic coding sequence
  source 1..2034: mol_type = other DNA
atggagagtgacctgcaccagatcatccacagcagccagcccctgaccctggagcacgtgcgctacttcctgtaccagctgctgcggggcctgaagtacatgcacagcgcccaggtgatccaccgggacctgaagcccagcaacctgctggtgaatgaaaactgtgagctgaagattggagactttggcatggcccggggcctgtgcaccagccctgctgagcaccagtacttcatgacagaatatgtggccacccgctggtaccgggcccctgagctgatgctgagcctgcacgagtacacccaggccatcgacctgtggagcgtgggctgcatctttggagagatgctggcccggcggcagctgtttcctgggaagaactacgtgcaccagctgcagctgatcatgatggtgctgggcacccccagccctgctgtgatccaggccgtgggcgctgagcgggtgcgggcctacatccagagcctgcccccccggcagcctgtgccctgggagaccgtgtacccaggagctgaccggcaggccctgagcctgctgggccgcatgctgcgctttgagcccagcgcccgcatctctgctgctgctgccctgcggcaccccttcctggccaagtaccatgaccctgatgatgagccagactgtgcccccccatttgattttgcctttgaccgggaggccctgacccgggagcgcatcaaggaggccatcgtggccgagattgaggacttccacgcccggcgggagggcatccggcagcagatccgcttccagcccagcctgcagcctgtggccagcgagcccggctgcccagatgtggagatgcccagcccctgggcccccagcggggactgtgccatggagagccccccaccagcccccccaccctgccccggccctgccccagacaccatcgacctgaccctgcagcccccacctcctgtgtctgagcccgccccacccaagaaggatggagccatcagtgacaacaccaaggccgccctgaaggccgccctgctgaagagcctgcggagccggctgagagatggccccagcgcccccctggaggcccctgagcccaggaagcctgtgacagcccaggagcggcagcgggagcgggaggagaagagaagaagacggcaggagcgggccaaggagcgggagaagaggcggcaggagcgggagaggaaggagcggggggccggggccagcggcggccccagcacagaccccctggccggcctggtgctgagtgacaatgacaggagcctgctggagcgctggaccaggatggcccggcctgctgccccagccctgacctctgtgcctgccccagccccagcccccacccccacccccacccctgtgcagcccaccagccccccacctggccctgtggcccagcccaccggcccccagccccagagcgctggcagcaccagcggccctgtgccccagcctgcctgccccccacctggccctgccccccaccccaccggccccccaggccccatccctgtgcctgccccaccccagatcgccaccagcaccagcctgctggccgcccagagcctggtgcccccacctggcctgcccggcagcagcaccccaggagtgctgccctacttccccccaggcctgcccccaccagatgctggaggagccccccagagctccatgtctgagagcccagatgtgaacctggtgacccagcagctgagcaagagccaggtggaggaccccctgccccctgtgttcagcggcacccccaagggcagcggggccggctacggcgtgggctttgacctggaggagttcctgaaccagagctttgacatgggcgtggctgatggcccccaggacggccaggccgacagcgccagcctgagcgccagcctgctggccgactggctggagggccacggcatgaacccagctgacatcgagagcctgcagcgggagatccagatggacagccccatgctgctggccgacctgcctgacctgcaggacccctag

SEQ ID NO: 160132 - DNA, 2451 bp, synthetic construct
  misc_feature 1..2451: note = Description of Artificial Sequence: Synthetic coding sequence
  source 1..2451: mol_type = other DNA
atggccgagcccctgaaggaggaggatggagaagatggcagcgctgagcccccaggccctgtgaaggccgagcccgcccacacagctgcctctgtggccgccaagaacctggccctgctgaaggcccggagctttgatgtgacctttgatgtgggagatgaatatgagatcatcgagaccatcggaaatggagcctacggcgtggtgtcctctgcccggcggcggctgaccggccagcaggtggccatcaagaagatccccaatgcctttgatgtggtgaccaatgccaagaggaccctgcgggagctgaagatcctgaagcacttcaagcatgacaacatcatcgccatcaaggacatcctgcggcccaccgtgccctatggagagttcaagtctgtgtatgtggtgctggacctgatggagagtgacctgcaccagatcatccacagcagccagcccctgaccctggagcacgtgcgctacttcctgtaccagctgctgcggggcctgaagtacatgcacagcgcccaggtgatccaccgggacctgaagcccagcaacctgctggtgaatgaaaactgtgagctgaagatcggggactttggcatggcccggggcctgtgcaccagccctgctgagcaccagtacttcatgacagaatatgtggccacccgctggtaccgggcccctgagctgatgctgagcctgcacgagtacacccaggccatcgacctgtggagcgtgggctgcatctttggagagatgctggcccggcggcagctgtttcctgggaagaactacgtgcaccagctgcagctgatcatgatggtgctgggcacccccagccctgctgtgatccaggccgtgggcgctgagcgggtgcgggcctacatccagagcctgcccccccggcagcctgtgccctgggagaccgtgtacccaggagctgaccggcaggccctgagcctgctgggccgcatgctgcgctttgagcccagcgcccgcatctctgctgctgctgccctgcggcaccccttcctggccaagtaccatgaccctgatgatgagccagactgtgcccccccatttgattttgcctttgaccgggaggccctgacccgggagcgcatcaaggaggccatcgtggccgagattgaggacttccacgcccggcgggagggcatccggcagcagatccgcttccagcccagcctgcagcctgtggccagcgagcccggctgcccagatgtggagatgcccagcccctgggcccccagcggggactgtgccatggagagccccccaccagcccccccaccctgccccggccctgccccagacaccatcgacctgaccctgcagcccccacctcctgtgtctgagcccgccccacccaagaaggatggagccatcagtgacaacaccaaggccgccctgaaggccgccctgctgaagagcctgcggagccggctgagagatggccccagcgcccccctggaggcccctgagcccaggaagcctgtgacagcccaggagcggcagcgggagcgggaggagaagagaagaagacggcaggagcgggccaaggagcgggagaagaggcggcaggagcgggagaggaaggagagaggagctggggccagcggcggccccagcacagaccccctggccggcctggtgctgagtgacaatgacaggagcctgctggagcgctggaccaggatggcccggcctgctgccccagccctgacctctgtgcctgccccagccccagcccccacccccacccccacccctgtgcagcccaccagccccccacctggccctgtggcccagcccaccggcccccagccccagagcgctggcagcaccagcggccctgtgccccagcctgcctgccccccacctggccctgccccccaccccactggacctcctggccccatccctgtgcctgccccaccccagatcgccaccagcaccagcctgctggccgcccagagcctggtgcccccacctggcctgcccggcagcagcaccccaggagtgctgccctacttccccccaggcctgcccccaccagatgctgggggcgccccccagagctccatgtctgagagcccagatgtgaacctggtgacccagcagctgagcaagagccaggtggaggaccccctgccccctgtgttttctggcacccccaagggcagcggggccggctatggagtgggctttgacctggaggagttcctgaaccagagctttgacatgggcgtggctgatggcccccaggacggccaggccgacagcgccagcctgagcgccagcctgctggccgactggctggagggccacggcatgaacccagctgacatcgagagcctgcagcgggagatccagatggacagccccatgctgctggccgacctgcctgacctgcaggacccctag

SEQ ID NO: 160133 - DNA, 2451 bp, synthetic construct; identical to SEQ ID NO: 160132
  misc_feature 1..2451: note = Description of Artificial Sequence: Synthetic coding sequence
  source 1..2451: mol_type = other DNA

SEQ ID NO: 160134 - DNA, 2451 bp, synthetic construct; identical to SEQ ID NO: 160132
  misc_feature 1..2451: note = Description of Artificial Sequence: Synthetic coding sequence
  source 1..2451: mol_type = other DNA

SEQ ID NO: 160135 - DNA, 726 bp, synthetic construct
  misc_feature 1..726: note = Description of Artificial Sequence: Synthetic coding sequence
  source 1..726: mol_type = other DNA
atggccgagcccctgaaggaggaggatggagaagatggcagcgctgagcccccaggccctgtgaaggccgagcccgcccacacagctgcctctgtggccgccaagaacctggccctgctgaaggcccggagctttgatgtgacctttgatgtgggagatgaatatgagatcatcgagaccatcggaaatggagcctacggcgtggtgtcctctgcccggcggcggctgaccggccagcaggtggccatcaagaagatccccaatgcctttgatgtggtgaccaatgccaagaggaccctgcgggagctgaagatcctgaagcacttcaagcatgacaacatcatcgccatcaaggacatcctgcggcccaccgtgccctatggagagttcaagtctgtgtatgtggtgctggacctgatggagagtgacctgcaccagatcatccacagcagccagcccctgaccctggagcacgtgcgctacttcctgtaccagctgctgcggggcctgaagtacatgcacagcgcccaggtgatccaccgggacctgaagcccagcaacctgctggtgaatgaaaactgtgagctgaagatcggggactttggcatggcccggggcctgtgcaccagccctgctgagcaccagtacttcatgacagaatatgtggccacccgctggtaccgggcccctgagctgatgctgagcctgcacgagtacacccagtag

SEQ ID NO: 160136 - DNA, 2136 bp, synthetic construct
  misc_feature 1..2136: note = Description of Artificial Sequence: Synthetic coding sequence
  source 1..2136: mol_type = other DNA
atggccgagcgggagagcggcggcctgggcggcggggccgccagccccccagctgccagccccttcctgggcctgcacatcgccagcccccccaacttccggctgacccatgacatcagcctggaggagtttgaagatgaggacctgtctgagatcacagatgaatgtggcatcagcctgcagtgcaaggacaccctgagcctgcggccccccagggctggcctgctgtctgctgggggcggcggggccggcagccggctgcaggccgagatgctgcagatggacctgattgatgccaccggggacaccccaggagcagaagatgatgaagaagatgatgatgaggagcgggccgcccggcggcctggggccggcccccccaaggccgagagcggccaggagcccgccagccggggccagggccagagccagggccagagccagggccctggcagcggggacacctaccggcccaagaggcccaccaccctgaacctcttcccccaggtgcccaggagccaggacaccctgaacaacaacagcctgggcaagaagcacagctggcaggacagagtgagccgcagcagcagccccctgaagacaggagagcagaccccacctcatgagcacatctgcctgagtgatgagctgcccccccagagcggccctgcccccaccacagaccggggcaccagcacagacagcccctgccgccgcagcacagccacccagatggcccctcctgggggccccccagctgcccctcctgggggccggggccacagccaccgggaccgcatccactaccaggctgatgtgcggctggaggccacagaggagatctacctgacccctgtgcagaggcccccagatgctgctgagcccaccagcgccttcctgcccccaacagagagcaggatgtctgtgtccagtgaccctgaccctgctgcctaccccagcacagctggccggccccaccccagcatcagcgaggaggaggagggctttgactgcctgagcagccctgagagagctgagcccccaggcggcggctggaggggcagcctgggggagcccccacctccaccccgggccagcctgagcagtgacaccagcgccctgtcctatgacagcgtgaagtacaccctggtggtggatgagcacgcccagctggagctggtgtccctgcggccctgcttcggggactacagtgatgaaagtgacagcgccaccgtgtatgacaactgtgcctctgtgagcagcccctatgaaagtgccatcggggaggagtatgaggaggccccccggccccagcccccagcctgcctgtctgaggacagcaccccagatgagccagatgtgcacttcagcaagaagttcctgaatgtgttcatgagcggccgcagccgcagcagcagcgctgagagctttggcctcttcagctgcatcatcaatggagaggagcaggagcagacccaccgggccatcttccgctttgtgcccaggcatgaagatgagctggagctggaggtggatgaccccctgctggtggagctgcaggccgaggactactggtatgaggcctacaacatgaggactggagcccggggcgtcttccctgcctactatgccatcgaggtgaccaaggagcctgagcacatggccgccctggccaagaacagcgactgggtggaccagttccgggtgaagttcctgggctctgtgcaggtgccctaccacaagggaaatgatgtgctgtgtgccgccatgcagaagatcgccaccacccggcggctgactgtgcacttcaacccccccagcagctgtgtgctggagatctctgtgcggggcgtgaagattggagtgaaggcagatgacagccaggaggccaagggcaacaagtgcagccacttcttccagctgaagaacatctccttctgtggctaccaccccaagaacaacaagtacttcggcttcatcaccaagcaccctgctgaccacagatttgcctgccacgtgtttgtgtctgaggacagcaccaaggccctggccgagagcgtgggccgggccttccagcagttctacaagcagtttgtggagtacacctgccccacagaggacatctacctggagtag

SEQ ID NO: 160137 - DNA, 1797 bp, synthetic construct
  misc_feature 1..1797: note = Description of Artificial Sequence: Synthetic coding sequence
  source 1..1797: mol_type = other DNA
atgctgcctgacttccccagccccagcacctgggcccctggcctgctgctgcccagcggccctgccctgctgagccccagcgtgctgcaggacagcctgagcctgggccgctctgagcagccccaccccatctgcagcttccaggatgacttccaggagtttgagatgattgatgacaatgaggaggaggatgatgaagatgaggaggaggaggaggaggaggaggagggagatggagagggccaggagggcggggaccccggcagcgaggccccagcccctggccccctcatccccagccccagcgtggaggagccccacaagcaccggcccaccaccctgcggctgaccaccctgggcgcccaggacagccaggaccctgaggccgctgctggccctggaggagtggagctggtggacatggagaccctgaaccccacccgggacaccatcacccccctgtgggccgcccctggccgggccgcccggcccggccgggcctgcagcgctgcctgcagcgaggaggaggatgaagaagatgatgaggaggaggaggatgctgaggacagcgctggcagccctgggggccggggcaccggccccagcgcccccagagatgccagcctggtgtatgatgctgtgaagtacaccctggtggtggatgagcacacccagctggagctggtgtccctgcggcgctgtgccggcctgggccatgattctgaagaagattctggaggagaggccagcgaggaggaggccggggccgccctgctgggcggcggccaggtgtctggggacaccagcccagacagcccagacctgaccttcagcaagaagttcctgaatgtgtttgtgaacagcaccagccgcagcagcagcacagagagctttggcctcttcagctgcctggtgaatggagaggagcgggagcagacccacagagctgtgttccgcttcatccccaggcacccagatgagctggagctggatgtggatgatcctgtgctggtggaggccgaggaggatgacttctggttccggggcttcaacatgaggactggagagcggggcgtcttccctgccttctacgcccatgctgtgcccggccctgccaaggacctgctgggcagcaagaggagcccctgctgggtggagagatttgatgtgcagttcctgggctctgtggaggtgccctgccaccagggcaatggcatcctgtgtgccgccatgcagaagatcgccacagccaggaagctgactgtgcacctgcggcccccagccagctgtgacctggagatcagcctgcggggcgtgaagctgagcctgagcggcggcggccctgagttccagcgctgcagccacttcttccagatgaagaacatctccttctgtggctgccaccccaggaacagctgtgaggccccccagggcgccgccttccagtgggagcggggcgtggacaggaagagggtgctgcagaccagaggaaatgtgcagccccacctgggcgccggccagggcgccgccctgaacagagccacagagggcagcagcacaggcagcgagaagggggagtggacccccctggtgatcatggagctgacccagagcgtgaacagctgctacttcggcttcatcaccaagcaccccctgctgagcagatttgcctgccacgtgtttgtgtcccaggagagcatgaggcctgtggcccagagcgtgggccgggccttcctggagtactaccaggagcacctggcctatgcctgccccacagaggacatctacctggagtag

SEQ ID NO: 160138 - DNA, 2472 bp, synthetic construct
  misc_feature 1..2472: note = Description of Artificial Sequence: Synthetic coding sequence
  source 1..2472: mol_type = other DNA
atggctgacagagctgagatgttcagcctgagcaccttccacagcctgagccccccaggctgcaggcctccccaggacatcagcctggaggagtttgatgatgaggacctgtctgagatcacagatgactgtggcctgggcctgtcctatgacagcgaccactgtgagaaggacagcctgagcctgggccgctctgagcagccccaccccatctgcagcttccaggatgacttccaggagtttgagatgattgatgacaatgaggaggaggatgatgaagatgaggaggaggaggaggaggaggaggagggagatggagagggccaggagggcggggaccccggcagcgaggccccagcccctggccccctcatccccagccccagcgtggaggagccccacaagcaccggcccaccaccctgcggctgaccaccctgggcgcccaggacagcctgaacaacaatggaggctttgacctggtgcggcctgcctcctggcaggagacagccctgtgcagccctgcccctgaggccctgcgggagctgcccggccccctgcctgccacagacaccggccctggaggagcccagagccctgtgcggcccggctgtgactgtgagggcaacagacctgctgagcccccagcccctgggggcaccagccccagcagtgaccccggcatcgaggccgacctgcggagccgcagcagcggcggccggggcggcagaagaagcagccaggagctgagcagccctggcagtgacagtgaagatgctgggggccgcctgggccgcatgatcagcagcatcagcgagacagagctggagctgagcagtgatggcggcagcagcagcagcggccgcagcagccacctgaccaacagcattgaggaggccagcagccctgccagcgagcctgagcccccccgggagcccccccggcggcctgccttcctgcctgtgggcccagatgacaccaacagtgaatatgagagcggcagcgagagcgagccagacctgtctgaagatgctgacagcccctggctgctgagcaacctggtgtccaggatgatcagcgagggcagcagccccatccgctgccccggccagtgcctgagccctgccccccggcccccaggagagcctgtgtccccagctgggggcgccgcccaggacagccaggaccctgaggccgccgccggccctgggggcgtggagctggtggacatggagaccctgtgtgcccctcctcctccagccccagctgccccccggcccggccctgcccagcccggcccctgcctcttcctgagcaaccccacccgggacaccatcacccccctgtgggccgcccctggccgggccgcccggcccggccgggcctgcagcgctgcctgcagcgaggaggaggatgaagaagatgatgaggaggaggaggatgctgaggacagcgctggcagccctgggggccggggcaccggccccagcgcccccagagatgccagcctggtgtatgatgctgtgaagtacaccctggtggtggatgagcacacccagctggagctggtgtccctgcggcgctgtgccggcctgggccatgattctgaagaagattctggaggagaggccagcgaggaggaggccggggccgccctgctgggcggcggccaggtgtctggggacaccagcccagacagcccagacctgaccttcagcaagaagttcctgaatgtgtttgtgaacagcaccagccgcagcagcagcacagagagctttggcctcttcagctgcctggtgaatggagaggagcgggagcagacccacagagctgtgttccgcttcatccccaggcacccagatgagctggagctggatgtggatgatcctgtgctggtggaggccgaggaggatgacttctggttccggggcttcaacatgaggactggagagcggggcgtcttccctgccttctacgcccatgctgtgcccggccctgccaaggacctgctgggcagcaagaggagcccctgctgggtggagagatttgatgtgcagttcctgggctctgtggaggtgccctgccaccagggcaatggcatcctgtgtgccgccatgcagaagatcgccacagccaggaagctgactgtgcacctgcggcccccagccagctgtgacctggagatcagcctgcggggcgtgaagctgagcctgagcggcggcggccctgagttccagcgctgcagccacttcttccagatgaagaacatctccttctgtggctgccaccccaggaacagctgctacttcggcttcatcaccaagcaccccctgctgagcagatttgcctgccacgtgtttgtgtcccaggagagcatgaggcctgtggcccagagcgtgggccgggccttcctggagtactaccaggagcacctggcctatgcctgccccacagaggacatctacctggagtag

SEQ ID NO: 160139 - DNA, 1335 bp, synthetic construct
  misc_feature 1..1335: note = Description of Artificial Sequence: Synthetic coding sequence
  source 1..1335: mol_type = other DNA
atggctgacagagctgagatgttcagcctgagcaccttccacagcctgagccccccaggctgcaggcctccccaggacatcagcctggaggagtttgatgatgaggacctgtctgagatcacagatgactgtggcctgggcctgtcctatgacagcgaccactgtgagaaggacagcctgagcctgggccgctctgagcagccccaccccatctgcagcttccaggatgacttccaggagtttgagatgattgatgacaatgaggaggaggaggatgaggaggatgatgaggaggaggaggatgctgaagattctgctggcagccctgggggccggggcaccggccccagcgcccccagagatgccagcctggtgtatgatgctgtgaagtacaccctggtggtggatgagcacacccagctggagctggtgtccctgcggcgctgtgccggcctgggccatgacagcgaggaggacagcggcggggaggccagcgaggaggaggccggggccgccctgctgggcggcggccaggtgtctggggacaccagcccagacagcccagacctgaccttcagcaagaagttcctgaatgtgtttgtgaacagcaccagccgcagcagcagcacagagagctttggcctcttcagctgcctggtgaatggagaggagcgggagcagacccacagagctgtgttccgcttcatccccaggcacccagatgagctggagctggatgtggatgatcctgtgctggtggaggccgaggaggatgacttctggttccggggcttcaacatgaggactggagagcggggcgtcttccctgccttctacgcccatgctgtgcccggccctgccaaggacctgctgggcagcaagaggagcccctgctgggtggagagatttgatgtgcagttcctgggctctgtggaggtgccctgccaccagggcaatggcatcctgtgtgccgccatgcagaagatcgccacagccaggaagctgactgtgcacctgcggcccccagccagctgtgacctggagatcagcctgcggggcgtgaagctgagcctgagcggcggcggccctgagttccagcgctgcagccacttcttccagatgaagaacatctccttctgtggctgccaccccaggaacagctgctacttcggcttcatcaccaagcaccccctgctgagcagatttgcctgccacgtgtttgtgtcccaggagagcatgaggcctgtggcccagagcgtgggccgggccttcctggagtactaccaggagcacctggcctatgcctgccccacagaggacatctacctggagtag

SEQ ID NO: 160140 - DNA, 1677 bp, synthetic construct
  misc_feature 1..1677: note = Description of Artificial Sequence: Synthetic coding sequence
  source 1..1677: mol_type = other DNA
atgatcagcagcatcagcgagacagagctggagctgagcagtgatggcggcagcagcagcagcggccgcagcagccacctgaccaacagcattgaggaggccagcagccctgccagcgagcctgagcccccccgggagcccccaagaagacctgccttcctgcctgtgggcccagatgacaccaacagtgaatatgaaagtggcagcgagagcgagccagacctgtctgaagatgctgacagcccctggctgctgagcaacctggtgtccaggatgatcagcgagggcagcagccccatccgctgccccggccagtgcctgagccctgcccccaggcctcctggagagcctgtgtccccagctggaggagctgcccaggacagccaggaccctgaggccgctgctggccctggaggagtggagctggtggacatggagaccctgtgtgcccctcctcctccagccccagctgcccccaggcctggccctgcccagcccggcccctgcctcttcctgagcaaccccacccgggacaccatcacccccctgtgggccgcccctggccgggccgcccggcccggccgggcctgcagcgctgcctgcagcgaggaggaggatgaggaggatgatgaggaggaggaggatgctgaagattctgctggcagccctgggggccggggcaccggccccagcgcccccagagatgccagcctggtgtatgatgctgtgaagtacaccctggtggtggatgagcacacccagctggagctggtgtccctgcggcgctgtgccggcctgggccatgacagcgaggaggacagcggcggggaggccagcgaggaggaggccggggccgccctgctgggcggcggccaggtgtctggggacaccagcccagacagcccagacctgaccttcagcaagaagttcctgaatgtgtttgtgaacagcaccagccgcagcagcagcacagagagctttggcctcttcagctgcctggtgaatggagaggagcgggagcagacccacagagctgtgttccgcttcatccccaggcacccagatgagctggagctggatgtggatgatcctgtgctggtggaggccgaggaggatgacttctggttccggggcttcaacatgaggactggagagcggggcgtcttccctgccttctacgcccatgctgtgcccggccctgccaaggacctgctgggcagcaagaggagcccctgctgggtggagagatttgatgtgcagttcctgggctctgtggaggtgccctgccaccagggcaatggcatcctgtgtgccgccatgcagaagatcgccacagccaggaagctgactgtgcacctgcggcccccagccagctgtgacctggagatcagcctgcggggcgtgaagctgagcctgagcggcggcggccctgagttccagcgctgcagccacttcttccagatgaagaacatctccttctgtggctgccaccccaggaacagctgctacttcggcttcatcaccaagcaccccctgctgagcagatttgcctgccacgtgtttgtgtcccaggagagcatgaggcctgtggcccagagcgtgggccgggccttcctggagtactaccaggagcacctggcctatgcctgccccacagaggacatctacctggagtag

SEQ ID NO: 160141 - DNA, 1677 bp, synthetic construct; identical to SEQ ID NO: 160140
  misc_feature 1..1677: note = Description of Artificial Sequence: Synthetic coding sequence
  source 1..1677: mol_type = other DNA

SEQ ID NO: 160142 - DNA, 1641 bp, synthetic construct
  misc_feature 1..1641: note = Description of Artificial Sequence: Synthetic coding sequence
  source 1..1641: mol_type = other DNA
atggctgacagagctgagatgttcagcctgagcaccttccacagcctgagccccccaggctgcaggcctccccaggacatcagcctggaggagtttgatgatgaggacctgtctgagatcacagatgactgtggcctgggcctgtcctatgacagcgaccactgtgagaaggacagcctgagcctgggccgctctgagcagccccaccccatctgcagcttccaggatgacttccaggagtttgagatgattgatgacaatgaggaggaggatgatgaagatgaggaggaggaggaggaggaggaggagggagatggagagggccaggagggcggggaccccggcagcgaggccccagcccctggccccctcatccccagccccagcgtggaggagccccacaagcaccggcccaccaccctgcggctgaccaccctgggcgcccaggacagcctgaacaacaatggaggctttgacctggtgcggcctgcctcctggcaggagacagccctgtgcagccctgcccctgaggccctgcgggagctgcccggccccctgcctgccacagacaccggccctggaggagcccagagccctgtgcggcccggctgtgactgtgagggcaacagacctgctgagcccccagcccctgggggcaccagccccagcagtgaccccggcatcgaggccgacctgcggagccgcagcagcggcggccggggcggcagaagaagcagccaggagctgagcagccctggcagtgacagtgaagatgctgggggccgcctgggccgcatgatcagcagcatcagcgagacagagctggagctgagcagtgatggcggcagcagcagcagcggccgcagcagccacctgaccttcagcaagaagttcctgaatgtgtttgtgaacagcaccagccgcagcagcagcacagagagctttggcctcttcagctgcctggtgaatggagaggagcgggagcagacccacagagctgtgttccgcttcatccccaggcacccagatgagctggagctggatgtggatgatcctgtgctggtggaggccgaggaggatgacttctggttccggggcttcaacatgaggactggagagcggggcgtcttccctgccttctacgcccatgctgtgcccggccctgccaaggacctgctgggcagcaagaggagcccctgctgggtggagagatttgatgtgcagttcctgggctctgtggaggtgccctgccaccagggcaatggcatcctgtgtgccgccatgcagaagatcgccacagccaggaagctgactgtgcacctgcggcccccagccagctgtgacctggagatcagcctgcggggcgtgaagctgagcctgagcggcggcggccctgagttccagcgctgcagccacttcttccagatgaagaacatctccttctgtggctgccaccccaggaacagctgctacttcggcttcatcaccaagcaccccctgctgagcagatttgcctgccacgtgtttgtgtcccaggagagcatgaggcctgtggcccagagcgtgggccgggccttcctggagtactaccaggagcacctggcctatgcctgccccacagaggacatctacctggagtag

SEQ ID NO: 160143 - DNA, 1149 bp, synthetic construct
  misc_feature 1..1149: note = Description of Artificial Sequence: Synthetic coding sequence
  source 1..1149: mol_type = other DNA
atgtctgacagcaaatgtgacagccagttctacagcgtgcaggtggccgacagcaccttcaccgtgctgaagcgctaccagcagctgaagcccatcggcagcggggcccagggcatcgtgtgtgccgcctttgacacagtgctgggcatcaacgtggccgtgaagaagctgagccggcccttccagaaccagacccacgccaagagggcctaccgggagctggtgctgctgaagtgtgtgaaccacaagaacatcatcagcctgctgaatgtgttcaccccccagaagaccctggaggagttccaggatgtgtacctggtgatggagctgatggatgccaacctgtgccaggtgatccacatggagctggaccacgagaggatgagctacctgctgtaccagatgctgtgtggcatcaagcacctgcacagcgctggcatcatccaccgggacctgaagcccagcaacatcgtggtgaagagtgactgcaccctgaagatcctggactttggcctggccaggacagcctgcaccaacttcatgatgaccccctacgtggtgacccgctactaccgggcccctgaggtgatcctgggcatgggctacaaggaaaatgtggacatctggagcgtgggctgcatcatggccgagatggtgctgcacaaggtgctcttccctggccgggactacatcgaccagtggaacaaggtgattgagcagctgggcaccccatctgctgagttcatgaagaagctgcagcccaccgtgagaaattatgtggagaaccggcccaagtacccaggcatcaagtttgaggagctgttcccagactggatcttccccagcgagagcgagcgggacaagatcaagaccagccaggcccgggacctgctgagcaagatgctggtgattgatcctgacaagaggatctctgtggatgaggccctgcggcacccctacatcaccgtgtggtatgaccctgctgaggccgaggcccccccaccccagatctatgatgcccagctggaggagcgggagcacgccatcgaggagtggaaggagctgatctacaaggaggtgatggactgggaggagaggagcaagaatggagtggtgaaggaccagcccagcgcccagatgcagcagtag

SEQ ID NO: 160144 - DNA, 1149 bp, synthetic construct
  misc_feature 1..1149: note = Description of Artificial Sequence: Synthetic coding sequence
  source 1..1149: mol_type = other DNA
atgtctgacagcaaatgtgacagccagttctacagcgtgcaggtggccgacagcaccttcaccgtgctgaagcgctaccagcagctgaagcccatcggcagcggggcccagggcatcgtgtgtgccgcctttgacacagtgctgggcatcaacgtggccgtgaagaagctgagccggcccttccagaaccagacccacgccaagagggcctaccgggagctggtgctgctgaagtgtgtgaaccacaagaacatcatcagcctgctgaatgtgttcaccccccagaagaccctggaggagttccaggatgtgtacctggtgatggagctgatggatgccaacctgtgccaggtgatccacatggagctggaccacgagaggatgagctacctgctgtaccagatgctgtgtggcatcaagcacctgcacagcgctggcatcatccaccgggacctgaagcccagcaacatcgtggtgaagagtgactgcaccctgaagatcctggactttggcctggccaggacagcctgcaccaacttcatgatgaccccctacgtggtgacccgctactaccgggcccctgaggtgatcctgggcatgggctacaaggaaaatgtggacatctggagcgtgggctgcatcatgggagagctggtgaagggctgcgtcatcttccagggcacagaccacatcgaccagtggaacaaggtgattgagcagctgggcaccccatctgctgagttcatgaagaagctgcagcccaccgtgagaaattatgtggagaaccggcccaagtacccaggcatcaagtttgaggagctgttcccagactggatcttccccagcgagagcgagcgggacaagatcaagaccagccaggcccgggacctgctgagcaagatgctggtgattgatcctgacaagaggatctctgtggatgaggccctgcggcacccctacatcaccgtgtggtatgaccctgctgaggccgaggcccccccaccccagatctatgatgcccagctggaggagcgggagcacgccatcgaggagtggaaggagctgatctacaaggaggtgatggactgggaggagaggagcaagaatggagtggtgaaggaccagcccagcgcccagatgcagcagtag

SEQ ID NO: 160145 - DNA, 375 bp, synthetic construct
  misc_feature 1..375: note = Description of Artificial Sequence: Synthetic coding sequence
  source 1..375: mol_type = other DNA
atgtctgacagcaaatgtgacagccagttctacagcgtgcaggtggccgacagcaccttcaccgtgctgaagcgctaccagcagctgaagcccatcggcagcggggcccagggcatcgtgtggaggcaccactgcagcgccctgcccttcatcggccgcatgaggcctgtgtctgtcatcgtgaccccctggatcaaccaggagggcatgctgtgtgagggcctgggctggcccagcctgccctggtgcctgaccagcacagtgtgcccagcccagaatgtgcgcatcgtgtccctgaccctgaatgtgtccctgctgcacggcaagacagtgtccagaagaagcatcaccggccagctgaagtgctgcatctag

SEQ ID NO: 160146 - DNA, 729 bp, synthetic construct
  misc_feature 1..729: note = Description of Artificial Sequence: Synthetic coding sequence
  source 1..729: mol_type = other DNA
atgtctgacagcaaatgtgacagccagttctacagcgtgcaggtggccgacagcaccttcaccgtgctgaagcgctaccagcagctgaagcccatcggcagcggggcccagggcatcgtgtgtgccgcctttgacacagtgctgggcatcaacgtggccgtgaagaagctgagccggcccttccagaaccagacccacgccaagagggcctaccgggagctggtgctgctgaagtgtgtgaaccacaagaacatcatcagcctgctgaatgtgttcaccccccagaagaccctggaggagttccaggatgtgtacctggtgatggagctgatggatgccaacctgtgccaggtgatccacatggagctggaccacgagaggatgagctacctgctgtaccagatgctgtgtggcatcaagcacctgcacagcgctggcatcatccaccgggacctgaagcccagcaacatcgtggtgaagagtgactgcaccctgaagatcctggactttggcctggccaggacagcctgcaccaacttcatgatgaccccctacgtggtgacccgctactaccgggcccctgaggtgatcctgggcatgggctacaaggaaaatgtggacatctggagcgtgggctgcatcatgggagagctggtgaagggctgcgtcatcttccagggcacagaccgcatcctgccccgggacctgggccctgccatgctgtcctag

SEQ ID NO: 160147 - DNA, 1275 bp, synthetic construct
  misc_feature 1..1275: note = Description of Artificial Sequence: Synthetic coding sequence
  source 1..1275: mol_type = other DNA
atgtctgacagcaaatgtgacagccagttctacagcgtgcaggtggccgacagcaccttcaccgtgctgaagcgctaccagcagctgaagcccatcggcagcggggcccagggcatcgtgtgtgccgcctttgacacagtgctgggcatcaacgtggccgtgaagaagctgagccggcccttccagaaccagacccacgccaagagggcctaccgggagctggtgctgctgaagtgtgtgaaccacaagaacatcatcagcctgctgaatgtgttcaccccccagaagaccctggaggagttccaggatgtgtacctggtgatggagctgatggatgccaacctgtgccaggtgatccacatggagctggaccacgagaggatgagctacctgctgtaccagatgctgtgtggcatcaagcacctgcacagcgctggcatcatccaccgggacctgaagcccagcaacatcgtggtgaagagtgactgcaccctgaagatcctggactttggcctggccaggacagcctgcaccaacttcatgatgaccccctacgtggtgacccgctactaccgggcccctgaggtgatcctgggcatgggctacaaggaaaatgtggacatctggagcgtgggctgcatcatgggagagctggtgaagggctgcgtcatcttccagggcacagaccacatcgaccagtggaacaaggtgattgagcagctgggcaccccatctgctgagttcatgaagaagctgcagcccaccgtgagaaattatgtggagaaccggcccaagtacccaggcatcaagtttgaggagctgttcccagactggatcttccccagcgagagcgagcgggacaagatcaagaccagccaggcccgggacctgctgagcaagatgctggtgattgatcctgacaagaggatctctgtggatgaggccctgcggcacccctacatcaccgtgtggtatgaccctgctgaggccgaggcccccccaccccagatctatgatgcccagctggaggagcgggagcacgccatcgaggagtggaaggagctgatctacaaggaggtgatggactgggaggagaggagcaagaatggagtggtgaaggaccagcccagtgatgctgctgtgagcagcaatgccacccccagccagagcagcagcatcaatgacatcagctccatgagcacagagcagaccctggccagtgacacagacagcagcctggatgccagcacaggccccctggagggctgcaggtag

SEQ ID NO: 160148 - DNA, 1275 bp, synthetic construct
  misc_feature 1..1275: note = Description of Artificial Sequence: Synthetic coding sequence
  source 1..1275: mol_type = other DNA
atgtctgacagcaaatgtgacagccagttctacagcgtgcaggtggccgacagcaccttcaccgtgctgaagcgctaccagcagctgaagcccatcggcagcggggcccagggcatcgtgtgtgccgcctttgacacagtgctgggcatcaacgtggccgtgaagaagctgagccggcccttccagaaccagacccacgccaagagggcctaccgggagctggtgctgctgaagtgtgtgaaccacaagaacatcatcagcctgctgaatgtgttcaccccccagaagaccctggaggagttccaggatgtgtacctggtgatggagctgatggatgccaacctgtgccaggtgatccacatggagctggaccacgagaggatgagctacctgctgtaccagatgctgtgtggcatcaagcacctgcacagcgctggcatcatccaccgggacctgaagcccagcaacatcgtggtgaagagtgactgcaccctgaagatcctggactttggcctggccaggacagcctgcaccaacttcatgatgaccccctacgtggtgacccgctactaccgggcccctgaggtgatcctgggcatgggctacaaggaaaatgtggacatctggagcgtgggctgcatcatggccgagatggtgctgcacaaggtgctcttccctggccgggactacatcgaccagtggaacaaggtgattgagcagctgggcaccccatctgctgagttcatgaagaagctgcagcccaccgtgagaaattatgtggagaaccggcccaagtacccaggcatcaagtttgaggagctgttcccagactggatcttccccagcgagagcgagcgggacaagatcaagaccagccaggcccgggacctgctgagcaagatgctggtgattgatcctgacaagaggatctctgtggatgaggccctgcggcacccctacatcaccgtgtggtatgaccctgctgaggccgaggcccccccaccccagatctatgatgcccagctggaggagcgggagcacgccatcgaggagtggaaggagctgatctacaaggaggtgatggactgggaggagaggagcaagaatggagtggtgaaggaccagcccagtgatgctgctgtgagcagcaatgccacccccagccagagcagcagcatcaatgacatcagctccatgagcacagagcagaccctggccagtgacacagacagcagcctggatgccagcacaggccccctggagggctgcaggtag

SEQ ID NO: 160149 - DNA, 315 bp, synthetic construct
  misc_feature 1..315: note = Description of Artificial Sequence: Synthetic coding sequence
  source 1..315: mol_type = other DNA
atgtctgacagcaaatgtgacagccagttctacagcgtgcaggtggccgacagcaccttcaccgtgctgaagcgctaccagcagctgaagcccatcggcagcggggcccagggcatcgtgtgtgccgcctttgacacagtgctgggcatcaacgtggccgtgaagaagctgagccggcccttccagaaccagacccacgccaagagggcctaccgggagctggtgctgctgaagtgtgtgaaccacaagaacatcatcagcctgctgaatgtgttcaccccccagaagaccctggaggagttccaggatgtgtag

SEQ ID NO: 160150 - DNA, 645 bp, synthetic construct
  misc_feature 1..645: note = Description of Artificial Sequence: Synthetic coding sequence
  source 1..645: mol_type = other DNA
atgtctgacagcaaatgtgacagccagttctacagcgtgcaggtggccgacagcaccttcaccgtgctgaagcgctaccagcagctgaagcccatcggcagcggggcccagggcatcgtgtgtgccgcctttgacacagtgctgggcatcaacgtggccgtgaagaagctgagccggcccttccagaaccagacccacgccaagagggcctaccgggagctggtgctgctgaagtgtgtgaaccacaagaacatcatcagcctgctgaatgtgttcaccccccagaagaccctggaggagttccaggatgtgtacctggtgatggagctgatggatgccaacctgtgccaggtgatccacatggagctggaccacgagaggatgagctacctgctgtaccagatgctgtgtggcatcaagcacctgcacagcgctggcatcatccaccgggacctgaagcccagcaacatcgtggtgaagagtgactgcaccctgaagatcctggactttggcctggccaggacagcctgcaccaacttcatgatgaccccctacgtggtgacccgctactaccgggcccctgaggtgatcctgggcatgggctacaaggaaaatgccatcaagtactggaccctgtggcactag

SEQ ID NO: 160151 - DNA, 1347 bp, synthetic construct
  misc_feature 1..1347: note = Description of Artificial Sequence: Synthetic coding sequence
  source 1..1347: mol_type = other DNA
atgctgtggctggccctgggccccttccctgccatggagaaccaggtgctggtgatccgcatcaagatccccaacagcggggctgtggactggacagtgcacagcggcccccagctgctcttcagagatgtgctggatgtgattggccaggtgctgcctgaggccaccaccacagcctttgaatatgaagatgaagatggagaccgcatcaccgtgcggagtgatgaggagatgaaggccatgctgagctactactacagcacagtgatggagcagcaggtgaatggccagctgattgagcccctgcagatcttcccccgggcctgcaagcccccaggagagaggaacatccacggcctgaaggtgaacacccgggccggccccagccagcacagcagccctgctgtgtctgacagcctgcccagcaacagcctgaagaagagcagcgctgagctgaagaagatcctggccaacggccagatgaatgagcaggacatccgctacagagacaccctgggccacggcaatggaggcaccgtgtacaaggcctaccacgtgcccagcggcaagatcctggccgtgaaggtgatcctgctggacatcaccctggagctgcagaagcagatcatgtctgagctggagatcctgtacaagtgtgacagcagctacatcatcggcttctacggggccttctttgtggagaaccgcatcagcatctgcacagagttcatggatggcggcagcctggatgtgtacaggaagatgcctgagcacgtgctgggcagaattgctgtggccgtggtgaagggcctgacctacctgtggagcctgaagatcctgcacagagatgtgaagcccagcaacatgctggtgaacacccggggccaggtgaagctgtgtgactttggagtgtccacccagctggtgaacagcatcgccaagacctacgtgggcaccaatgcctacatggcccctgagcgcatctctggagagcagtatggcatccacagtgatgtgtggagcctgggcatctccttcatggagctggccctgggccgcttcccctacccccagatccagaagaaccagggcagcctgatgcccctgcagctgctgcagtgcatcgtggatgaggacagccctgtgctgcctgtgggggagttcagcgagccctttgtgcacttcatcacccagtgcatgaggaagcagcccaaggagaggcctgcccctgaggagctgatgggccaccccttcatcgtgcagttcaatgatggaaatgctgctgtggtgtccatgtgggtgtgccgggccctggaggagaggaggagccagcagggccccccatag

SEQ ID NO: 160152 - DNA, 1317 bp, synthetic construct
  misc_feature 1..1317: note = Description of Artificial Sequence: Synthetic coding sequence
  source 1..1317: mol_type = other DNA
atgctgtggctggccctgggccccttccctgccatggagaaccaggtgctggtgatccgcatcaagatccccaacagcggggctgtggactggacagtgcacagcggcccccagctgctcttcagagatgtgctggatgtgattggccaggtgctgcctgaggccaccaccacagcctttgaatatgaagatgaagatggagaccgcatcaccgtgcggagtgatgaggagatgaaggccatgctgagctactactacagcacagtgatggagcagcaggtgaatggccagctgattgagcccctgcagatcttcccccgggcctgcaagcccccaggagagaggaacatccacggcctgaaggtgaacacccgggccggccccagccagcacagcagccctgctgtgtctgacagcctgcccagcaacagcctgaagaagagcagcgctgagctgaagaagatcctggccaacggccagatgaatgagcaggacatccgctacagagacaccctgggccacggcaatggaggcaccgtgtacaaggcctaccacgtgcccagcggcaagatcctggccgtgaaggtgatcctgctggacatcaccctggagctgcagaagcagatcatgtctgagctggagatcctgtacaagtgtgacagcagctacatcatcggcttctacggggccttctttgtggagaaccgcatcagcatctgcacagagttcatggatggcggcagcctggatgtgtacaggaagatgcctgagcacgtgctgggcagaattgctgtggccgtggtgaagggcctgacctacctgtggagcctgaagatcctgcacagagatgtgaagcccagcaacatgctggtgaacacccggggccaggtgaagctgtgtgactttggagtgtccacccagctggtgaacagcatcgccaagacctacgtgggcaccaatgcctacatggcccctgagcgcatctctggagagcagtatggcatccacagtgatgtgtggagcctgggcatctccttcatggagatccagaagaaccagggcagcctgatgcccctgcagctgctgcagtgcatcgtggatgaggacagccctgtgctgcctgtgggggagttcagcgagccctttgtgcacttcatcacccagtgcatgaggaagcagcccaaggagaggcctgcccctgaggagctgatgggccaccccttcatcgtgcagttcaatgatggaaatgctgctgtggtgtccatgtgggtgtgccgggccctggaggagaggaggagccagcagggccccccatag

SEQ ID NO: 160153 - DNA, 1335 bp, synthetic construct
  misc_feature 1..1335: note = Description of Artificial Sequence: Synthetic coding sequence
  source 1..1335: mol_type = other DNA
atgctgtggctggccctgggccccttccctgccatggagaaccaggtgctggtgatccgcatcaagatccccaacagcggggctgtggactggacagtgcacagcggcccccagctgctcttcagagatgtgctggatgtgattggccaggtgctgcctgaggccaccaccacagcctttgaatatgaagatgaagatggagaccgcatcaccgtgcggagtgatgaggagatgaaggccatgctgagctactactacagcacagtgatggagcagcaggtgaatggccagctgattgagcccctgcagatcttcccccgggcctgcaagcccccaggagagaggaacatccacggcctgaaggtgaacacccgggccggccccagccagcacagcagccctgctgtgtctgacagcctgcccagcaacagcctgaagaagagcagcgctgagctgaagaagatcctggccaacggccagatgaatgagcaggacatccgctacagagacaccctgggccacggcaatggaggcaccgtgtacaaggcctaccacgtgcccagcggcaagatcctggccgtgaaggtgatcctgctggacatcaccctggagctgcagaagcagatcatgtctgagctggagatcctgtacaagtgtgacagcagctacatcatcggcttctacggggccttctttgtggagaaccgcatcagcatctgcacagagttcatggatggcggcagcctggatgtgtacaggaagatgcctgagcacgtgctgggcagaattgctgtggccgtggtgaagggcctgacctacctgtggagcctgaagatcctgcacagagatgtgaagcccagcaacatgctggtgaacacccggggccaggtgaagctgtgtgactttggagtgtccacccagctggtgaacagcatcgccaagacctacgtgggcaccaatgcctacatggcccctgagcgcatctctggagagcagtatggcatccacagtgatgtgtggagcctgggcatctccttcatggagatccagaagaaccagggcagcctgatgcccctgcagctgctgcagtgcatcgtggatgaggacagccctgtgctgcctgtgggggagttcagcgagccctttgtgcacttcatcacccagtgcatgaggaagcagcccaaggagaggcctgcccctgaggagctgatgggccaccccttcatcgtgcagttcaatgatggaaatgctgctgtggtgtccatgtgggtgtgccgggccctggaggagaggaggagccctgccagcctgcccagccccagcagcagcatctag

SEQ ID NO: 160154 - DNA, 1239 bp, synthetic construct
  misc_feature 1..1239: note = Description of Artificial Sequence: Synthetic coding sequence
  source 1..1239: mol_type = other DNA
atgatggagggccacttcccccagagtgatgtgattggccaggtgctgcctgaggccaccaccacagcctttgaatatgaagatgaagatggagaccgcatcaccgtgcggagtgatgaggagatgaaggccatgctgagctactactacagcacagtgatggagcagcaggtgaatggccagctgattgagcccctgcagatcttcccccgggcctgcaagcccccaggagagaggaacatccacggcctgaaggtgaacacccgggccggccccagccagcacagcagccctgctgtgtctgacagcctgcccagcaacagcctgaagaagagcagcgctgagctgaagaagatcctggccaacggccagatgaatgagcaggacatccgctacagagacaccctgggccacggcaatggaggcaccgtgtacaaggcctaccacgtgcccagcggcaagatcctggccgtgaaggtgatcctgctggacatcaccctggagctgcagaagcagatcatgtctgagctggagatcctgtacaagtgtgacagcagctacatcatcggcttctacggggccttctttgtggagaaccgcatcagcatctgcacagagttcatggatggcggcagcctggatgtgtacaggaagatgcctgagcacgtgctgggcagaattgctgtggccgtggtgaagggcctgacctacctgtggagcctgaagatcctgcacagagatgtgaagcccagcaacatgctggtgaacacccggggccaggtgaagctgtgtgactttggagtgtccacccagctggtgaacagcatcgccaagacctacgtgggcaccaatgcctacatggcccctgagcgcatctctggagagcagtatggcatccacagtgatgtgtggagcctgggcatctccttcatggagctggccctgggccgcttcccctacccccagatccagaagaaccagggcagcctgatgcccctgcagctgctgcagtgcatcgtggatgaggacagccctgtgctgcctgtgggggagttcagcgagccctttgtgcacttcatcacccagtgcatgaggaagcagcccaaggagaggcctgcccctgaggagctgatgggccaccccttcatcgtgcagttcaatgatggaaatgctgctgtggtgtccatgtgggtgtgccgggccctggaggagaggaggagccagcagggccccccatag

SEQ ID NO: 160155 - DNA, 1005 bp, synthetic construct
  misc_feature 1..1005: note = Description of Artificial Sequence: Synthetic coding sequence
  source 1..1005: mol_type = other DNA
atgagccagagcaagggcaagaagagaaatcctggcctgaagatccccaaggaggcctttgagcagccccagaccagcagcaccccaccccgggacctggacagcaaggcctgcatcagcatcggcaaccagaactttgaggtgaaggcagatgacctggagcccatcatggagctgggccgcggggcctacggcgtggtggagaagatgagacatgtgcccagcggccagatcatggctgtgaagaggatccgggccaccgtgaacagccaggagcagaagaggctgctgatggacctggacatctccatgaggacagtggactgccccttcaccgtgaccttctacggggccctcttccgggagggagatgtgtggatctgcatggagctgatggacaccagcctggacaagttctacaagcaggtgattgacaagggccagaccatccctgaggacatcctgggcaagattgctgtgtccatcgtgaaggccctggagcacctgcacagcaagctgagcgtcatccacagagatgtgaagcccagcaatgtgctgatcaatgccctgggccaggtgaagatgtgtgactttggcatcagcggctacctggtggacagcgtggccaagaccattgatgctggctgcaagccctacatggcccctgagcgcatcaaccctgagctgaaccagaagggctacagcgtgaagagtgacatctggagcctgggcatcaccatgattgagctggccatcctgcgcttcccctatgacagctggggcacccccttccagcagctgaagcaggtggtggaggagcccagcccccagctgcctgctgacaagttctctgctgagtttgtggacttcaccagccagtgcctgaagaagaacagcaaggagcggcccacctacccagagctgatgcagcaccccttcttcaccctgcacgagagcaagggcacagatgtggccagctttgtgaagctgatcctgggggactag

SEQ ID NO: 160156 - DNA, 1005 bp, synthetic construct; identical to SEQ ID NO: 160155
  misc_feature 1..1005: note = Description of Artificial Sequence: Synthetic coding sequence
  source 1..1005: mol_type = other DNA

SEQ ID NO: 160157 - DNA, 2865 bp, synthetic construct
  misc_feature 1..2865: note = Description of Artificial Sequence: Synthetic coding sequence
  source 1..2865: mol_type = other DNA
atggaggaggaggagggcgctgtggccaaggagtggggcaccaccccagctggccctgtgtggacagctgtgtttgattatgaagctgctggagatgaggagctgaccctgcggcggggggacagagtgcaggtgctgagccaggactgtgctgtgtctggagatgagggctggtggacaggccagctgcccagcggccgggtgggcgtcttccccagcaactacgtggcccctggggccccagctgccccagctggcctgcagctgccccaggagatccccttccacgagctgcagctggaggagatcatcggcgtgggcggctttgggaaggtgtaccgggccctgtggagaggagaggaggtggccgtgaaggccgcccggctggaccctgagaaggaccctgctgtgacagctgagcaggtgtgccaggaggcccggctgtttggagccctgcagcaccccaacatcatcgccctgcggggggcctgcctgaaccccccccacctgtgcctggtgatggagtatgcccggggcggggccctgagccgggtgctggccggcagaagagtgcccccccacgtgctggtgaactgggccgtgcaggtggcccggggcatgaactacctgcacaatgatgcccctgtgcccatcatccaccgggacctgaagagcatcaacatcctgatcctggaggccatcgagaaccacaacctggccgacacagtgctgaagatcacagactttggcctggcccgggagtggcacaagaccaccaagatgtctgctgctggcacctacgcctggatggcccctgaggtgatccggctgagcctcttcagcaagagcagtgatgtgtggagctttggagtgctgctgtgggagctgctgaccggggaggtgccctaccgggagattgatgccctggccgtggcctatggagtggccatgaacaagctgaccctgcccatccccagcacctgcccagagccctttgcccggctgctggaggagtgctgggaccctgacccccacggccgcccagactttggcagcatcctgaagaggctggaggtgattgagcagagcgccctcttccagatgcccctggagagcttccacagcctgcaggaggactggaagctggagatccagcacatgtttgatgacctgcggaccaaggagaaggagctgcggagccgggaggaggagctgctgcgggccgcccaggagcagcgcttccaggaggagcagctgcggcggcgggagcaggagctggccgagcgggagatggacatcgtggagcgggagctgcacctgctgatgtgccagctgagccaggagaagccccgggtgaggaagaggaagggcaacttcaagaggagccggctgctgaagctgcgggagggcggcagccacatcagcctgcccagcggctttgagcacaagatcaccgtgcaggccagccccaccctggacaagaggaagggcagtgatggagccagccccccagccagccccagcatcatcccccggctgcgggccatccggctgacccctgtggactgtggcggcagcagcagcggcagcagcagcggcggcagcggcacctggagcagaggaggcccccccaagaaggaggagctggtgggcggcaagaagaagggccgcacctggggccccagcagcaccctgcagaaggagcgggtgggcggggaggagcggctgaagggcctgggggagggcagcaagcagtggagcagcagcgcccccaacctgggcaagagccccaagcacacccccatcgcccctggctttgccagcctgaatgagatggaggagtttgctgaggctgaagatggcggcagctctgtgccccccagcccctacagcacccccagctacctgtctgtgcccctgcctgctgagcccagccctggggcccgggccccctgggagcccaccccatctgcccccccagcccgctggggccatggagccaggagaagatgtgacctggccctgctgggctgtgccaccctgctgggcgctgtgggcctgggcgcagatgtggccgaggcccgggctgctgatggagaggagcagaggcgctggctggatggcctcttcttcccccgggccggccgcttcccccggggcctgagccccccagcccggccccacggccggcgggaggatgtgggccctggcctgggcctggcccccagcgccaccctggtgtccctgagctctgtgtctgactgcaacagcaccaggagcctgctgcggagtgacagtgatgaagctgccccagctgcccccagccccccacccagccccccagcccccacccccacccccagccccagcaccaaccccctggtggacctggagctggagagcttcaagaaggacccccggcagagcctgacccccacccacgtgacagctgcctgtgctgtgtcccggggccacaggaggacccccagtgatggagccctgggccagaggggccccccagagcctgctggccacggccctggcccccgggacctgctggacttcccccggctgcctgacccccaggccctcttccctgccaggagaagacctcctgagttccctggccggcccaccaccctgacctttgccccccggcccaggcctgctgccagccggccccggctggacccctggaagctggtgtcctttggccgcaccctgaccatcagcccccccagcaggccagacaccccagagagccctggcccccccagcgtgcagcccaccctgctggacatggacatggagggccagaaccaggacagcacagtgcccctgtgtggggcccacggcagccactag

SEQ ID NO: 160158 - DNA, 2544 bp, synthetic construct
  misc_feature 1..2544: note = Description of Artificial Sequence: Synthetic coding sequence
  source 1..2544: mol_type = other DNA
atggagcccctgaagagcctcttcctgaagagccccctgggctcctggaatggaagtggcagcggcggcggcggcggcggcggcggcggccggcctgagggcagccccaaggctgctggctacgccaaccctgtgtggacagccctgtttgattatgagcccagcggccaggatgagctggccctgaggaagggggacagagtggaggtgctgagcagagatgctgccatctctggagatgagggctggtgggccggccaggtgggcggccaggtgggcatcttccccagcaactacgtgtccagaggaggcggccccccaccctgtgaggtggccagcttccaggagctgcggctggaggaggtgattggaattggaggctttgggaaggtgtaccggggctcctggagaggagagctggtggccgtgaaggccgcccggcaggaccctgatgaggacatctctgtgacagctgagagcgtgcggcaggaggcccggctgtttgccatgctggcccaccccaacatcatcgccctgaaggctgtgtgcctggaggagcccaacctgtgcctggtgatggagtatgctgctgggggccccctgagccgggccctggccggccggcgggtgccccctcatgtgctggtgaactgggccgtgcagatcgcccggggcatgcactacctgcactgtgaggccctggtgcctgtgatccaccgggacctgaagagcaacaacatcctgctgctgcagcccattgaaagtgatgacatggagcacaagaccctgaagatcacagactttggcctggcccgggagtggcacaagaccacccagatgtctgctgctggcacctacgcctggatggcccctgaggtgatcaaggccagcaccttcagcaaaggaagtgatgtgtggagctttggagtgctgctgtgggagctgctgactggagaggtgccctaccggggcatcgactgcctggccgtggcctacggcgtggccgtgaacaagctgaccctgcccatccccagcacctgcccagagccctttgcccagctgatggctgactgctgggcccaggacccccacagaagaccagactttgccagcatcctgcagcagctggaggccctggaggcccaggtgctgcgggagatgccccgggacagcttccacagcatgcaggagggctggaagcgggagatccagggcctgtttgatgagctgcgggccaaggagaaggagctgctgagccgggaggaggagctgaccagggctgcccgggagcagaggagccaggccgagcagctgcggcggcgggagcacctgctggcccagtgggagctggaggtgtttgagcgggagctgaccctgctgctgcagcaggtggaccgggagcggccccacgtgagaagaagaagaggcaccttcaagaggagcaagctgcgggccagagatggaggagagcgcatctccatgcccctggacttcaagcaccgcatcaccgtgcaggccagccctggcctggacagaagaagaaatgtgtttgaggtgggccctggggacagccccaccttcccccgcttccgggccatccagctggagcctgctgagcccggccaggcctggggccggcagagcccccggcggctggaggacagcagcaatggagagcggcgggcctgctgggcctggggccccagcagccccaagccaggagaggcccagaatggaagaagaagaagcaggatggatgaggccacctggtacctggacagtgatgacagcagccccctgggcagccccagcaccccaccagccctgaatggaaatccaccccggcccagcctggagcctgaggagcccaagaggcctgtgcctgctgagcggggcagcagcagcggcacccccaagctgatccagagggccctgctgcggggcacagccctgctggccagcctgggcctgggccgggacctgcagcccccaggcggccctggccgggagcggggggagagccccaccaccccacccacccccaccccagccccctgccccacagagcccccacccagccccctcatctgcttcagcctgaagaccccagacagcccccccaccccagcccccctgctgctggacctgggcatccctgtgggccagaggtctgccaagagcccccggcgggaggaggagccccggggcggcaccgtgtccccacctcctggcaccagccgcagcgcccctggcaccccaggcacccccaggagcccccccctgggcctcatcagccggccccggcccagccccctgcggagcagaattgacccctggagctttgtgtctgctggcccccggcccagccccctgcccagcccccagcctgccccccggcgggccccctggaccctcttcccagacagcgaccccttctgggacagccccccagccaaccccttccagggcggcccccaggactgccgggcccagaccaaggacatgggcgcccaggccccctgggtgcctgaggccggcccctag

SEQ ID NO: 160159 - DNA, 1773 bp, synthetic construct
  misc_feature 1..1773: note = Description of Artificial Sequence: Synthetic coding sequence
  source 1..1773: mol_type = other DNA
atggagcacaagaccctgaagatcacagactttggcctggcccgggagtggcacaagaccacccagatgtctgctgctggcacctacgcctggatggcccctgaggtgatcaaggccagcaccttcagcaagggcagtgatgtgtggagctttggagtgctgctgtgggagctgctgaccggggaggtgccctaccggggcatcgactgcctggccgtggcctatggagtggccgtgaacaagctgaccctgcccatccccagcacctgcccagagccctttgcccagctgatggctgactgctgggcccaggacccccaccggcggccagactttgccagcatcctgcagcagctggaggccctggaggcccaggtgctgcgggagatgccccgggacagcttccacagcatgcaggagggctggaagcgggagatccagggcctgtttgatgagctgcgggccaaggagaaggagctgctgagccgggaggaggagctgacccgggccgcccgggagcagaggagccaggccgagcagctgcggcggcgggagcacctgctggcccagtgggagctggaggtgtttgagcgggagctgaccctgctgctgcagcaggtggaccgggagcggccccacgtgagaagaagaagaggcaccttcaagaggagcaagctgcgggccagagatggaggagagcgcatctccatgcccctggacttcaagcaccgcatcaccgtgcaggccagccctggcctggacagaagaagaaatgtgtttgaggtgggccctggggacagccccaccttcccccgcttccgggccatccagctggagcctgctgagcccggccaggcctggggccggcagagcccccggcggctggaggacagcagcaatggagagcggcgggcctgctgggcctggggccccagcagccccaagccaggagaggcccagaatggaagaagaagaagcaggatggatgaggccacctggtacctggacagtgatgacagcagccccctgggcagccccagcaccccaccagccctgaatggaaaccccccccggcccagcctggagcctgaggagcccaagaggcctgtgcctgctgagcggggcagcagcagcggcacccccaagctgatccagagggccctgctgcggggcacagccctgctggccagcctgggcctgggccgggacctgcagcccccaggcggccctggccgggagcggggggagagccccaccaccccacccacccccaccccagccccctgccccacagagcccccacccagccccctcatctgcttcagcctgaagaccccagacagcccccccaccccagcccccctgctgctggacctgggcatccctgtgggccagaggtctgccaagagcccccggcgggaggaggagccccggggcggcaccgtgagccccccacctggcaccagccgcagcgcccctggcaccccaggcacccccaggagcccccccctgggcctcatcagccggccccggcccagccccctgcggagcagaattgacccctggagctttgtgtctgctggcccccggcccagccccctgcccagcccccagcctgccccccggcgggccccctggaccctcttcccagacagcgaccccttctgggacagccccccagccaaccccttccagggcggcccccaggactgccgggcccagaccaaggacatgggcgcccaggccccctgggtgcctgaggccggcccctag

SEQ ID NO: 160160 - DNA, 2580 bp, synthetic construct
  misc_feature 1..2580: note = Description of Artificial Sequence: Synthetic coding sequence
  source 1..2580: mol_type = other DNA
atggcctgcctgcacgagaccaggacccccagccccagctttggaggctttgtgtccaccctgtctgaggcctccatgaggaagctggaccctgacaccagtgactgcaccccagagaaggacctgacccccacccacgtgctgcagctgcacgagcaggatgctgggggccctgggggcgccgccggcagccctgagagccgggccagccgggtgcgggcagatgaggtgcggctgcagtgccagagcggcagcggcttcctggagggcctgtttggctgcctgcggcctgtgtggaccatgattggcaaggcctacagcacagagcacaagcagcagcaggaggacctgtgggaggtgccctttgaggagatcctggacctgcagtgggtgggcagcggggcccagggcgctgtgttcctgggccgcttccatggagaggaggtggccgtgaagaaggtgcgggacctgaaggagacagacatcaagcacctgaggaagctgaagcaccccaacatcatcaccttcaagggcgtgtgcacccaggccccctgctactgcatcctgatggagttctgtgcccagggccagctgtatgaggtgctgcgggccggccggcctgtgacccccagcctgctggtggactggagcatgggcattgctgggggcatgaactacctgcacctgcacaagatcatccaccgggacctgaagagccccaacatgctgatcacctatgatgatgtggtgaagatcagtgactttggcaccagcaaggagctgagtgacaagagcaccaagatgagctttgctggcaccgtggcctggatggcccctgaggtgatcagaaatgaacctgtgtctgagaaggtggacatctggagctttggagtggtgctgtgggagctgctgactggagagatcccctacaaggatgtggacagcagcgccatcatctggggcgtgggcagcaacagcctgcacctgcctgtgcccagcagctgcccagatggcttcaagatcctgctgcggcagtgctggaacagcaagcccaggaaccggcccagcttccggcagatcctgctgcacctggacatcgccagcgcagatgtgctgagcaccccccaggagacctacttcaagagccaggccgagtggagggaggaggtgaagctgcactttgagaagatcaagtctgagggcacctgcctgcaccggctggaggaggagctggtgatgagaagaagagaggagctgcggcatgccctggacatccgggagcactatgaaaggaagctggagcgggccaacaacctgtacatggagctgaatgccctgatgctgcagctggagctgaaggagcgggagctgctgcggcgggagcaggccctggagcggcgctgccccggcctgctgaagccccaccccagccggggcctgctgcacggcaacaccatggagaagctgatcaagaagagaaatgtgccccagaagctgagcccccacagcaagaggccagacatcctgaagacagagagcctgctgcccaagctggatgctgccctgtctggagtgggcctgcccggctgccccaagggcccccccagccctggccgcagcagaagaggcaagaccaggcacaggaaggccagcgccaagggcagctgtggggacctgcccggcctgaggacagctgtgccccctcatgagcccggcggccctggcagccctgggggcctgggcggcggccccagcgcctgggaggcctgccccccagccctgcggggcctgcaccacgacctgctgctgaggaagatgagcagcagcagcccagacctgctgtctgctgccctgggcagccggggccgcggggccaccggcggggccggggaccccggcagccccccaccagcccggggggacaccccaccttctgagggcagcgcccctggcagcaccagcccagacagccctgggggcgccaagggggagcccccacctcctgtgggccctggagagggcgtgggcctgctgggcaccggccgggagggcaccagcggccggggcggcagcagagctggcagccagcacctgaccccagctgccctgctgtacagagctgctgtgaccaggagccagaagaggggcatcagcagcgaggaggaggagggggaggtggacagcgaggtggagctgaccagcagccagcgctggccccagagcctgaacatgaggcagagcctgagcaccttcagcagcgagaaccccagtgatggagaggagggcacagccagcgagcccagccccagcggcaccccagaggtgggcagcaccaacacagatgagaggccagatgagaggagtgatgacatgtgcagccagggcagcgagatccccctggaccccccaccttctgaggtgattcctggccctgagcccagcagcctgcccatcccccaccaggagctgctgcgggagcggggcccccccaacagtgaagattctgactgtgacagcacagagctggacaacagcaacagcgtggatgccctgcggcccccagccagcctgcccccatag

SEQ ID NO: 160161 - DNA, 2901 bp, synthetic construct
  misc_feature 1..2901: note = Description of Artificial Sequence: Synthetic coding sequence
  source 1..2901: mol_type = other DNA
atggccaacttccaggagcacctgagctgcagcagcagcccccacctgcccttcagcgagagcaagaccttcaacggcctgcaggatgagctgacagccatgggcaaccaccccagccccaagctgctggaggaccagcaggagaagggcatggtgaggacagagctgattgaatctgtgcacagccctgtgaccaccaccgtgctgacctctgtgtctgaggacagccgggaccagtttgaaaattctgtgctgcagctgcgggagcatgatgaaagtgaaacagctgtgtcccagggcaacagcaacacagtggatggagagagcaccagcggcacagaggacatcaagatccagttcagccgcagcggcagcggcagcggcggcttcctggagggcctgtttggctgcctgcggcctgtgtggaacatcatcggcaaggcctacagcacagactacaagctgcagcagcaggacacctgggaggtgccctttgaggagatcagcgagctgcagtggctgggcagcggggcccagggcgctgtgttcctgggcaagttccgggcagaggaggtggccatcaagaaggtgcgggagcagaatgaaacagacatcaagcacctgaggaagctgaagcaccccaacatcatcgccttcaagggcgtgtgcacccaggccccctgctactgcatcatcatggagtactgtgcccacggccagctgtatgaggtgctgcgggccggcaggaagatcaccccccggctgctggtggactggagcactggaattgccagcggcatgaactacctgcacctgcacaagatcatccaccgggacctgaagagccccaacgtgctggtgacccacacagatgctgtgaagatcagtgactttggcaccagcaaggagctgagtgacaagagcaccaagatgagctttgctggcaccgtggcctggatggcccctgaggtgatcagaaatgaacctgtgtctgagaaggtggacatctggagctttggagtggtgctgtgggagctgctgaccggggagatcccctacaaggatgtggacagcagcgccatcatctggggcgtgggcagcaacagcctgcacctgcctgtgcccagcacctgcccagatggcttcaagatcctgatgaagcagacctggcagagcaagcccaggaaccggcccagcttccggcagaccctgatgcacctggacatcgccagcgcagatgtgctggccaccccccaggagacctacttcaagagccaggccgagtggagggaggaggtgaagaagcactttgagaagatcaagtctgagggcacctgcatccaccggctggatgaggagctgatcagaagaagaagagaggagctgcggcatgccctggacatccgggagcactatgaaaggaagctggagcgggccaacaacctgtacatggagctgagcgccatcatgctgcagctggagatgagggagaaggagctgatcaagcgggagcaggccgtggagaagaagtacccaggcacctacaagaggcaccctgtgcggcccatcatccaccccaatgccatggagaagctgatgaagaggaagggcgtgccccacaagagcggcatgcagaccaagaggccagacctgctgcggtctgagggcatccccaccacagaggtggcccccacagccagccccctgagcggcagccccaagatgagcaccagcagcagcaagagccgctaccgcagcaagcccaggcacagaagaggcaacagccggggcagccacagcgactttgctgccatcctgaagaaccagcctgcccaggagaacagcccccaccccacctacctgcaccaggcccagagccagtaccccagcctgcaccaccacaacagcctgcagcagcagtaccagcagcccccaccagccatgagccagagccaccacccccggctgaacatgcacggccaggacatcgccacctgtgccaacaacctgcgctactttggacctgctgctgccctgcggagccccctgagcaaccacgcccagaggcagctgcccggcagcagcccagacctgatcagcacagccatggctgctgactgctggaggagcagcgagccagacaagggccaggccggcccctggggctgctgccaggctgatgcctatgacccctgcctgcagtgcaggcctgagcagtatggcagcctggacatccccagcgctgagcctgtgggccgcagcccagacctgagcaagagccctgcccacaaccccctgctggagaatgcccagagcagcgagaagacagaggagaatgagttcagcggctgccgctctgagagcagcctgggcaccagccacctgggcaccccaccagccctgcccaggaagacccggcccctgcagaagtctggagatgacagcagcgaggaggaggagggggaggtggacagcgaggtggagttcccccggcggcagaggccccaccgctgcatcagcagctgccagagctacagcaccttcagcagcgagaacttctctgtgtctgatggagaggagggcaacaccagtgaccacagcaacagcccagatgagctggccgacaagctggaggaccggctggccgagaagctggatgacctgctgagccagaccccagagatccccatcgacatcagcagccacagtgatggcctgagtgacaaggaatgtgctgtgcggcgggtgaagacccagatgagcctgggcaagctgtgtgtggaggagcggggctatgagaaccccatgcagtttgaggagagtgactgtgacagcagtgatggagaatgttctgatgccaccgtgaggaccaacaagcactacagcagcgccacctggtag

SEQ ID NO: 160162 - DNA, 2901 bp, synthetic construct; identical to SEQ ID NO: 160161
  misc_feature 1..2901: note = Description of Artificial Sequence: Synthetic coding sequence
  source 1..2901: mol_type = other DNA

SEQ ID NO: 160163 - DNA, 414 bp, synthetic construct
  misc_feature 1..414: note = Description of Artificial Sequence: Synthetic coding sequence
  source 1..414: mol_type = other DNA
atggccaacttccaggagcacctgagctgcagcagcagcccccacctgcccttcagcgagagcaagaccttcaacggcctgcaggatgagctgacagccatgggcaaccaccccagccccaagctgctggaggaccagcaggagaagggcatggtgaggacagagctgattgaatctgtgcacagccctgtgaccaccaccgtgctgacctctgtgtctgaggacagccgggaccagtttgaaaattctgtgctgcagctgcgggagcatgatgaaagtgaaacagctgtgtcccagggcaacagcaacacagtggatggagagagcaccagcggcacagaggacatcaagatccagttcagccgcagcggcagcggcagcggcggcttcctggagggcctgtttggctgctag

SEQ ID NO: 160164 - DNA, 342 bp, synthetic construct
  misc_feature 1..342: note = Description of Artificial Sequence: Synthetic coding sequence
  source 1..342: mol_type = other DNA
atggccaacttccaggagcacctgagctgcagcagcagcccccacctgcccttcagcgagagcaagaccttcaacggcctgcaggatgagctgacagccatgggcaaccaccccagccccaagctgctggaggaccagcaggagaagggcatggtgaggacagagctgattgaatctgtgcacagccctgtgaccaccaccgtgctgacctctgtgtctgaggacagccgggaccagtttgaaaattctgtgctgcagctgcgggagcatgatgaaagtgaaacagctgtgtcccagggcaacagcaacacagtggatggagagagcaccagcggcacctag

SEQ ID NO: 160165 - DNA, 2469 bp, synthetic construct
  misc_feature 1..2469: note = Description of Artificial Sequence: Synthetic coding sequence
  source 1..2469: mol_type = other DNA
atgtcctatgtggagtgcaagtgcctgcagctggagaacaagaacacctgggaggtgccctttgaggagatcagcgagctgcagtggctgggcagcggggcccagggcgctgtgttcctgggcaagttccgggcagaggaggtggccatcaagaaggtgcgggagcagaatgaaacagacatcaagcacctgaggaagctgaagcaccccaacatcatcgccttcaagggcgtgtgcacccaggccccctgctactgcatcatcatggagtactgtgcccacggccagctgtatgaggtgctgcgggccggcaggaagatcaccccccggctgctggtggactggagcactggaattgccagcggcatgaactacctgcacctgcacaagatcatccaccgggacctgaagagccccaacgtgctggtgacccacacagatgctgtgaagatcagtgactttggcaccagcaaggagctgagtgacaagagcaccaagatgagctttgctggcaccgtggcctggatggcccctgaggtgatcagaaatgaacctgtgtctgagaaggtggacatctggagctttggagtggtgctgtgggagctgctgaccggggagatcccctacaaggatgtggacagcagcgccatcatctggggcgtgggcagcaacagcctgcacctgcctgtgcccagcacctgcccagatggcttcaagatcctgatgaagcagacctggcagagcaagcccaggaaccggcccagcttccggcagaccctgatgcacctggacatcgccagcgcagatgtgctggccaccccccaggagacctacttcaagagccaggccgagtggagggaggaggtgaagaagcactttgagaagatcaagtctgagggcacctgcatccaccggctggatgaggagctgatcagaagaagaagagaggagctgcggcatgccctggacatccgggagcactatgaaaggaagctggagcgggccaacaacctgtacatggagctgagcgccatcatgctgcagctggagatgagggagaaggagctgatcaagcgggagcaggccgtggagaagaagtacccaggcacctacaagaggcaccctgtgcggcccatcatccaccccaatgccatggagaagctgatgaagaggaagggcgtgccccacaagagcggcatgcagaccaagaggccagacctgctgcggtctgagggcatccccaccacagaggtggcccccacagccagccccctgagcggcagccccaagatgagcaccagcagcagcaagagccgctaccgcagcaagcccaggcacagaagaggcaacagccggggcagccacagcgactttgctgccatcctgaagaaccagcctgcccaggagaacagcccccaccccacctacctgcaccaggcccagagccagtaccccagcctgcaccaccacaacagcctgcagcagcagtaccagcagcccccaccagccatgagccagagccaccacccccggctgaacatgcacggccaggacatcgccacctgtgccaacaacctgcgctactttggacctgctgctgccctgcggagccccctgagcaaccacgcccagaggcagctgcccggcagcagcccagacctgatcagcacagccatggctgctgactgctggaggagcagcgagccagacaagggccaggccggcccctggggctgctgccaggctgatgcctatgacccctgcctgcagtgcaggcctgagcagtatggcagcctggacatccccagcgctgagcctgtgggccgcagcccagacctgagcaagagccctgcccacaaccccctgctggagaatgcccagagcagcgagaagacagaggagaatgagttcagcggctgccgctctgagagcagcctgggcaccagccacctgggcaccccaccagccctgcccaggaagacccggcccctgcagaagtctggagatgacagcagcgaggaggaggagggggaggtggacagcgaggtggagttcccccggcggcagaggccccaccgctgcatcagcagctgccagagctacagcaccttcagcagcgagaacttctctgtgtctgatggagaggagggcaacaccagtgaccacagcaacagcccagatgagctggccgacaagctggaggaccggctggccgagaagctggatgacctgctgagccagaccccagagatccccatcgacatcagcagccacagtgatggcctgagtgacaaggaatgtgctgtgcggcgggtgaagacccagatgagcctgggcaagctgtgtgtggaggagcggggctatgagaaccccatgcagtttgaggagagtgactgtgacagcagtgatggagaatgttctgatgccaccgtgaggaccaacaagcactacagcagcgccacctggtag

SEQ ID NO: 160166 - DNA, 2280 bp, synthetic construct
  misc_feature 1..2280: note = Description of Artificial Sequence: Synthetic coding sequence
  source 1..2280: mol_type = other DNA
atgtactgcggcatccagatcctggccctgtgggagcggggcgtgtgcacccaggccccctgctactgcatcatcatggagtactgtgcccacggccagctgtatgaggtgctgcgggccggcaggaagatcaccccccggctgctggtggactggagcacaggcatcgccagcggcatgaactacctgcacctgcacaagatcatccaccgggacctgaagagccccaacgtgctggtgacccacacagatgctgtgaagatcagtgactttggcaccagcaaggagctgagtgacaagagcaccaagatgagctttgctggcaccgtggcctggatggcccctgaggtgatcagaaatgaacctgtgtctgagaaggtggacatctggagctttggagtggtgctgtgggagctgctgactggagagatcccctacaaggatgtggacagcagcgccatcatctggggcgtgggcagcaacagcctgcacctgcctgtgcccagcacctgcccagatggcttcaagatcctgatgaagcagacctggcagagcaagcccaggaaccggcccagcttccggcagaccctgatgcacctggacatcgccagcgcagatgtgctggccaccccccaggagacctacttcaagagccaggccgagtggagggaggaggtgaagaagcactttgagaagatcaagtctgagggcacctgcatccaccggctggatgaggagctgatcagaagaagaagagaggagctgcggcatgccctggacatccgggagcactatgaaaggaagctggagcgggccaacaacctgtacatggagctgagcgccatcatgctgcagctggagatgagggagaaggagctgatcaagcgggagcaggccgtggagaagaagtacccaggcacctacaagaggcaccctgtgcggcccatcatccaccccaatgccatggagaagctgatgaagaggaaaggagtgccccacaagagcggcatgcagaccaagaggccagacctgctgcggtctgagggcatccccaccacagaggtggcccccacagccagccccctgagcggcagccccaagatgagcaccagcagcagcaagagccgctaccgcagcaagcccaggcaccggcggggcaacagccggggcagccacagcgactttgctgccatcctgaagaaccagcctgcccaggagaacagcccccaccccacctacctgcaccaggcccagagccagtaccccagcctgcaccaccacaacagcctgcagcagcagtaccagcagcccccaccagccatgagccagagccaccacccccggctgaacatgcacggccaggacatcgccacctgtgccaacaacctgcgctacttcggccctgctgctgccctgcggagccccctgagcaaccacgcccagaggcagctgcccggcagcagcccagacctgatcagcacagccatggctgctgactgctggaggagcagcgagccagacaagggccaggccggcccctggggctgctgccaggctgatgcctatgacccctgcctgcagtgcaggcctgagcagtatggcagcctggacatccccagcgctgagcctgtgggccgcagcccagacctgagcaagagccctgcccacaaccccctgctggagaatgcccagagcagcgagaagacagaagaaaatgagttcagcggctgccgctctgagagcagcctgggcaccagccacctgggcaccccaccagccctgcccaggaagacccggcccctgcagaagtctggagatgacagcagcgaggaggaggagggggaggtggacagcgaggtggagttcccccggcggcagaggccccaccgctgcatcagcagctgccagagctacagcaccttcagcagcgagaacttctctgtgtctgatggagaggagggcaacaccagtgaccacagcaacagcccagatgagctggccgacaagctggaggaccggctggccgagaagctggatgacctgctgagccagaccccagagatccccatcgacatcagcagccacagtgatggcctgagtgacaaggaatgtgctgtgagaagagtgaagacccagatgagcctgggcaagctgtgtgtggaggagcggggctatgagaaccccatgcagtttgaggagagtgactgtgacagcagtgatggagagtgcagtgatgccaccgtgaggaccaacaagcactacagcagcgccacctggtag

SEQ ID NO: 160167 - DNA, 2841 bp, synthetic construct
  misc_feature 1..2841: note = Description of Artificial Sequence: Synthetic coding sequence
  source 1..2841: mol_type = other DNA
atggctgtgatggagatggcctgccctggggcccctggcagcgctgtgggccagcagaaggagctgcccaaggccaaggagaagaccccacccctgggcaagaagcagagctctgtgtacaagctggaggccgtggagaagagccctgtgttctgtgggaagtgggagatcctgaatgatgtgatcaccaagggcacagccaaggagggcagcgaggccggccctgctgccatcagcatcatcgcccaggctgaatgtgagaacagccaggagttcagccccaccttcagcgagcgcatcttcatcgccggcagcaagcagtacagccagagcgagagcctggaccagatccccaacaacgtggcccacgccacagagggcaagatggcccgggtgtgctggaagggcaagaggaggagcaaggccaggaagaagaggaagaagaagagcagcaagagcctggcccatgctggggtggccctggccaagcccctgcccaggaccccagagcaggagagctgcaccatccctgtgcaggaggatgagagccccctgggcgccccctacgtgaggaacaccccccagttcaccaagcccctgaaggagcccggcctgggccagctgtgcttcaagcagctgggggagggcctgcgggccctgcccaggtctgagctgcacaagctgatcagccccctgcagtgcctgaaccacgtgtggaagctgcaccacccccaggacggcggccccctgcccctgcccacccaccccttcccctacagccggctgccccaccccttccccttccaccccctgcagccctggaagccccaccccctggagagcttcctgggcaagctggcctgtgtggacagccagaagcccctgcctgacccccacctgagcaagctggcctgtgtggacagccccaagcccctgcccggcccccacctggagcccagctgcctgagcagaggagcccacgagaagttctctgtggaggagtacctggtgcacgccctgcagggctctgtgagcagcggccaggcccacagcctgaccagcctggccaagacctgggccgcccggggcagccgcagccgggagcccagccccaagacagaggacaatgaaggagtgctgctgacagagaagctgaagcctgtggactatgagtaccgggaggaggtgcactgggccacccaccagctgcggctgggccggggcagctttggagaggtgcacaggatggaggacaagcagacaggcttccagtgtgctgtgaagaaggtgcggctggaggtgttccgggcagaggagctgatggcctgtgccggcctgaccagccccagaattgtgcccctgtatggagctgtgcgggagggcccctgggtgaacatcttcatggagctgctggagggcggcagcctgggccagctggtgaaggagcagggctgcctgcctgaggaccgggccctgtactacctgggccaggccctggagggcctggagtacctgcacagccgccgcatcctgcatggagatgtgaaggctgacaacgtgctgctgagcagtgatggcagccatgctgccctgtgtgactttggacatgctgtgtgcctgcagccagatggcctgggcaagagcctgctgactggagactacatccctggaacagagacccacatggcccctgaggtggtgctgggccgcagctgtgatgccaaggtggatgtgtggagcagctgctgcatgatgctgcacatgctgaatggctgccacccctggacccagttcttccggggccccctgtgcctgaagatcgccagcgagcccccacctgtgcgggagatcccccccagctgtgcccccctgacagcccaggccatccaggagggcctgaggaaggagcccatccaccgggtgtctgctgctgagctgggcggcaaggtgaacagagccctgcagcaggtgggcggcctgaagagcccctggagaggagagtacaaggagcccaggcaccccccacccaaccaggccaactaccaccagaccctgcacgcccagccccgggagctgagcccccgggcccctggccccaggcctgctgaggagaccaccggccgggcccccaagctgcagccccccctgcccccagagcccccagagcccaacaagagcccccccctgaccctgagcaaggaggagagcggcatgtgggagcccctgcccctgagcagcctggagcccgccccagccaggaaccccagcagccctgagaggaaggccaccgtgcctgagcaggagctgcagcagctggagattgagctgttcctgaacagcctgagccagcccttcagcctggaggagcaggagcagatcctgagctgcctgagcattgacagcctgagcctgagtgatgacagcgagaagaaccccagcaaggccagccagagcagccgggacaccctgagcagtggagtgcacagctggagcagccaggccgaggcccggagcagctcctggaacatggtgctggcccggggccggcccacagacacccccagctacttcaacggggtgaaggtgcagatccagagcctgaatggagagcacctgcacatccgggagttccaccgggtgaaggtgggggacatcgccaccggcatcagcagccagatcccagctgctgccttcagcctggtgaccaaggatggccagcctgtgcgctatgacatggaggtgcctgattctggaattgacctgcagtgcaccctggccccagatggcagctttgcctggagctggagggtgaagcacggccagctggagaaccggccctag

SEQ ID NO: 160168 - DNA, 1302 bp, synthetic construct
  misc_feature 1..1302: note = Description of Artificial Sequence: Synthetic coding sequence
  source 1..1302: mol_type = other DNA
tgcttcaagcagctgggggagggcctgcgggccctgcccaggtctgagctgcacaagctgatcagccccctgcagtgcctgaaccacgtgtggaagctgcaccacccccaggacggcggccccctgcccctgcccacccaccaccccttccccttccaccccctgcagccctggaagccccaccccctggagagcttcctgggcaagctggcctgtgtggacagccagaagcccctgcctgacccccacctgagcaagctggcctgtgtggacagccccaagcccctgcccggcccccacctggagcccagctgcctgagcagaggagcccacgagaagttctctgtggaggagtacctggtgcacgccctgcagggctctgtgagcagcggccaggcccacagcctgaccagcctggccaagacctgggccgcccggggcagccgcagccgggagcccagccccaagacagaggacaatgaaggagtgctgctgacagagaagctgaagcctgtggactatgagtaccgggaggaggtgcactgggccacccaccagctgcggctgggccggggcagctttggagaggtgcacaggatggaggacaagcagacaggcttccagtgtgctgtgaagaaggtgcggctggaggtgttccgggcagaggagctgatggcctgtgccggcctgaccagccccagaattgtgcccctgtatggagctgtgcgggagggcccctgggtgaacatcttcatggagctgctggagggcggcagcctgggccagctggtgaaggagcagggctgcctgcctgaggaccgggccctgtactacctgggccaggccctggagggcctggagtacctgcacagccgccgcatcctgcatggagatgtgaaggctgacaacgtgctgctgagcagtgatggcagccatgctgccctgtgtgactttggacatgctgtgtgcctgcagccagatggcctgggcaagagcctgctgactggagactacatccctggaacagagacccacatggcccctgaggtggtgctgggccgcagctgtgatgccaaggtggatgtgtggagcagctgctgcatgatgctgcacatgctgaatggctgccacccctggacccagttcttccggggccccctgtgcctgaaggtgggagatggcacccagcacggccagcagggcgagctgcagggccctggggcccaggccgccggctggaggggctgcagcgctgtggctgatggagcccggggcggcctggtgatccacgtgggcagctag

SEQ ID NO: 160169 - DNA, 3942 bp, synthetic construct
  misc_feature 1..3942: note = Description of Artificial Sequence: Synthetic coding sequence
  source 1..3942: mol_type = other DNA
atggagagcggcggcggcaatgccccagctggggccctgggcgccgccagcgagagcccccagtgccccccacctcctggggtggagggcgccgccggccctgctgagccagatggagctgctgagggcgctgctgggggcagcggggagggggagagcggcggcggcccccggcgggccctgcgggctgtgtatgtgcgctctgagagcagccagggcggggccgccggcggccctgaggccggggcccggcagtgcctgctgcgggcctgtgaggccgagggcgcccacctgacctctgtgccctttggagagctggactttggagaaacagctgtgctggatgccttctatgatgctgatgtggccgtggtggacatgtctgatgtgtcccggcagcccagcctcttctaccacctgggcgtgcgggagagctttgacatggccaacaacgtcatcctgtaccatgacacagatgctgacacagccctgagcctgaaggacatggtgacccagaagaacacagccagcagcggcaactactacttcatcccctacatcgtgaccccctgtgccgactacttctgctgtgagagtgatgcccagaggcgggccagcgagtacatgcagcccaactgggacaacatcctgggccccctgtgcatgcccctggtggaccgcttcatcagcctgctgaaggacatccacgtgaccagctgtgtgtactacaaggagaccctgctgaatgacatcaggaaggcccgggagaagtaccagggcgaggagctggccaaggagctggcccgcatcaagctgaggatggacaacacagaggtgctgaccagtgacatcatcatcaacctgctgctgagctacagagacatccaggactatgatgccatggtgaagctggtggagaccctggagatgctgcccacctgtgacctggccgaccagcacaacatcaagttccactacgcctttgccctgaacagaagaaacagcactggagaccgggagaaggccctgcagatcatgctgcaggtgctgcagagctgtgaccaccctggccctgacatgttctgcctgtgtggccgcatctacaaggacatcttcctggacagcgactgcaaggatgacaccagccgggacagcgccatcgagtggtacaggaagggctttgagctgcagagcagcctgtacagcggcatcaacctggccgtgctgctgattgtggccggccagcagtttgagaccagcctggagctgaggaagattggagtgcggctgaacagcctgctgggcaggaagggcagcctggagaagatgaacaactactgggatgtgggccagttcttctctgtgtccatgctggcccatgatgtgggcaaggctgtgcaggccgctgagcggctcttcaagctgaagccccctgtgtggtacctgcggagcctggtgcagaacctgctgctgatccgccgcttcaagaagaccatcatcgagcacagcccccggcaggagcggctgaacttctggctggacatcatctttgaggccaccaatgaggtgaccaacggcctgcgcttccctgtgctggtgattgagcccaccaaggtgtaccagcccagctatgtgtccatcaacaatgaagctgaggagaggacagtgtccctgtggcacgtgagccccacagagatgaagcagatgcatgagtggaacttcaccgccagcagcatcaagggcatcagcctgagcaagtttgatgagcgctgctgcttcctgtatgtgcatgacaacagtgatgacttccagatctacttcagcacagaggagcagtgcagccgcttcttcagcctggtgaaggagatgatcaccaacacagctggcagcacagtggagctggagggggagacagatggagacaccctggagtatgaatatgaccatgatgccaacggggagcgggtggtgctgggcaagggcacctatggaattgtgtatgccggccgggacctgagcaaccaggtgcgcatcgccatcaaggagatccctgagcgggacagccgctacagccagcccctgcacgaggagatcgccctgcacaagtacctgaagcacagaaatattgtgcagtacctgggctctgtgtctgaaaatggctacatcaagatcttcatggagcaggtgcctgggggcagcctgagcgccctgctgcggagcaagtggggccccatgaaggagcccaccatcaagttctacaccaagcagatcctggagggcctgaagtacctgcacgagaaccagatcgtgcaccgggacatcaagggggacaacgtgctggtgaacacctacagcggcgtggtgaagatcagtgactttggcaccagcaagaggctggccggcgtgaacccctgcacagagaccttcaccggcaccctgcagtacatggcccctgagatcatcgaccagggcccccggggctacggggccccagctgacatctggagcctgggctgcaccatcatcgagatggccaccagcaagccacccttccacgagctgggggagccccaggccgccatgttcaaggtgggcatgttcaagatccaccctgagatccctgaggccctgtctgctgaggcccgggccttcatcctgagctgctttgagccagacccccacaagagggccaccacagctgagctgctgcgggagggcttcctgcggcaggtgaacaagggcaagaagaacagaattgccttcaagcccagcgagggcccccggggcgtggtgctggccctgcccacccagggcgagcccatggccaccagcagcagcgagcacggctctgtgtccccagacagtgatgcccagccagatgccctgtttgagaggacccgggcccccaggcaccacctgggccacctgctgtctgtgcctgatgagagcagcgccctggaggaccggggcctggccagcagccctgaggaccgggaccagggcctcttcctgctgaggaaggacagcgagcggcgggccatcctgtacaagatcctgtgggaggagcagaaccaggtggccagcaacctgcaggagtgtgtggcccagagcagcgaggagctgcacctgtctgtgggccacatcaagcagatcatcggcatcctgcgggacttcatccgcagccctgagcaccgggtgatggccaccaccatcagcaagctgaaggtggacctggactttgacagcagcagcatcagccagatccacctggtgctgtttggcttccaggatgctgtgaacaagatcctgaggaaccacctgatccggccccactggatgtttgccatggacaacatcatcagaagagctgtgcaggccgctgtgaccatcctgatccctgagctgcgggcccactttgagcccacctgtgaaacagaaggagtggacaaggacatggatgaagctgaggagggctaccccccagccactggacctggccaggaggcccagccccaccagcagcacctgagcctgcagctgggggagctgcggcaggagaccaaccggctgctggagcacctggtggagaaggagcgggagtaccagaacctgctgcggcagaccctggagcagaagacccaggagctgtaccacctgcagctgaagctgaagagcaactgcatcacagagaacccagctggcccctacggccagaggacagacaaggagctgattgactggctgcggctgcagggcgcagatgccaagaccatcgagaagatcgtggaggagggctacaccctgagtgacatcctgaatgagatcaccaaggaggacctgcgctacctgcggctgcggggcggcctgctgtgccgcctgtggagcgctgtgtcccagtacagaagagcccaggaggccagcgagaccaaggacaaggcctag

SEQ ID NO: 160170 - DNA, 4677 bp, synthetic construct
  misc_feature 1..4677: note = Description of Artificial Sequence: Synthetic coding sequence
  source 1..4677: mol_type = other DNA
atgagggaggccgccgccgccctggtgcccccaccagcctttgctgtgaccccagctgctgccatggaggagcccccacctcctcctcctcctcctcctcctcctcctgagcctgagacagagagcgagcctgagtgctgcctggccgcccggcaggagggcaccctgggggacagcgcctgcaagagccctgagagtgacctggaggacttcagtgatgagaccaacacagagaacctgtatggcaccagcccccccagcaccccccggcagatgaagaggatgagcaccaagcaccagagaaataatgtgggccgcccagccagccgcagcaacctgaaggagaagatgaatgcccccaaccagcccccccacaaggacaccgggaagacagtggagaatgtggaggagtacagctacaagcaggagaagaagatccgggccgccctgcggaccacagagcgggacaggaagaagaatgtgcagtgcagcttcatgctggacagcgtgggcggcagcctgcccaagaagagcatcccagatgtggacctgaacaagccctacctgagcctgggctgcagcaatgccaagctgcctgtgtctgtgcccatgcccatcgcccggcctgcccggcagaccagcaggacagactgcccagctgaccggctgaagttctttgagaccctgcggctgctgctgaagctgacctctgtgtccaagaagaaggaccgggagcagaggggccaggagaacaccagcggcttctggctgaacagaagcaatgaactcatctggctggagctgcaggcctggcatgctggccgcaccatcaatgaccaggacttcttcctgtacacagcccggcaggccatcccagacatcatcaatgagatcctgaccttcaaggtggactatggcagctttgcctttgtgcgggacagagctggcttcaacggcacctctgtggagggccagtgcaaggccaccccaggcaccaagatcgtgggctacagcacccaccacgagcacctgcagaggcagagggtgtcctttgagcaggtgaagaggatcatggagctgctggagtacatcgaggccctgtaccccagcctgcaggccctgcagaaggactatgagaagtatgctgccaaggacttccaggacagagtgcaggccctgtgcctgtggctgaacatcaccaaggacctgaaccagaagctgcgcatcatgggcaccgtgctgggcatcaagaacctgagtgacatcggctggcctgtgtttgagatccccagcccccggcccagcaaaggaaatgaaccagaatatgaaggagatgacacagaaggagagctgaaggagctggagagcagcacagatgaaagtgaggaggagcagatcagtgacccccgggtgcctgagatccggcagcccatcgacaacagctttgacatccagagccgggactgcatcagcaagaagctggagcggctggagagtgaagatgacagcctgggctggggcgccccagactggagcacagaagctggcttcagccgccactgcctgaccagcatctaccggccctttgtggacaaggccctgaagcagatgggcctgaggaagctgatcctgcggctgcacaagctgatggatggcagcctgcagagggccagaattgccctggtgaagaatgacaggcctgtggagttcagcgagttcccagaccccatgtggggcagtgactatgtgcagctgagcaggaccccacccagcagcgaggagaagtgcagcgctgtgtcctgggaggagctgaaggccatggacctgcccagctttgagcccgccttcctggtgctgtgccgggtgctgctgaatgtcatccatgaatgtctgaagctgcggctggagcagaggcctgctggggagcccagcctgctgagcatcaagcagctggtgcgggagtgcaaggaggtgctgaagggcggcctgctgatgaagcagtactaccagttcatgctgcaggaggtgctggaggacctggagaagccagactgcaacattgatgcctttgaggaggacctgcacaagatgctgatggtgtactttgactacatgaggtcctggatccagatgctgcagcagctgccccaggccagccacagcctgaagaacctgctggaggaggagtggaacttcaccaaggagatcacccactacatccggggcggggaggcccaggccggcaagctgttctgtgacattgctggcatgctgctgaagagcacaggcagcttcctggagtttggcctgcaggagagctgtgccgagttctggaccagcgcagatgacagcagcgccagtgatgagatcagaagatctgtgattgagatcagccgggccctgaaggagctgttccacgaggcccgggagcgggccagcaaggccctgggctttgccaagatgctgaggaaggacctggagattgctgctgagttccggctgagcgcccctgtgcgggacctgctggatgtgctgaagagcaagcagtatgtgaaggtgcagatccctggcctggagaacctgcagatgtttgtgcctgacaccctggccgaggagaagagcatcatcctgcagctgctgaatgctgctgctgggaaggactgcagcaaggacagtgatgatgtgctgattgatgcctacctgctgctgaccaagcacggggaccgggcccgggacagcgaggacagctggggcacctgggaggcccagcctgtgaaggtggtgccccaggtggagaccgtggacaccctgcgctccatgcaggtggacaacctgctgctggtggtgatgcagagcgcccacctgaccatccagaggaaggccttccagcagagcattgagggcctgatgaccctgtgccaggagcagaccagcagccagcctgtgattgccaaggccctgcagcagctgaagaatgatgccctggagctgtgcaaccgcatcagcaatgccatcgacagagtggaccacatgttcaccagcgagtttgatgctgaggtggatgaaagtgaatctgtgaccctgcagcagtactaccgggaggccatgatccagggctacaactttggatttgagtaccacaaggaggtggtgcggctgatgtctggagagttccggcagaagatcggggacaagtacatcagctttgccaggaagtggatgaactacgtgctgaccaagtgtgagagcggccggggcacccggccccgctgggccacccagggctttgacttcctgcaggccatcgagcccgccttcatcagcgccctgcctgaagatgacttcctgagcctgcaggccctgatgaatgaatgcatcggccacgtgattggcaagccccacagccctgtgacaggcctgtacctggccatccacaggaacagcccccggcccatgaaggtgccccgctgccacagcgacccccccaacccccacctgatcatccccaccccagagggcttccggggcagctctgtgcctgaaaatgaccggctggccagcattgctgctgagctgcagttccgcagcctgagccgccacagcagccccacagaggagagagatgagcccgcctaccccaggggggacagcagcggcagcacccggcgctcctgggagctgcggaccctcatcagccagagcaaggacacagccagcaagctgggccccatcgaggccatccagaagtctgtgcggctgtttgaggagaagcgctaccgggagatgaggaggaagaacatcatcggccaggtgtgtgacacccccaagagctatgacaacgtgatgcacgtgggcctgaggaaggtgaccttcaagtggcagaggggcaacaagattggagagggccagtatggcaaggtgtacacctgcatctctgtggacacaggagagctgatggccatgaaggagatccgcttccagcccaatgaccacaagaccatcaaggagacagcagatgagctgaagatctttgagggcatcaagcaccccaacctggtgcgctactttggagtggagctgcaccgggaggagatgtacatcttcatggagtactgtgatgagggcaccctggaggaggtgtcccggctgggcctgcaggagcacgtgatccggctgtacagcaagcagatcaccatcgccatcaacgtgctgcatgaacatggaattgtgcaccgggacatcaagggggccaacatcttcctgaccagcagcggcctcatcaagctgggggactttggctgcagcgtgaagctgaagaacaatgcccagaccatgcctggagaggtgaacagcaccctgggcacagctgcctacatggcccctgaggtgatcacccgggccaagggggagggccacggccgggctgctgacatctggagcctgggctgtgtggtgattgagatggtgacaggcaagaggccctggcatgaatatgagcacaacttccagatcatgtacaaggtgggcatgggccacaagccacccatccctgagcggctgagccctgagggcaaggacttcctgagccactgcctggagagtgaccccaagatgcgctggacagccagccagctgctggaccacagctttgtgaaggtgtgcacagatgaggagtag

SEQ ID NO: 160171 - DNA, 4827 bp, synthetic construct
  misc_feature 1..4827: note = Description of Artificial Sequence: Synthetic coding sequence
  source 1..4827: mol_type = other DNA
atgagggaggccgccgccgccctggtgcccccaccagcctttgctgtgaccccagctgctgccatggaggagcccccacctcctcctcctcctcctcctcctcctcctgagcctgagacagagagcgagcctgagtgctgcctggccgcccggcaggagggcaccctgggggacagcgcctgcaagagccctgagagtgacctggaggacttcagtgatgagaccaacacagagaacctgtatggcaccagcccccccagcaccccccggcagatgaagaggatgagcaccaagcaccagagaaataatgtgggccgcccagccagccgcagcaacctgaaggagaagatgaatgcccccaaccagcccccccacaaggacaccgggaagacagtggagaatgtggaggagtacagctacaagcaggagaagaagatccgggccgccctgcggaccacagagcgggacaggaagaagaatgtgcagtgcagcttcatgctggacagcgtgggcggcagcctgcccaagaagagcatcccagatgtggacctgaacaagccctacctgagcctgggctgcagcaatgccaagctgcctgtgtctgtgcccatgcccatcgcccggcctgcccggcagaccagcaggacagactgcccagctgaccggctgaagttctttgagaccctgcggctgctgctgaagctgacctctgtgtccaagaagaaggaccgggagcagaggggccaggagaacaccagcggcttctggctgaacagaagcaatgaactcatctggctggagctgcaggcctggcatgctggccgcaccatcaatgaccaggacttcttcctgtacacagcccggcaggccatcccagacatcatcaatgagatcctgaccttcaaggtggactatggcagctttgcctttgtgcgggacagagctggcttcaacggcacctctgtggagggccagtgcaaggccaccccaggcaccaagatcgtgggctacagcacccaccacgagcacctgcagaggcagagggtgtcctttgagcaggtgaagaggatcatggagctgctggagtacatcgaggccctgtaccccagcctgcaggccctgcagaaggactatgagaagtatgctgccaaggacttccaggacagagtgcaggccctgtgcctgtggctgaacatcaccaaggacctgaaccagaagctgcgcatcatgggcaccgtgctgggcatcaagaacctgagtgacatcggctggcctgtgtttgagatccccagcccccggcccagcaaaggaaatgaaccagaatatgaaggagatgacacagaaggagagctgaaggagctggagagcagcacagatgaaagtgaggaggagcagatcagtgacccccgggtgcctgagatccggcagcccatcgacaacagctttgacatccagagccgggactgcatcagcaagaagctggagcggctggagagtgaagatgacagcctgggctggggcgccccagactggagcacagaagctggcttcagccgccactgcctgaccagcatctaccggccctttgtggacaaggccctgaagcagatgggcctgaggaagctgatcctgcggctgcacaagctgatggatggcagcctgcagagggccagaattgccctggtgaagaatgacaggcctgtggagttcagcgagttcccagaccccatgtggggcagtgactatgtgcagctgagcaggaccccacccagcagcgaggagaagtgcagcgctgtgtcctgggaggagctgaaggccatggacctgcccagctttgagcccgccttcctggtgctgtgccgggtgctgctgaatgtcatccatgaatgtctgaagctgcggctggagcagaggcctgctggggagcccagcctgctgagcatcaagcagctggtgcgggagtgcaaggaggtgctgaagggcggcctgctgatgaagcagtactaccagttcatgctgcaggaggtgctggaggacctggagaagccagactgcaacattgatgcctttgaggaggacctgcacaagatgctgatggtgtactttgactacatgaggtcctggatccagatgctgcagcagctgccccaggccagccacagcctgaagaacctgctggaggaggagtggaacttcaccaaggagatcacccactacatccggggcggggaggcccaggccggcaagctgttctgtgacattgctggcatgctgctgaagagcacaggcagcttcctggagtttggcctgcaggagagctgtgccgagttctggaccagcgcagatgacagcagcgccagtgatgagatcagaagatctgtgattgagatcagccgggccctgaaggagctgttccacgaggcccgggagcgggccagcaaggccctgggctttgccaagatgctgaggaaggacctggagattgctgctgagttccggctgagcgcccctgtgcgggacctgctggatgtgctgaagagcaagcagtatgtgaaggtgcagatccctggcctggagaacctgcagatgtttgtgcctgacaccctggccgaggagaagagcatcatcctgcagctgctgaatgctgctgctgggaaggactgcagcaaggacagtgatgatgtgctgattgatgcctacctgctgctgaccaagcacggggaccgggcccgggacagcgaggacagctggggcacctgggaggcccagcctgtgaaggtggtgccccaggtggagaccgtggacaccctgcgctccatgcaggtggacaacctgctgctggtggtgatgcagagcgcccacctgaccatccagaggaaggccttccagcagagcattgagggcctgatgaccctgtgccaggagcagaccagcagccagcctgtgattgccaaggccctgcagcagctgaagaatgatgccctggagctgtgcaaccgcatcagcaatgccatcgacagagtggaccacatgttcaccagcgagtttgatgctgaggtggatgaaagtgaatctgtgaccctgcagcagtactaccgggaggccatgatccagggctacaactttggatttgagtaccacaaggaggtggtgcggctgatgtctggagagttccggcagaagatcggggacaagtacatcagctttgccaggaagtggatgaactacgtgctgaccaagtgtgagagcggccggggcacccggccccgctgggccacccagggctttgacttcctgcaggccatcgagcccgccttcatcagcgccctgcctgaagatgacttcctgagcctgcaggccctgatgaatgaatgcatcggccacgtgattggcaagccccacagccctgtgacaggcctgtacctggccatccacaggaacagcccccggcccatgaaggtgccccgctgccacagcgacccccccaacccccacctgatcatccccaccccagagggcttcagcaccaggtccatgcccagtgatgcccggagccacggcagccctgctgctgctgctgctgctgctgctgctgctgtggccgccagccggcccagccccagcggcggggacagcgtgctgcccaagagcatcagcagcgcccatgacacccggggcagctctgtgcctgaaaatgaccggctggccagcattgctgctgagctgcagttccgcagcctgagccgccacagcagccccacagaggagagagatgagcccgcctaccccaggggggacagcagcggcagcacccggcgctcctgggagctgcggaccctcatcagccagagcaaggacacagccagcaagctgggccccatcgaggccatccagaagtctgtgcggctgtttgaggagaagcgctaccgggagatgaggaggaagaacatcatcggccaggtgtgtgacacccccaagagctatgacaacgtgatgcacgtgggcctgaggaaggtgaccttcaagtggcagaggggcaacaagattggagagggccagtatggcaaggtgtacacctgcatctctgtggacacaggagagctgatggccatgaaggagatccgcttccagcccaatgaccacaagaccatcaaggagacagcagatgagctgaagatctttgagggcatcaagcaccccaacctggtgcgctactttggagtggagctgcaccgggaggagatgtacatcttcatggagtactgtgatgagggcaccctggaggaggtgtcccggctgggcctgcaggagcacgtgatccggctgtacagcaagcagatcaccatcgccatcaacgtgctgcatgaacatggaattgtgcaccgggacatcaagggggccaacatcttcctgaccagcagcggcctcatcaagctgggggactttggctgcagcgtgaagctgaagaacaatgcccagaccatgcctggagaggtgaacagcaccctgggcacagctgcctacatggcccctgaggtgatcacccgggccaagggggagggccacggccgggctgctgacatctggagcctgggctgtgtggtgattgagatggtgacaggcaagaggccctggcatgaatatgagcacaacttccagatcatgtacaaggtgggcatgggccacaagccacccatccctgagcggctgagccctgagggcaaggacttcctgagccactgcctggagagtgaccccaagatgcgctggacagccagccagctgctggaccacagctttgtgaaggtgtgcacagatgaggagtag

SEQ ID NO: 160172 - DNA, 4497 bp, synthetic construct
  misc_feature 1..4497: note = Description of Artificial Sequence: Synthetic coding sequence
  source 1..4497: mol_type = other DNA
atgagggaggccgccgccgccctggtgcccccaccagcctttgctgtgaccccagctgctgccatggaggagcccccacctcctcctcctcctcctcctcctcctcctgagcctgagacagagagcgagcctgagtgctgcctggccgcccggcaggagggcaccctgggggacagcgcctgcaagagccctgagagtgacctggaggacttcagtgatgagaccaacacagagaacctgtatggcaccagcccccccagcaccccccggcagatgaagaggatgagcaccaagcaccagagaaataatgtgggccgcccagccagccgcagcaacctgaaggagaagatgaatgcccccaaccagcccccccacaaggacaccgggaagacagtggagaatgtggaggagtacagctacaagcaggagaagaagatccgggccgccctgcggaccacagagcgggacaggaagaagaatgtgcagtgcagcttcatgctggacagcgtgggcggcagcctgcccaagaagagcatcccagatgtggacctgaacaagccctacctgagcctgggctgcagcaatgccaagctgcctgtgtctgtgcccatgcccatcgcccggcctgcccggcagaccagcaggacagactgcccagctgaccggctgaagttctttgagaccctgcggctgctgctgaagctgacctctgtgtccaagaagaaggaccgggagcagaggggccaggagaacaccagcggcttctggctgaacagaagcaatgaactcatctggctggagctgcaggcctggcatgctggccgcaccatcaatgaccaggacttcttcctgtacacagcccggcaggccatcccagacatcatcaatgagatcctgaccttcaaggtggactatggcagctttgcctttgtgcgggacagagctggcttcaacggcacctctgtggagggccagtgcaaggccaccccaggcaccaagatcgtgggctacagcacccaccacgagcacctgcagaggcagagggtgtcctttgagcaggtgaagaggatcatggagctgctggagtacatcgaggccctgtaccccagcctgcaggccctgcagaaggactatgagaagtatgctgccaaggacttccaggacagagtgcaggccctgtgcctgtggctgaacatcaccaaggacctgaaccagaagctgcgcatcatgggcaccgtgctgggcatcaagaacctgagtgacatcggctggcctgtgtttgagatccccagcccccggcccagcaaaggaaatgaaccagaatatgaaggagatgacacagaaggagagctgaaggagctggagagcagcacagatgaaagtgaggaggagcagatcagtgacccccgggtgcctgagatccggcagcccatcgacaacagctttgacatccagagccgggactgcatcagcaagaagctggagcggctggagagtgaagatgacagcctgggctggggcgccccagactggagcacagaagctggcttcagccgccactgcctgaccagcatctaccggccctttgtggacaaggccctgaagcagatgggcctgaggaagctgatcctgcggctgcacaagctgatggatggcagcctgcagagggccagaattgccctggtgaagaatgacaggcctgtggagttcagcgagttcccagaccccatgtggggcagtgactatgtgcagctgagcaggaccccacccagcagcgaggagaagtgcagcgctgtgtcctgggaggagctgaaggccatggacctgcccagctttgagcccgccttcctggtgctgtgccgggtgctgctgaatgtcatccatgaatgtctgaagctgcggctggagcagaggcctgctggggagcccagcctgctgagcatcaagcagctggtgcgggagtgcaaggaggtgctgaagggcggcctgctgatgaagcagtactaccagttcatgctgcaggaggtgctggaggacctggagaagccagactgcaacattgatgcctttgaggaggacctgcacaagatgctgatggtgtactttgactacatgaggtcctggatccagatgctgcagcagctgccccaggccagccacagcctgaagaacctgctggaggaggagtggaacttcaccaaggagatcacccactacatccggggcggggaggcccaggccggcaagctgttctgtgacattgctggcatgctgctgaagagcacaggcagcttcctggagtttggcctgcaggagagctgtgccgagttctggaccagcgcagatgacagcagcgccagtgatgagatcagaagatctgtgattgagatcagccgggccctgaaggagctgttccacgaggcccgggagcgggccagcaaggccctgggctttgccaagatgctgaggaaggacctggagattgctgctgagttccggctgagcgcccctgtgcgggacctgctggatgtgctgaagagcaagcagtatgtgaaggtgcagatccctggcctggagaacctgcagatgtttgtgcctgacaccctggccgaggagaagagcatcatcctgcagctgctgaatgctgctgctgggaaggactgcagcaaggacagtgatgatgtgctgattgatgcctacctgctgctgaccaagcacggggaccgggcccgggacagcgaggacagctggggcacctgggaggcccagcctgtgaaggtggtgccccaggtggagaccgtggacaccctgcgctccatgcaggtggacaacctgctgctggtggtgatgcagagcgcccacctgaccatccagaggaaggccttccagcagagcattgagggcctgatgaccctgtgccaggagcagaccagcagccagcctgtgattgccaaggccctgcagcagctgaagaatgatgccctggagctgtgcaaccgcatcagcaatgccatcgacagagtggaccacatgttcaccagcgagtttgatgctgaggtggatgaaagtgaatctgtgaccctgcagcagtactaccgggaggccatgatccagggctacaactttggatttgagtaccacaaggaggtggtgcggctgatgtctggagagttccggcagaagatcggggacaagtacatcagctttgccaggaagtggatgaactacgtgctgaccaagtgtgagagcggccggggcacccggccccgctgggccacccagggctttgacttcctgcaggccatcgagcccgccttcatcagcgccctgcctgaagatgacttcctgagcctgcaggccctgatgaatgaatgcatcggccacgtgattggcaagccccacagccctgtgacaggcctgtacctggccatccacaggaacagcccccggcccatgaaggtgccccgctgccacagcgacccccccaacccccacctgatcatccccaccccagagggcttccggggcagctctgtgcctgaaaatgaccggctggccagcattgctgctgagctgcagttccgcagcctgagccgccacagcagccccacagaggagagagatgagcccgcctaccccaggggggacagcagcggcagcacccggcgctcctgggagctgcggaccctcatcagccagagcaaggacacagccagcaagctgggccccatcgaggccatccagaagtctgtgcggctgtttgaggagaagcgctaccgggagatgaggaggaagaacatcatcggccaggtgtgtgacacccccaagagctatgacaacgtgatgcacgtgggcctgaggaaggtgaccttcaagtggcagaggggcaacaagattggagagggccagtatggcaaggtgtacacctgcatctctgtggacacaggagagctgatggccatgaaggagatccgcttccagcccaatgaccacaagaccatcaaggagacagcagatgagctgaagatctttgagggcatcaagcaccccaacctggtgcgctactttggagtggagctgcaccgggaggagatgtacatcttcatggagtactgtgatgagggcaccctggaggaggtgtcccggctgggcctgcaggagcacgtgatccggctgtacagcaagcagatcaccatcgccatcaacgtgctgcatgaacatggaattgtgcaccgggacatcaagggggccaacatcttcctgaccagcagcggcctcatcaagctgggggactttggctgcagcgtgaagctgaagaacaatgcccagaccatgcctggagaggtgaacagcaccctgggcacagctgcctacatggcccctgaggtgatcacccgggccaagggggagggccacggccgggctgctgacatctggagcctgggctgtgtggtgattgagatggtgacaggcaagatctgcaaggacacagaatag

SEQ ID NO: 160173 - DNA, 324 bp, synthetic construct
  misc_feature 1..324: note = Description of Artificial Sequence: Synthetic coding sequence
  source 1..324: mol_type = other DNA
atggaggagcccccacctcctcctcctcctcctcctcctcctcctgagcctgagacagaaagtgagcctgagtgctgcctggccgcccggcaggagggcaccctgggggacagcgcctgcaagagccctgagagtgacctggaggacttcagtgatgagaccaacacagagaacctgtatggcaccagcccccccagcaccccccggcagatgaagaggatgagcaccaagcaccagaggaacaacgtgggccggcctgccagccgcagcaacctgaagggcgtgcggcagatcagccatgctgtgagcagcagcctgaactag

SEQ ID NO: 160174 - DNA, 1866 bp, synthetic construct
  misc_feature 1..1866: note = Description of Artificial Sequence: Synthetic coding sequence
  source 1..1866: mol_type = other DNA
atggagcaggtgcctgggggcagcctgagcgccctgctgcggagcaagtggggccccctgaaggacaatgagcagaccatcggcttctacaccaagcagatcctggagggcctgaagtacctgcatgacaaccagatcgtgcaccgggacatcaagggggacaacgtgctgatcaacacctacagcggcgtgctgaagatcagtgactttggcaccagcaagaggctggccggcatcaacccctgcacagagaccttcaccggcaccctgcagtacatggcccctgagatcatcgacaagggcccccggggctacggcaaggctgctgacatctggagcctgggctgcaccatcatcgagatggccaccgggaagccacccttctatgagctgggggagccccaggccgccatgttcaaggtgggcatgttcaaggtgcaccctgagatccctgagagcatgtctgctgaggccaaggccttcatcctgaagtgctttgagccagaccctgacaagagggcctgtgccaatgacctgctggtggatgagttcctgaaggtgagcagcaagaagaagaagacccagcccaagctgagcgccctgtctgctggcagcaatgagtacctgcggagcatcagcctgcctgtgcctgtgctggtggaggacaccagcagcagcagtgaatatggctctgtgtccccagacacagagctgaaggtggaccccttctccttcaagacccgggccaagagctgtggggagagagatgtgaagggcatccgcaccctcttcctgggcatcccagatgagaactttgaggaccacagcgccccacccagccctgaggagaaggacagcggcttcttcatgctgaggaaggacagcgagcggcgggccaccctgcaccgcatcctgacagaggaccaggacaagatcgtgaggaacctgatggagagcctggcccagggcgctgaggagcccaagctgaagtgggagcacatcaccaccctcatcgccagcctgcgggagtttgtgcgcagcacagacaggaagatcatcgccaccaccctgagcaagctgaagctggagctggactttgacagccacggcatcagccaggtgcaggtggtgctgtttggcttccaggatgctgtgaacaaggtgctgaggaaccacaacatcaagccccactggatgtttgccctggacagcatcatcaggaaggctgtgcagacagccatcaccatcctggtgcctgagctgcggccccacttcagcctggccagcgagagtgacacagctgaccaggaggacctggatgtggaggatgaccacgaggagcagcccagcaaccagacagtgagaagaccccaggccgtgattgaagatgctgtggccaccagcggcgtgtccaccctgagcagcacagtgtcccatgacagccagagcgcccacaggagcctgaatgtgcagctgggccgcatgaagattgagaccaaccggctgctggaggagctggtgaggaaggagaaggagctgcaggccctgctgcaccgggccatcgaggagaaggaccaggagatcaagcacctgaagctgaagagccagcccatcgagatccctgagctgcccgtcttccacctgaacagcagcggcaccaacacagaggacagcgagctgacagactggctgcgggtgaatggagcagatgaggacaccatcagccgcttcctggccgaggactacaccctgctggatgtgctgtactacgtgaccagagatgacctgaagtgcctgcggctgcggggcggcatgctgtgcaccctgtggaaggccatcatcgacttcaggaacaagcagacctag

SEQ ID NO: 160175 - DNA, 4125 bp, synthetic construct
  misc_feature 1..4125: note = Description of Artificial Sequence: Synthetic coding sequence
  source 1..4125: mol_type = other DNA
atgagcacagaagcagatgagggcatcaccttctctgtgcccccatttgcccccagcggcttctgcaccatccctgagggcggcatctgcagaagaggaggagctgctgctgtgggggagggggaggagcaccagctgcccccacctcctcctggcagcttctggaatgtggagagcgctgctgcccctggcatcggctgcccagctgccaccagcagcagcagcgccacccggggccggggcagctctgtgggcggcggcagcaggaggaccaccgtggcctacgtgatcaatgaggccagccagggccagctggtggtggccgagagcgaggccctgcagagcctgcgggaggcctgtgagaccgtgggcgccaccctggagaccctgcactttgggaagctggactttggagagaccaccgtgctggaccgcttctacaatgctgacattgctgtggtggagatgtctgatgccttccggcagcccagcctcttctaccacctgggcgtgcgggagagcttctccatggccaacaacatcatcctgtactgtgacaccaacagcgacagcctgcagagcctgaaggagatcatctgccagaagaacaccatgtgcaccggcaactacacctttgtgccctacatgatcaccccccacaacaaggtgtactgctgtgacagcagcttcatgaagggcctgacagagctgatgcagcccaactttgagctgctgctgggccccatctgcctgcccctggtggaccgcttcatccagctgctgaaggtggcccaggccagcagcagccagtacttccgggagagcatcctgaatgacatcaggaaggccaggaacctgtacaccgggaaggagctggccgctgagctggcccgcatccggcagagggtggacaacatcgaggtgctgacagctgacatcgtcatcaacctgctgctgagctacagagacatccaggactatgacagcatcgtgaagctggtggagaccctggagaagctgcccacctttgacctggccagccaccaccacgtgaagttccactacgcctttgccctgaacagaagaaacctgcccggggaccgggccaaggccctggacatcatgatccccatggtgcagagcgagggccaggtggccagtgacatgtactgcctggtgggccgcatctacaaggacatgttcctggacagcaacttcacagacacagagagccgggaccacggggcctcctggttcaagaaggcctttgaaagtgagcccaccctgcagagcggcatcaactatgctgtgctgctgctggccgccggccaccagtttgagagcagctttgagctgaggaaggtgggcgtgaagctgagcagcctgctgggcaagaagggcaacctggagaagctgcagagctactgggaggtgggcttcttcctgggcgcctctgtgctggccaatgaccacatgagggtcatccaggccagcgagaagctgttcaagctgaagaccccagcctggtacctgaagagcatcgtggagaccatcctgatctacaagcactttgtgaagctgaccacagagcagcctgtggccaagcaggagctggtggacttctggatggacttcctggtggaggccaccaagacagatgtgacagtggtgcgcttccctgtgctgatcctggagcccaccaagatctaccagcccagctacctgagcatcaacaatgaggtggaggagaagaccatcagcatctggcacgtgctgcctgatgacaagaagggcatccacgagtggaacttcagcgccagctctgtgcggggcgtgtccatcagcaagtttgaggagcgctgctgcttcctgtatgtgctgcacaacagtgatgacttccagatctacttctgcacagagctgcactgcaagaagttctttgagatggtgaacaccatcacagaggagaagggccgcagcacagaggagggggactgtgagagtgacctgctggagtatgactatgaatatgatgaaaatggagacagagtggtgctgggcaagggcacctatggaattgtgtatgccggccgggacctgagcaaccaggtgcgcatcgccatcaaggagatccctgagcgggacagccgctacagccagcccctgcacgaggagatcgccctgcacaagcacctgaagcacaagaacatcgtgcagtacctgggcagcttctctgaaaatggcttcatcaagatcttcatggagcaggtgcctgggggcagcctgagcgccctgctgcggagcaagtggggccccctgaaggacaatgagcagaccatcggcttctacaccaagcagatcctggagggcctgaagtacctgcatgacaaccagatcgtgcaccgggacatcaagggggacaacgtgctgatcaacacctacagcggcgtgctgaagatcagtgactttggcaccagcaagaggctggccggcatcaacccctgcacagagaccttcaccggcaccctgcagtacatggcccctgagatcatcgacaagggcccccggggctacggcaaggctgctgacatctggagcctgggctgcaccatcatcgagatggccaccgggaagccacccttctatgagctgggggagccccaggccgccatgttcaaggtgggcatgttcaaggtgcaccctgagatccctgagagcatgtctgctgaggccaaggccttcatcctgaagtgctttgagccagaccctgacaagagggcctgtgccaatgacctgctggtggatgagttcctgaaggtgagcagcaagaagaagaagacccagcccaagctgagcgccctgtctgctggcagcaatgagtacctgcggagcatcagcctgcctgtgcctgtgctggtggaggacaccagcagcagcagtgaatatggctctgtgtccccagacacagagctgaaggtggaccccttctccttcaagacccgggccaagagctgtggggagagagatgtgaagggcatccgcaccctcttcctgggcatcccagatgaaaattttgaggaccacagcgccccacccagccctgaggagaaggacagcggcttcttcatgctgaggaaggacagcgagcggcgggccaccctgcaccgcatcctgacagaggaccaggacaagatcgtgaggaacctgatggagagcctggcccagggcgctgaggagcccaagctgaagtgggagcacatcaccaccctgattgccagcctgcgggagtttgtgcgcagcacagacaggaagatcatcgccaccaccctgagcaagctgaagctggagctggactttgacagccacggcatcagccaggtgcaggtggtgctgtttggcttccaggatgctgtgaacaaggtgctgaggaaccacaacatcaagccccactggatgtttgccctggacagcatcatcaggaaggctgtgcagacagccatcaccatcctggtgcctgagctgcggccccacttcagcctggccagcgagagtgacacagctgaccaggaggacctggatgtggaggatgaccacgaggagcagcccagcaaccagacagtgcggcggccccaggccgtgattgaagatgctgtggccaccagcggcgtgtccaccctgagcagcacagtgtcccatgacagccagagcgcccacaggagcctgaatgtgcagctgggccgcatgaagattgagaccaaccggctgctggaggagctggtgaggaaggagaaggagctgcaggccctgctgcaccgggccatcgaggagaaggaccaggagatcaagcacctgaagctgaagagccagcccatcgagatccctgagctgcctgtgttccacctgaacagcagcggcaccaacacagaagattctgagctgacagactggctgcgggtgaatggagcagatgaggacaccatcagccgcttcctggccgaggactacaccctgctggatgtgctgtactacgtgaccagagatgacctgaagtgcctgcggctgcggggcggcatgctgtgcaccctgtggaaggccatcatcgacttcaggaacaagcagacctag

SEQ ID NO: 160176 - DNA, 3771 bp, synthetic construct
  misc_feature 1..3771: note = Description of Artificial Sequence: Synthetic coding sequence
  source 1..3771: mol_type = other DNA
accctgcagagggccagcggggccgccacagaggccccccggcgctctgagcccccacctggcagcggcgtgcccagcggggagcgggcccctgagaggagaagaagaagaggaggagagggcgccgccagagatggcagctgcctggcccggcgggcccggagcagccctgagctgtggctggcccggcgctgtggctgggccggagatgctgctgctgtggccgcccggcctggagagatgagcacagaagcagatgagggcatcaccttctctgtgcccccatttgcccccagcggcttctgcaccatccctgagggcggcatctgcagaagaggaggagctgctgctgtgggggagggggaggagcaccagctgcccccacctcctcctggcagcttctggaatgtggagagcgctgctgcccctggcatcggctgcccagctgccaccagcagcagcagcgccacccggggccggggcagctctgtgggcggcggcagcaggaggaccaccgtggcctacgtgatcaatgaggccagccagggccagctggtggtggccgagagcgaggccctgcagagcctgcgggaggcctgtgagaccgtgggcgccaccctggagaccctgcactttgggaagctggactttggagagaccaccgtgctggaccgcttctacaatgctgacattgctgtggtggagatgtctgatgccttccggcagcccagcctcttctaccacctgggcgtgcgggagagcttctccatggccaacaacatcatcctgtactgtgacaccaacagcgacagcctgcagagcctgaaggagatcatctgccagaagaacaccatgtgcaccggcaactacacctttgtgccctacatgatcaccccccacaacaaggtgtactgctgtgacagcagcttcatgaagggcctgacagagctgatgcagcccaactttgagctgctgctgggccccatctgcctgcccctggtggaccgcttcatccagctgctgaaggtggcccaggccagcagcagccagtacttccgggagagcatcctgaatgacatcaggaaggccaggaacctgtacaccgggaaggagctggccgctgagctggcccgcatccggcagagggtggacaacatcgaggtgctgacagctgacatcgtcatcaacctgctgctgagctacagagacatccaggactatgacagcatcgtgaagctggtggagaccctggagaagctgcccacctttgacctggccagccaccaccacgtgaagttccactacgcctttgccctgaacagaagaaacctgcccggggaccgggccaaggccctggacatcatgatccccatggtgcagagcgagggccaggtggccagtgacatgtactgcctggtgggccgcatctacaaggacatgttcctggacagcaacttcacagacacagagagccgggaccacggggcctcctggttcaagaaggcctttgaaagtgagcccaccctgcagagcggcatcaactatgctgtgctgctgctggccgccggccaccagtttgagagcagctttgagctgaggaaggtgggcgtgaagctgagcagcctgctgggcaagaagggcaacctggagaagctgcagagctactgggaggtgggcttcttcctgggcgcctctgtgctggccaatgaccacatgagggtcatccaggccagcgagaagctgttcaagctgaagaccccagcctggtacctgaagagcatcgtggagaccatcctgatctacaagcactttgtgaagctgaccacagagcagcctgtggccaagcaggagctggtggacttctggatggacttcctggtggaggccaccaagacagatgtgacagtggtgcgcttccctgtgctgatcctggagcccaccaagatctaccagcccagctacctgagcatcaacaatgaggtggaggagaagaccatcagcatctggcacgtgctgcctgatgacaagaagggcatccacgagtggaacttcagcgccagctctgtgcggggcgtgtccatcagcaagtttgaggagcgctgctgcttcctgtatgtgctgcacaacagtgatgacttccagatctacttctgcacagagctgcactgcaagaagttctttgagatggtgaacaccatcacagaggagaagggccgcagcacagaggagggggactgtgagagtgacctgctggagtatgactatgaatatgatgaaaatggagacagagtggtgctgggcaagggcacctatggaattgtgtatgccggccgggacctgagcaaccaggtgcgcatcgccatcaaggagatccctgagcgggacagccgctacagccagcccctgcacgaggagatcgccctgcacaagcacctgaagcacaagaacatcgtgcagtacctgggcagcttctctgaaaatggcttcatcaagatcttcatggagcaggtgcctgggggcagcctgagcgccctgctgcggagcaagtggggccccctgaaggacaatgagcagaccatcggcttctacaccaagcagatcctggagggcctgaagtacctgcatgacaaccagatcgtgcaccgggacatcaagggggacaacgtgctgatcaacacctacagcggcgtgctgaagatcagtgactttggcaccagcaagaggctggccggcatcaacccctgcacagagaccttcaccggcaccctgcagtacatggcccctgagatcatcgacaagggcccccggggctacggcaaggctgctgacatctggagcctgggctgcaccatcatcgagatggccaccgggaagccacccttctatgagctgggggagccccaggccgccatgttcaaggtgggcatgttcaaggtgcaccctgagatccctgagagcatgtctgctgaggccaaggccttcatcctgaagtgctttgagccagaccctgacaagagggcctgtgccaatgacctgctggtggatgagttcctgaaggtgagcagcaagaagaagaagacccagcccaagctgagtgacctgagcatcgcccaggccgagtacctgcggagcatcagcctgcctgtgcctgtgctggtggaggacaccagcagcagcagtgaatatggctctgtgtccccagacacagagctgaaggtggaccccttctccttcaagacccgggccaagagctgtggggagagagatgtgaagggcatccgcaccctcttcctgggcatcccagatgaaaattttgaggaccacagcgccccacccagccctgaggagaaggacagcggcttcttcatgctgaggaaggacagcgagcggcgggccaccctgcaccgcatcctgacagaggaccaggacaagatcgtgaggaacctgatggagagcctggcccagggcgctgaggagcccaagctgaagtgggagcacatcaccaccctgattgccagcctgcgggagtttgtgcgcagcacagacaggaagatcatcgccaccaccctgagcaagctgaagctggagctggactttgacagccacggcatcagccaggtgcaggtggtgctgtttggcttccaggatgctgtgaacaaggtgctgaggaaccacaacatcaagccccactggatgtttgccctggacagcatcatcaggaaggctgtgcagacagccatcaccatcctggtgcccggcatcaagccctag

SEQ ID NO: 160177 - DNA, 3867 bp, synthetic construct
  misc_feature 1..3867: note = Description of Artificial Sequence: Synthetic coding sequence
  source 1..3867: mol_type = other DNA
atggccggcccctgccccaggtctggagctgagagagctggcagctgctggcaggaccccctggccgtggccctgagccggggccggcagctggccgcccctcctggccggggctgtgcccggagccggcccctgtctgtggtgtatgtgctgacccgggagccccagcccggcctggagccccgggagggcacagaagctgagcccctgcccctgcgctgcctgcgggaggcctgtgcccaggtgccccggccccggcccccaccccagctgcggagcctgcccttcggcaccctggagctgggggacacagctgccctggatgccttctacaatgctgatgtggtggtgctggaggtgagcagcagcctggtgcagcccagcctcttctaccacctgggcgtgcgggagagcttctccatgaccaacaacgtgctgctgtgcagccaggccgacctgcctgacctgcaggccctgagagaagatgtgttccagaagaacagcgactgtgtgggcagctacaccctcatcccctacgtggtgacagccaccggccgggtgctgtgtggagatgctggcctgctgcggggcctggctgatggcctggtgcaggccggcgtgggcacagaggccctgctgacccccctggtgggccgcctggcccggctgctggaggccacccccacagacagctgtggctacttccgggagaccatccggcgggacatccggcaggcccgggagcgcttcagcggcccccagctgcggcaggagctggcccggctgcagaggcggctggacagcgtggagctgctgagcccagacatcatcatgaacctgctgctgagctacagagatgtgcaggactacagcgccatcatcgagctggtggagaccctgcaggccctgcccacctgtgatgtggccgagcagcacaacgtgtgcttccactacacctttgccctgaacagaagaaacagacctggggaccgggccaaggccctgtctgtgctgctgcccctggtgcagctggagggctctgtggccccagacctgtactgcatgtgtggccgcatctacaaggacatgttcttcagcagcggcttccaggatgctggccaccgggagcaggcctaccactggtacaggaaggcctttgatgtggagcccagcctgcacagcggcatcaatgctgctgtgctgctgattgctgctggccagcactttgaggacagcaaggagctgcggctcatcggcatgaagctgggctgcctgctggccaggaagggctgtgtggagaagatgcagtactactgggatgtgggcttctacctgggcgcccagatcctggccaatgaccccacccaggtggtgctggccgctgagcagctgtacaagctgaatgcccccatctggtacctggtgtctgtgatggagaccttcctgctgtaccagcacttccggcccaccccagagcccccaggcggccccccaagaagagcccacttctggctgcacttcctgctgcagagctgccagcccttcaagacagcctgtgcccagggcgaccagtgcctggtgctggtgctggagatgaacaaggtgctgctgcctgccaagctggaggtgcggggcacagatcctgtgtccacagtgaccctgagcctgctggagcctgagacccaggacatccccagctcctggaccttccctgtggccagcatctgtggggtgtctgccagcaagagagatgagcgctgctgcttcctgtatgccctgcccccagcccaggatgtgcagctgtgcttccccagcgtgggccactgccagtggttctgtggcctcatccaggcctgggtgaccaacccagacagcacagccccagctgaggaggccgagggcgctggggagatgctggagtttgattatgagtacacagagaccggggagcggctggtgctgggcaagggcacctatggagtggtgtatgccggccgggacagacacaccagggtgcgcatcgccatcaaggagatccctgagcgggacagccgcttcagccagcccctgcacgaggagatcgccctgcaccggcggctgcggcacaagaacatcgtgcgctacctgggcagcgccagccagggcggctacctgaagatcttcatggaggaggtgcctgggggcagcctgagcagcctgctgcggtctgtgtggggccccctgaaggacaatgaaagcaccatctccttctacacccggcagatcctgcagggcctgggctacctgcatgacaaccacatcgtgcaccgggacatcaagggggacaacgtgctgatcaacaccttcagcggcctgctgaagatcagtgactttggcaccagcaagaggctggccggcatcaccccctgcacagagaccttcaccggcaccctgcagtacatggcccctgagatcatcgaccagggcccccggggctacggcaaggctgctgacatctggagcctgggctgcaccgtcatcgagatggccaccggccggccccccttccacgagctgggcagcccccaggccgccatgttccaggtgggcatgtacaaggtgcacccccccatgcccagcagcctgtctgctgaggcccaggccttcctgctgcggacctttgagccagacccccggctgcgggccagcgcccagaccctgctgggggaccccttcctgcagcccgggaagaggagccgcagccccagcagccccaggcatgccccccggcccagtgatgcccccagcgccagccccaccccatctgccaacagcaccacccagagccagaccttcccctgcccccaggcccccagccagcacccccccagcccccccaagcgctgcctgtcctatggaggcaccagccagctgcgggtgcctgaggagcctgctgctgaggagcccgccagccctgaggagagcagcggcctgagcctgctgcaccaggagagcaagaggcgggccatgctggccgctgtgctggagcaggagctgcctgccctggccgagaacctgcaccaggagcagaagcaggagcagggcgcccggctgggcagaaatcatgtggaggagctgctgcgctgcctgggcgcccacatccacacccccaacagacggcagctggcccaggagctgcgggccctgcagggccgcctgcgggcccagggcctgggccctgccctgctgcaccggcccctgtttgccttcccagatgctgtgaagcagatcctgaggaagaggcagatccggccccactggatgtttgtgctggacagcctgctgagcagagctgtgcgggccgccctgggcgtgctgggccctgaggtggagaaggaggccgtgagccccaggtctgaggagctgagcaatgaaggagacagccagcagagccctggccagcagagccccctgcctgtggagcctgagcagggccctgcccccctgatggtgcagctgagcctgctgcgggcagagacagaccggctgcgggagatcctggccggcaaggagcgggagtaccaggccctggtgcagagggccctgcagaggctgaatgaggaggcccggacctacgtgctggcccctgagcccccaacagccctgagcacagaccagggcctggtgcagtggctgcaggagctgaatgtggacagcggcaccatccagatgctgctgaaccacagcttcaccctgcacaccctgctgacctacgccaccagagatgacctgatctacacccgcatccggggcggcatggtgtgccgcatctggagggccatcctggcccagagagctggcagcacccctgtgaccagcggcccctag

SEQ ID NO: 160178 - DNA, 315 bp, synthetic construct
  misc_feature 1..315: note = Description of Artificial Sequence: Synthetic coding sequence
  source 1..315: mol_type = other DNA
atggtgcagctgagcctgctgcgggcagagacagaccggctgcgggagatcctggccggcaaggagcgggagtaccaggccctggtgcagagggccctgcagaggctgaatgaggaggcccggacctacgtgctggcccctgagcccccaacagccctgagcacagaccagggcctggtgcagtggctgcaggagctgaatgtggacagcggcaccatccagatgggcagagatggcatgccccacctggagggccacctgggcacagccagccgcatccacaccagccacctgtggaccctgcgggcagagtag

SEQ ID NO: 160179 - DNA, 3843 bp, synthetic construct
  misc_feature 1..3843: note = Description of Artificial Sequence: Synthetic coding sequence
  source 1..3843: mol_type = other DNA
atggccggcccctgccccaggtctggagctgagagagctggcagctgctggcaggaccccctggccgtggccctgagccggggccggcagctggccgcccctcctggccggggctgtgcccggagccggcccctgtctgtggtgtatgtgctgacccgggagccccagcccggcctggagccccgggagggcacagaagctgagcccctgcccctgcgctgcctgcgggaggcctgtgcccaggtgccccggccccggcccccaccccagctgcggagcctgcccttcggcaccctggagctgggggacacagctgccctggatgccttctacaatgctgatgtggtggtgctggaggtgagcagcagcctggtgcagcccagcctcttctaccacctgggcgtgcgggagagcttctccatgaccaacaacgtgctgctgtgcagccaggccgacctgcctgacctgcaggccctgcgggactgtgtgggcagctacaccctcatcccctacgtggtgacagccaccggccgggtgctgtgtggagatgctggcctgctgcggggcctggctgatggcctggtgcaggccggcgtgggcacagaggccctgctgacccccctggtgggccgcctggcccggctgctggaggccacccccacagacagctgtggctacttccgggagaccatccggcgggacatccggcaggcccgggagcgcttcagcggcccccagctgcggcaggagctggcccggctgcagaggcggctggacagcgtggagctgctgagcccagacatcatcatgaacctgctgctgagctacagagatgtgcaggactacagcgccatcatcgagctggtggagaccctgcaggccctgcccacctgtgatgtggccgagcagcacaacgtgtgcttccactacacctttgccctgaacagaagaaacagacctggggaccgggccaaggccctgtctgtgctgctgcccctggtgcagctggagggctctgtggccccagacctgtactgcatgtgtggccgcatctacaaggacatgttcttcagcagcggcttccaggatgctggccaccgggagcaggcctaccactggtacaggaaggcctttgatgtggagcccagcctgcacagcggcatcaatgctgctgtgctgctgattgctgctggccagcactttgaggacagcaaggagctgcggctcatcggcatgaagctgggctgcctgctggccaggaagggctgtgtggagaagatgcagtactactgggatgtgggcttctacctgggcgcccagatcctggccaatgaccccacccaggtggtgctggccgctgagcagctgtacaagctgaatgcccccatctggtacctggtgtctgtgatggagaccttcctgctgtaccagcacttccggcccaccccagagcccccaggcggccccccaagaagagcccacttctggctgcacttcctgctgcagagctgccagcccttcaagacagcctgtgcccagggcgaccagtgcctggtgctggtgctggagatgaacaaggtgctgctgcctgccaagctggaggtgcggggcacagatcctgtgtccacagtgaccctgagcctgctggagcctgagacccaggacatccccagctcctggaccttccctgtggccagcatctgtggggtgtctgccagcaagagagatgagcgctgctgcttcctgtatgccctgcccccagcccaggatgtgcagctgtgcttccccagcgtgggccactgccagtggttctgtggcctcatccaggcctgggtgaccaacccagacagcacagccccagctgaggaggccgagggcgctggggagatgctggagtttgattatgagtacacagagaccggggagcggctggtgctgggcaagggcacctatggagtggtgtatgccggccgggacagacacaccagggtgcgcatcgccatcaaggagatccctgagcgggacagccgcttcagccagcccctgcacgaggagatcgccctgcaccggcggctgcggcacaagaacatcgtgcgctacctgggcagcgccagccagggcggctacctgaagatcttcatggaggaggtgcctgggggcagcctgagcagcctgctgcggtctgtgtggggccccctgaaggacaatgaaagcaccatctccttctacacccggcagatcctgcagggcctgggctacctgcatgacaaccacatcgtgcaccgggacatcaagggggacaacgtgctgatcaacaccttcagcggcctgctgaagatcagtgactttggcaccagcaagaggctggccggcatcaccccctgcacagagaccttcaccggcaccctgcagtacatggcccctgagatcatcgaccagggcccccggggctacggcaaggctgctgacatctggagcctgggctgcaccgtcatcgagatggccaccggccggccccccttccacgagctgggcagcccccaggccgccatgttccaggtgggcatgtacaaggtgcacccccccatgcccagcagcctgtctgctgaggcccaggccttcctgctgcggacctttgagccagacccccggctgcgggccagcgcccagaccctgctgggggaccccttcctgcagcccgggaagaggagccgcagccccagcagccccaggcatgccccccggcccagtgatgcccccagcgccagccccaccccatctgccaacagcaccacccagagccagaccttcccctgcccccaggcccccagccagcacccccccagcccccccaagcgctgcctgtcctatggaggcaccagccagctgcgggtgcctgaggagcctgctgctgaggagcccgccagccctgaggagagcagcggcctgagcctgctgcaccaggagagcaagaggcgggccatgctggccgctgtgctggagcaggagctgcctgccctggccgagaacctgcaccaggagcagaagcaggagcagggcgcccggctgggcagaaatcatgtggaggagctgctgcgctgcctgggcgcccacatccacacccccaacagacggcagctggcccaggagctgcgggccctgcagggccgcctgcgggcccagggcctgggccctgccctgctgcaccggcccctgtttgccttcccagatgctgtgaagcagatcctgaggaagaggcagatccggccccactggatgtttgtgctggacagcctgctgagcagagctgtgcgggccgccctgggcgtgctgggccctgaggtggagaaggaggccgtgagccccaggtctgaggagctgagcaatgaaggagacagccagcagagccctggccagcagagccccctgcctgtggagcctgagcagggccctgcccccctgatggtgcagctgagcctgctgcgggcagagacagaccggctgcgggagatcctggccggcaaggagcgggagtaccaggccctggtgcagagggccctgcagaggctgaatgaggaggcccggacctacgtgctggcccctgagcccccaacagccctgagcacagaccagggcctggtgcagtggctgcaggagctgaatgtggacagcggcaccatccagatgctgctgaaccacagcttcaccctgcacaccctgctgacctacgccaccagagatgacctgatctacacccgcatccggggcggcatggtgtgccgcatctggagggccatcctggcccagagagctggcagcacccctgtgaccagcggcccctag

SEQ ID NO: 160180 - DNA, 2397 bp, synthetic construct
  misc_feature 1..2397: note = Description of Artificial Sequence: Synthetic coding sequence
  source 1..2397: mol_type = other DNA
tgaatgaacctgctgctgagctacagagatgtgcaggactacagcgccatcatcgagctggtggagaccctgcaggccctgcccacctgtgatgtggccgagcagcacaacgtgtgcttccactacacctttgccctgaacagaagaaacagacctggggaccgggccaaggccctgtctgtgctgctgcccctggtgcagctggagggctctgtggccccagacctgtactgcatgtgtggccgcatctacaaggacatgttcttcagcagcggcttccaggatgctggccaccgggagcaggcctaccactggtacaggaaggcctttgatgtggagcccagcctgcacagcggcatcaatgctgctgtgctgctgattgctgctggccagcactttgaggacagcaaggagctgcggctcatcggcatgaagctgggctgcctgctggccaggaagggctgtgtggagaagatgcagtactactgggatgtgggcttctacctgggcgcccagatcctggccaatgaccccacccaggtggtgctggccgctgagcagctgtacaagctgaatgcccccatctggtacctggtgtctgtgatggagaccttcctgctgtaccagcacttccggcccaccccagagcccccaggcggccccccaagaagagcccacttctggctgcacttcctgctgcagagctgccagcccttcaagacagcctgtgcccagggcgaccagtgcctggtgctggtgctggagatgaacaaggtgctgctgcctgccaagctggaggtgcggggcacagatcctgtgtccacagtgaccctgagcctgctggagcctgagacccaggacatccccagctcctggaccttccctgtggccagcatctgtggggtgtctgccagcaagagagatgagcgctgctgcttcctgtatgccctgcccccagcccaggatgtgcagctgtgcttccccagcgtgggccactgccagtggttctgtggcctcatccaggcctgggtgaccaacccagacagcacagccccagctgaggaggccgagggcgctggggagatgctggagtttgattatgagtacacagagaccggggagcggctggtgctgggcaagggcacctatggagtggtgtatgccggccgggacagacacaccagggtgcgcatcgccatcaaggagatccctgagcgggacagccgcttcagccagcccctgcacgaggagatcgccctgcaccggcggctgcggcacaagaacatcgtgcgctacctgggcagcgccagccagggcggctacctgaagatcttcatggaggaggtgcctgggggcagcctgagcagcctgctgcggtctgtgtggggccccctgaaggacaatgaaagcaccatctccttctacacccggcagatcctgcagggcctgggctacctgcatgacaaccacatcgtgcaccgggacatcaagggggacaacgtgctgatcaacaccttcagcggcctgctgaagatcagtgactttggcaccagcaagaggctggccggcatcaccccctgcacagagaccttcaccggcaccctgcagtacatggcccctgagatcatcgaccagggcccccggggctacggcaaggctgctgacatctggagcctgggctgcaccgtcatcgagatggccaccggccggccccccttccacgagctgggcagcccccaggccgccatgttccaggtgggcatgtacaaggtgcacccccccatgcccagcagcctgtctgctgaggcccaggccttcctgctgcggacctttgagccagacccccggctgcgggccagcgcccagaccctgctgggggaccccttcctgcagcccgggaagaggagccgcagccccagcagccccaggcatgccccccggcccagtgatgcccccagcgccagccccaccccatctgccaacagcaccacccagagccagaccttcccctgcccccaggcccccagccagcacccccccagcccccccaagcgctgcctgtcctatggaggcaccagccagctgcgggtgcctgaggagcctgctgctgaggagcccgccagccctgaggagagcagcggcctgagcctgctgcaccaggagagcaagaggcgggccatgctggccgctgtgctggagcaggagctgcctgccctggccgagaacctgcaccaggagcagaagcaggagcagggcgcccggctgggcagaaatcatgtggaggagctgctgcgctgcctgggcgcccacatccacacccccaacagacggcagctggcccaggagctgcgggccctgcagggctggatgaatggagaagataaaggcagcttctag

SEQ ID NO: 160181 - DNA, 249 bp, synthetic construct
  misc_feature 1..249: note = Description of Artificial Sequence: Synthetic coding sequence
  source 1..249: mol_type = other DNA
tgagaataccaggccctggtgcagagggccctgcagaggctgaatgaggaggcccggacctacgtgctggcccctgagcccccaacagccctgagcacagaccagggcctggtgcagtggctgcaggagctgaatgtggacagcggcaccatccagatgggcagagatggcatgccccacctggagggccacctgggcacagccagccgcatccacaccagccacctgtggaccctgcgggcagagtag

SEQ ID NO: 160182 - DNA, 3867 bp, synthetic construct; identical to SEQ ID NO: 160177
  misc_feature 1..3867: note = Description of Artificial Sequence: Synthetic coding sequence
  source 1..3867: mol_type = other DNA

SEQ ID NO: 160183 - DNA, 2394 bp, synthetic construct
  misc_feature 1..2394: note = Description of Artificial Sequence: Synthetic coding sequence
  source 1..2394: mol_type = other DNA
atgaacctgctgctgagctacagagatgtgcaggactacagcgccatcatcgagctggtggagaccctgcaggccctgcccacctgtgatgtggccgagcagcacaacgtgtgcttccactacacctttgccctgaacagaagaaacagacctggggaccgggccaaggccctgtctgtgctgctgcccctggtgcagctggagggctctgtggccccagacctgtactgcatgtgtggccgcatctacaaggacatgttcttcagcagcggcttccaggatgctggccaccgggagcaggcctaccactggtacaggaaggcctttgatgtggagcccagcctgcacagcggcatcaatgctgctgtgctgctgattgctgctggccagcactttgaggacagcaaggagctgcggctgattggcatgaagctgggctgcctgctggccaggaagggctgtgtggagaagatgcagtactactgggatgtgggcttctacctgggcgcccagatcctggccaatgaccccacccaggtggtgctggccgctgagcagctgtacaagctgaatgcccccatctggtacctggtgtctgtgatggagaccttcctgctgtaccagcacttccggcccaccccagagcccccaggcggccccccccggcgggcccacttctggctgcacttcctgctgcagagctgccagcccttcaagacagcctgtgcccagggcgaccagtgcctggtgctggtgctggagatgaacaaggtgctgctgcctgccaagctggaggtgcggggcacagatcctgtgtccacagtgaccctgagcctgctggagcctgagacccaggacatccccagctcctggaccttccctgtggccagcatctgtggggtgtctgccagcaagagagatgagcgctgctgcttcctgtatgccctgcccccagcccaggatgtgcagctgtgcttccccagcgtgggccactgccagtggttctgtggcctcatccaggcctgggtgaccaacccagacagcacagccccagctgaggaggccgagggcgctggggagatgctggagtttgattatgagtacacagaaacaggagagcggctggtgctgggcaagggcacctacggcgtggtgtatgccggccgggacagacacaccagggtgagaattgccatcaaggagatccctgagcgggacagccgcttcagccagcccctgcacgaggagatcgccctgcaccggcggctgcggcacaagaacatcgtgcgctacctgggcagcgccagccagggcggctacctgaagatcttcatggaggaggtgcctgggggcagcctgagcagcctgctgcggtctgtgtggggccccctgaaggacaatgaaagcaccatctccttctacacccggcagatcctgcagggcctgggctacctgcatgacaaccacatcgtgcaccgggacatcaagggggacaacgtgctgatcaacaccttcagcggcctgctgaagatcagtgactttggcaccagcaagaggctggccggcatcaccccctgcacagagaccttcaccggcaccctgcagtacatggcccctgagatcatcgaccagggcccccggggctacggcaaggctgctgacatctggagcctgggctgcaccgtgattgagatggccaccggccggccccccttccacgagctgggcagcccccaggccgccatgttccaggtgggcatgtacaaggtgcacccccccatgcccagcagcctgtctgctgaggcccaggccttcctgctgcggacctttgagccagacccccggctgcgggccagcgcccagaccctgctgggggaccccttcctgcagcccgggaagaggagccgcagccccagcagccccaggcatgccccccggcccagtgatgcccccagcgccagccccacccccagcgccaacagcaccacccagagccagaccttcccctgcccccaggcccccagccagcacccccccagcccccccaagcgctgcctgtcctatggaggcaccagccagctgcgggtgcctgaggagcctgctgctgaggagcccgccagccctgaggagagcagcggcctgagcctgctgcaccaggagagcaagagaagagccatgctggccgctgtgctggagcaggagctgcctgccctggccgagaacctgcaccaggagcagaagcaggagcagggcgcccggctgggcaggaaccacgtggaggagctgctgcgctgcctgggcgcccacatccacacccccaacagacggcagctggcccaggagctgcgggccctgcagggctggatgaatggagaggacaagggcagcttctag

SEQ ID NO: 160184 - DNA, 783 bp, synthetic construct
  misc_feature 1..783: note = Description of Artificial Sequence: Synthetic coding sequence
  source 1..783: mol_type = other DNA
atggacatcgccagcaccaacaccagcaacaagagtgacaccaacatggagcaggtgcctgccaccaatgacaccatcaagaggctggagagcaagctgctgaagaaccaggccaagcagcagagcgagagcggccgcctgagcctgggcgccagccggggcagctctgtggagagcctgccccccaccagcgagggcaagaggatgtctgctgacatgtctgaaattgaggccagaattgctgccaccactggaaatggccagcccaggagaagaagcatccaggacctgactgtgactggaacagagcccggccaggtgagcagccgcagcagcagccccagcgtgaggatgatcaccaccagcggccccaccagcgagaagcccaccaggagccacccctggaccccagatgacagcacagacaccaacggcagtgacaacagcatccccatggcctacctgaccctggaccaccagctgcagcccctggccccctgccccaacagcaaggagagcatggctgtgtttgagcagcactgcaagatggcccaggagtacatgaaggtgcagacagagatcgccctgctgctgcagaggaagcaggagctggtggccgagctggaccaggatgagaaggaccagcagaacaccagccggctggtgcaggagcacaagaagctgctggatgagaacaagagcctgagcacctactaccagcagtgcaagaagcagctggaggtgatccgcagccagcagcagaagaggcagggcaccagctag

SEQ ID NO: 160185 - DNA, 1557 bp, synthetic construct
  misc_feature 1..1557: note = Description of Artificial Sequence: Synthetic coding sequence
  source 1..1557: mol_type = other DNA
atgagcacagccagcgctgccagcagcagcagcagcagcagcgctggggagatgattgaggcccccagccaggtgctgaactttgaggagattgactacaaggagattgaggtggaggaggtggtgggccgcggggcctttggagtggtgtgcaaggccaagtggagggccaaggatgtggccatcaagcagattgaaagtgaaagtgagaggaaggccttcatcgtggagctgcggcagctgagccgggtgaaccaccccaacatcgtgaagctgtatggagcctgcctgaaccctgtgtgcctggtgatggagtatgcagagggcggcagcctgtacaacgtgctgcatggagctgagcccctgccctactacacagctgcccacgccatgtcctggtgcctgcagtgcagccagggcgtggcctacctgcacagcatgcagcccaaggccctgatccaccgggacctgaagccacccaacctgctgctggtggccggcggcaccgtgctgaagatctgtgactttggaacagcctgtgacatccagacccacatgaccaacaacaagggcagcgctgcctggatggcccctgaggtgtttgagggcagcaactacagcgagaagtgtgatgtgttctcctggggcatcatcctgtgggaggtgatcaccaggaggaagccctttgatgagatcggcggccctgccttccgcatcatgtgggccgtgcacaacggcaccaggcctcctctcatcaagaacctgcccaagcccatcgagagcctgatgacccgctgctggagcaaggaccccagccagaggcccagcatggaggagatcgtgaagatcatgacccacctgatgagatacttccctggagcagatgagcccctgcagtacccctgccagtacagtgatgagggccagagcaacagcgccaccagcacaggcagcttcatggacatcgccagcaccaacaccagcaacaagagtgacaccaacatggagcaggtgcctgccaccaatgacaccatcaagaggctggagagcaagctgctgaagaaccaggccaagcagcagagcgagagcggccgcctgagcctgggcgccagccggggcagctctgtggagagcctgccccccaccagcgagggcaagaggatgtctgctgacatgtctgaaattgaggccagaattgctgccaccacagcctacagcaagcccaagaggggccacaggaagacagccagctttggaaacatcctggatgtgcctgagatcgtcatctctggaaatggccagcccaggagaagaagcatccaggacctgactgtgactggaacagagcccggccaggtgagcagccgcagcagcagccccagcgtgaggatgatcaccaccagcggccccaccagcgagaagcccaccaggagccacccctggaccccagatgacagcacagacaccaacggcagtgacaacagcatccccatggcctacctgaccctggaccaccagctgcaggcccggaccagctgcaggactggacctggatag

SEQ ID NO: 160186 - DNA, 1476 bp, synthetic construct
  misc_feature 1..1476: note = Description of Artificial Sequence: Synthetic coding sequence
  source 1..1476: mol_type = other DNA
atgagcacagccagcgctgccagcagcagcagcagcagcagcgctggggagatgattgaggcccccagccaggtgctgaactttgaggagattgactacaaggagattgaggtggaggaggtggtgggccgcggggcctttggagtggtgtgcaaggccaagtggagggccaaggatgtggccatcaagcagattgaaagtgaaagtgagaggaaggccttcatcgtggagctgcggcagctgagccgggtgaaccaccccaacatcgtgaagctgtatggagcctgcctgaaccctgtgtgcctggtgatggagtatgcagagggcggcagcctgtacaacgtgctgcatggagctgagcccctgccctactacacagctgcccacgccatgtcctggtgcctgcagtgcagccagggcgtggcctacctgcacagcatgcagcccaaggccctgatccaccgggacctgaagccacccaacctgctgctggtggccggcggcaccgtgctgaagatctgtgactttggaacagcctgtgacatccagacccacatgaccaacaacaagggcagcgctgcctggatggcccctgaggtgtttgagggcagcaactacagcgagaagtgtgatgtgttctcctggggcatcatcctgtgggaggtgatcaccaggaggaagccctttgatgagatcggcggccctgccttccgcatcatgtgggccgtgcacaacggcaccaggcctcctctcatcaagaacctgcccaagcccatcgagagcctgatgacccgctgctggagcaaggaccccagccagaggcccagcatggaggagatcgtgaagatcatgacccacctgatgagatacttccctggagcagatgagcccctgcagtacccctgccagtacagtgatgagggccagagcaacagcgccaccagcacaggcagcttcatggacatcgccagcaccaacaccagcaacaagagtgacaccaacatggagcaggtgcctgccaccaatgacaccatcaagaggctggagagcaagctgctgaagaaccaggccaagcagcagagcgagagcggccgcctgagcctgggcgccagccggggcagctctgtggagagcctgccccccaccagcgagggcaagaggatgtctgctgacatgtctgaaattgaggccagaattgctgccaccactggaaatggccagccccggcggcgcagcatccaggacctgactgtgactggaacagagcccggccaggtgagcagccgcagcagcagccccagcgtgaggatgatcaccaccagcggccccaccagcgagaagcccaccaggagccacccctggaccccagatgacagcacagacaccaatggaagtgacaacagcatccccatggcctacctgaccctggaccaccagctgcaggcccggaccagctgcaggacaggccctggatag

SEQ ID NO: 160187 - DNA, 1821 bp, synthetic construct
  misc_feature 1..1821: note = Description of Artificial Sequence: Synthetic coding sequence
  source 1..1821: mol_type = other DNA
atgagcacagccagcgctgccagcagcagcagcagcagcagcgctggggagatgattgaggcccccagccaggtgctgaactttgaggagattgactacaaggagattgaggtggaggaggtggtgggccgcggggcctttggagtggtgtgcaaggccaagtggagggccaaggatgtggccatcaagcagattgaaagtgaaagtgagaggaaggccttcatcgtggagctgcggcagctgagccgggtgaaccaccccaacatcgtgaagctgtatggagcctgcctgaaccctgtgtgcctggtgatggagtatgcagagggcggcagcctgtacaacgtgctgcatggagctgagcccctgccctactacacagctgcccacgccatgtcctggtgcctgcagtgcagccagggcgtggcctacctgcacagcatgcagcccaaggccctgatccaccgggacctgaagccacccaacctgctgctggtggccggcggcaccgtgctgaagatctgtgactttggaacagcctgtgacatccagacccacatgaccaacaacaagggcagcgctgcctggatggcccctgaggtgtttgagggcagcaactacagcgagaagtgtgatgtgttctcctggggcatcatcctgtgggaggtgatcaccaggaggaagccctttgatgagatcggcggccctgccttccgcatcatgtgggccgtgcacaacggcaccaggcctcctctcatcaagaacctgcccaagcccatcgagagcctgatgacccgctgctggagcaaggaccccagccagaggcccagcatggaggagatcgtgaagatcatgacccacctgatgagatacttccctggagcagatgagcccctgcagtacccctgccagtacagtgatgagggccagagcaacagcgccaccagcacaggcagcttcatggacatcgccagcaccaacaccagcaacaagagtgacaccaacatggagcaggtgcctgccaccaatgacaccatcaagaggctggagagcaagctgctgaagaaccaggccaagcagcagagcgagagcggccgcctgagcctgggcgccagccggggcagctctgtggagagcctgccccccaccagcgagggcaagaggatgtctgctgacatgtctgaaattgaggccagaattgctgccaccacagcctacagcaagcccaagaggggccacaggaagacagccagctttggaaacatcctggatgtgcctgagatcgtcatctctggaaatggccagcccaggagaagaagcatccaggacctgactgtgactggaacagagcccggccaggtgagcagccgcagcagcagccccagcgtgaggatgatcaccaccagcggccccaccagcgagaagcccaccaggagccacccctggaccccagatgacagcacagacaccaacggcagtgacaacagcatccccatggcctacctgaccctggaccaccagctgcagcccctggccccctgccccaacagcaaggagagcatggctgtgtttgagcagcactgcaagatggcccaggagtacatgaaggtgcagacagagatcgccctgctgctgcagaggaagcaggagctggtggccgagctggaccaggatgagaaggaccagcagaacaccagccggctggtgcaggagcacaagaagctgctggatgagaacaagagcctgagcacctactaccagcagtgcaagaagcagctggaggtgatccgcagccagcagcagaagaggcagggcaccagctag

SEQ ID NO: 160188 - DNA, 1740 bp, synthetic construct
  misc_feature 1..1740: note = Description of Artificial Sequence: Synthetic coding sequence
  source 1..1740: mol_type = other DNA
atgagcacagccagcgctgccagcagcagcagcagcagcagcgctggggagatgattgaggcccccagccaggtgctgaactttgaggagattgactacaaggagattgaggtggaggaggtggtgggccgcggggcctttggagtggtgtgcaaggccaagtggagggccaaggatgtggccatcaagcagattgaaagtgaaagtgagaggaaggccttcatcgtggagctgcggcagctgagccgggtgaaccaccccaacatcgtgaagctgtatggagcctgcctgaaccctgtgtgcctggtgatggagtatgcagagggcggcagcctgtacaacgtgctgcatggagctgagcccctgccctactacacagctgcccacgccatgtcctggtgcctgcagtgcagccagggcgtggcctacctgcacagcatgcagcccaaggccctgatccaccgggacctgaagccacccaacctgctgctggtggccggcggcaccgtgctgaagatctgtgactttggaacagcctgtgacatccagacccacatgaccaacaacaagggcagcgctgcctggatggcccctgaggtgtttgagggcagcaactacagcgagaagtgtgatgtgttctcctggggcatcatcctgtgggaggtgatcaccaggaggaagccctttgatgagatcggcggccctgccttccgcatcatgtgggccgtgcacaacggcaccaggcctcctctcatcaagaacctgcccaagcccatcgagagcctgatgacccgctgctggagcaaggaccccagccagaggcccagcatggaggagatcgtgaagatcatgacccacctgatgagatacttccctggagcagatgagcccctgcagtacccctgccagtacagtgatgagggccagagcaacagcgccaccagcacaggcagcttcatggacatcgccagcaccaacaccagcaacaagagtgacaccaacatggagcaggtgcctgccaccaatgacaccatcaagaggctggagagcaagctgctgaagaaccaggccaagcagcagagcgagagcggccgcctgagcctgggcgccagccggggcagctctgtggagagcctgccccccaccagcgagggcaagaggatgtctgctgacatgtctgaaattgaggccagaattgctgccaccactggaaatggccagccccggcggcgcagcatccaggacctgactgtgactggaacagagcccggccaggtgagcagccgcagcagcagccccagcgtgaggatgatcaccaccagcggccccaccagcgagaagcccaccaggagccacccctggaccccagatgacagcacagacaccaatggaagtgacaacagcatccccatggcctacctgaccctggaccaccagctgcagcccctggccccctgccccaacagcaaggagagcatggctgtgtttgagcagcactgcaagatggcccaggagtacatgaaggtgcagacagaaattgccctgctgctgcagaggaagcaggagctggtggccgagctggaccaggatgagaaggaccagcagaacaccagccggctggtgcaggagcacaagaagctgctggatgagaacaagagcctgagcacctactaccagcagtgcaagaagcagctggaggtgatccgcagccagcagcagaagaggcagggcaccagctag

SEQ ID NO: 160189 - DNA, 1257 bp, synthetic construct
  misc_feature 1..1257: note = Description of Artificial Sequence: Synthetic coding sequence
  source 1..1257: mol_type = other DNA
atgagcacagccagcgctgccagcagcagcagcagcagcagcgctggggagatgattgaggcccccagccaggtgctgaactttgaggagattgactacaaggagattgaggtggaggaggtggtgggccgcggggcctttggagtggtgtgcaaggccaagtggagggccaaggatgtggccatcaagcagattgaaagtgaaagtgagaggaaggccttcatcgtggagctgcggcagctgagccgggtgaaccaccccaacctgctgctggtggccggcggcaccgtgctgaagatctgtgactttggaacagcctgtgacatccagacccacatgaccaacaacaagggcagcgctgcctggatggcccctgaggtgtttgagggcagcaactacagcgagaagtgtgatgtgttctcctggggcatcatcctgtgggaggtgatcaccaggaggaagccctttgatgaaattggaggccctgccttccgcatcatgtgggccgtgcacaacggcacccggcccccactcatcaagaacctgcccaagcccatcgagagcctgatgacccgctgctggagcaaggaccccagccagaggcccagcatggaggagatcgtgaagatcatgacccacctgatgagatacttccctggagcagatgagcccctgcagtacccctgccagtacagtgatgagggccagagcaacagcgccaccagcacaggcagcttcatggacatcgccagcaccaacaccagcaacaagagtgacaccaacatggagcaggtgcctgccaccaatgacaccatcaagaggctggagagcaagctgctgaagaaccaggccaagcagcagagcgagagcggccgcctgagcctgggcgccagccggggcagctctgtggagagcctgccccccaccagcgagggcaagaggatgtctgctgacatgtctgaaattgaggccagaattgctgccaccactggaaatggccagcccaggagaagaagcatccaggacctgactgtgactggaacagagcccggccaggtgagcagccgcagcagcagccccagcgtgaggatgatcaccaccagcggccccaccagcgagaagcccaccaggagccacccctggaccccagatgacagcacagacaccaacggcagtgacaacagcatccccatggcctacctgaccctggaccaccagctgcaggcccggaccagctgcaggactggacctggatag

SEQ ID NO: 160190 - DNA, 1404 bp, synthetic construct
  misc_feature 1..1404: note = Description of Artificial Sequence: Synthetic coding sequence
  source 1..1404: mol_type = other DNA
atggagtacatgagcacaggcagtgacaacaaggaggagattgacctgctgatcaagcacctgaatgtgtctgatgtgattgacatcatggagaacctgtatgccagcgaggagcctgctgtgtatgagcccagcctgatgaccatgtgccaggacagcaaccagaatgatgagaggagcaagagcctgctgctgagcggccaggaggtgccctggctgagctctgtgcgctatggcaccgtggaggacctgctggcctttgccaaccacatcagcaacacagccaagcacttctacggccagaggccccaggagagcggcatcctgctgaacatggtgatcaccccccagaatggccgctaccagattgacagtgatgtgctgctgatcccctggaagctgacctacagaaatattggaagtgacttcatccccaggggggccttcggcaaggtgtacctggcccaggacatcaagaccaagaagaggatggcctgcaagctgatccctgtggaccagttcaagcccagtgatgtggagatccaggcctgcttcagacatgagaacattgctgagctgtatggagctgtgctgtggggcgagaccgtgcacctgttcatggaggccggggagggcggctctgtgctggagaagctggagagctgtggccccatgagggagtttgagatcatctgggtgaccaagcacgtgctgaagggcctggacttcctgcacagcaagaaggtgatccaccacgacatcaagcccagcaacatcgtgttcatgagcaccaaggctgtgctggtggactttggcctgtctgtgcagatgacagaagatgtgtacttccccaaggacctgcggggcacagagatctacatgagccctgaggtgatcctgtgccggggccacagcaccaaggctgacatctacagcctgggcgccaccctcatccacatgcagacaggcaccccaccctgggtgaagcgctaccccaggtctgcctaccccagctacctgtacatcatccacaagcaggccccacccctggaggacattgctgatgactgcagccctggcatgagggagctgattgaggccagcctggagaggaaccccaaccaccggcccagggctgctgacctgctgaagcatgaggccctgaaccccccccgggaggaccagccccgctgccagagcctggacagcgccctgctggagaggaagaggctgctgagcaggaaggagctggagctgcctgaaaatattgctgacagcagctgcaccggcagcacagaggagagcgagatgctgaagaggcagaggagcctgtacatcgacctgggcgccctggccggctacttcaacctggtgcggggcccccccaccctggagtatggatag

SEQ ID NO: 160191 - DNA, 1404 bp, synthetic construct; identical to SEQ ID NO: 160190
  misc_feature 1..1404: note = Description of Artificial Sequence: Synthetic coding sequence
  source 1..1404: mol_type = other DNA

SEQ ID NO: 160192 - DNA, 399 bp, synthetic construct
  misc_feature 1..399: note = Description of Artificial Sequence: Synthetic coding sequence
  source 1..399: mol_type = other DNA
atggagtacatgagcacaggcagtgacaacaaggaggagattgacctgctgatcaagcacctgaatgtgtctgatgtgattgacatcatggagaacctgtatgccagcgaggagcctgctgtgtatgagcccagcctgatgaccatgtgccaggacagcaaccagaatgatgagaggagcaagagcctgctgctgagcggccaggaggtgccctggctgagctctgtgcgctatggcaccgtggaggacctgctggcctttgccaaccacatcagcaacacagccaagcacttctacggccagaggccccaggagagcggcatcctgctgaacatggtgcgcttcttccccatctcctgggtgctgtgtgcccagctgagctactgcagcttcatctag

SEQ ID NO: 160193 - DNA, 1404 bp, synthetic construct; identical to SEQ ID NO: 160190
  misc_feature 1..1404: note = Description of Artificial Sequence: Synthetic coding sequence
  source 1..1404: mol_type = other DNA

SEQ ID NO: 160194 - DNA, 672 bp, synthetic construct
  misc_feature 1..672: note = Description of Artificial Sequence: Synthetic coding sequence
  source 1..672: mol_type = other DNA
atggagtacatgagcacaggcagtgacaacaaggaggagattgacctgctgatcaagcacctgaatgtgtctgatgtgattgacatcatggagaacctgtatgccagcgaggagcctgctgtgtatgagcccagcctgatgaccatgtgccaggacagcaaccagaatgatgagaggagcaagagcctgctgctgagcggccaggaggtgccctggctgagctctgtgcgctatggcaccgtggaggacctgctggcctttgccaaccacatcagcaacacagccaagcacttctacggccagaggccccaggagagcggcatcctgctgaacatggtgatcaccccccagaatggccgctaccagattgacagtgatgtgctgctgatcccctggaagctgacctacagaaatattggaagtgacttcatccccaggggggccttcggcaaggtgtacctggcccaggacatcaagaccaagaagaggatggcctgcaagctgatccctgtggaccagttcaagcccagtgatgtggagatccaggcctgcttcagacatgagaacattgctgagctgtatggagctgtgctgtggggcgagaccgtgcacctgttcatggaggccggggagggcggctctgtgctggagaagctggagagctgtggctag

SEQ ID NO: 160195 - DNA, 768 bp, synthetic construct
  misc_feature 1..768: note = Description of Artificial Sequence: Synthetic coding sequence
  source 1..768: mol_type = other DNA
atggagtacatgagcacaggcagtgacaacaaggaggagattgacctgctgatcaagcacctgaatgtgtctgatgtgattgacatcatggagaacctgtatgccagcgaggagcctgctgtgtatgagcccagcctgatgaccatgtgccaggacagcaaccagaatgatgagaggagcaagagcctgctgctgagcggccaggaggtgccctggctgagctctgtgcgctatggcaccgtggaggacctgctggcctttgccaaccacatcagcaacacagccaagcacttctacggccagaggccccaggagagcggcatcctgctgaacatggtgatcaccccccagaatggccgctaccagattgacagtgatgtgctgctgatcccctggaagctgacctacagaaatattggaagtgacttcatccccaggggggccttcggcaaggtgtacctggcccaggacatcaagaccaagaagaggatggcctgcaagctgatccctgtggaccagttcaagcccagtgatgtggagatccaggcctgcttcagacatgagaacattgctgagctgtatggagctgtgctgtggggcgagaccgtgcacctgttcatggaggccggggagggcggctctgtgctggagaagctggagagctgtggccccatgagggagtttgagatcatctgggtgaccaagcacgtgctgaagggcctggacttcctgcacagcaagaaggtgatccaccacgacatcaagtag

SEQ ID NO: 160196 - DNA, 573 bp, synthetic construct
  misc_feature 1..573: note = Description of Artificial Sequence: Synthetic coding sequence
  source 1..573: mol_type = other DNA
tgagtggaggacctgctggcctttgccaaccacatcagcaacacagccaagcacttctacggccagaggccccaggagagcggcatcctgctgaacatggtgatcaccccccagaatggccgctaccagattgacagtgatgtgctgctgatcccctggaagctgacctacagaaacatcggcagtgacttcatccccaggggggccttcggcaaggtgtacctggcccaggacatcaagaccaagaagaggatggcctgcaagctgatccctgtggaccagttcaagcccagtgatgtggagatccaggcctgcttcagacatgaaaatattgctgagctgtatggagctgtgctgtggggcgagaccgtgcacctgttcatggaggccggggagggcggctctgtgctggagaagctggagagctgtggccccatgagggagtttgagatcatctgggtgaccaagcacgtgctgaagggcctggacttcctgcacagcaagaaggtgatccaccacgacatcaagaggaagtacctgtggacctacaccttcctggcccagagggactag

SEQ ID NO: 160197 - DNA, 1404 bp, synthetic construct; identical to SEQ ID NO: 160190
  misc_feature 1..1404: note = Description of Artificial Sequence: Synthetic coding sequence
  source 1..1404: mol_type = other DNA

SEQ ID NO: 160198 - DNA, 3357 bp, synthetic construct
  misc_feature 1..3357: note = Description of Artificial Sequence: Synthetic coding sequence
  source 1..3357: mol_type = other DNA
atggagcccagccgggccctgctgggctgcctggccagcgctgctgctgctgcccctcctggagaagatggagctggagctggagctgaggaggaggaggaggaggaggaggaggccgctgctgctgtgggccctggagagctgggctgtgatgcccccctgccctactggacagctgtgtttgaatatgaagctgctggggaggatgagctgaccctgcggctgggagatgtggtggaggtgctgagcaaggacagccaggtgtctggagatgagggctggtggacaggccagctgaaccagagggtgggcatcttccccagcaactacgtgacccccaggtctgccttcagcagccgctgccagcctggaggagaggaccccagctgctacccacccatccagctgctggagattgactttgctgagctgaccctggaggagatcatcggcatcggcggctttgggaaggtgtaccgggccttctggattggagatgaggtggccgtgaaggccgcccggcatgaccctgatgaggacatcagccagaccattgaaaatgtgcggcaggaggccaagctgtttgccatgctgaagcaccccaacatcatcgccctgcggggcgtgtgcctgaaggagcccaacctgtgcctggtgatggagtttgcccggggcggccccctgaacagagtgctgagcggcaagaggatccccccagacatcctggtgaactgggccgtgcagatcgcccggggcatgaactacctgcatgatgaggccatcgtgcccatcatccaccgggacctgaagagcagcaacatcctgatcctgcagaaggtggagaatggagacctgagcaacaagatcctgaagatcacagactttggcctggcccgggagtggcacaggaccaccaagatgtctgctgctggcacctacgcctggatggcccctgaggtgatccgggcctccatgttcagcaagggcagtgatgtgtggagctatggagtgctgctgtgggagctgctgaccggggaggtgcccttccggggcattgatggcctggccgtggcctatggagtggccatgaacaagctggccctgcccatccccagcacctgcccagagccctttgccaagctgatggaggactgctggaacccagacccccacagccggcccagcttcaccaacatcctggaccagctgaccaccatcgaggagagcggcttctttgagatgcccaaggacagcttccactgcctgcaggacaactggaagcatgagatccaggagatgtttgaccagctgcgggccaaggagaaggagctgcggacctgggaggaggagctgacccgggccgccctgcagcagaagaaccaggaggagctgctgcggcggcgggagcaggagctggccgagcgggagattgacatcctggagcgggagctgaacatcatcatccaccagctgtgccaggagaagccccgggtgaagaagaggaagggcaagttcaggaagagccggctgaagctgaaggatggcaaccgcatcagcctgcccagcgacttccagcacaagttcaccgtgcaggccagccccaccatggacaagaggaagagcctcatcaacagccgcagcagccccccagccagccccaccatcatcccccggctgcgggccatccagctgaccccaggagagagcagcaagacctggggccgcagctctgtggtgcccaaggaggagggggaggaggaggagaagagggcccccaagaagaagggccgcacctggggccctggcaccctgggccagaaggagctggccagcggagatgagggcagcccccagaggcgggagaaggccaacggcctgagcacccccagcgagagcccccacttccacctgggcctgaagagcctggtggatggctacaagcagtggagcagcagcgcccccaacctggtgaagggccccaggagcagccctgccctgcccggcttcaccagcctgatggagatggccctgctggccgcctcctgggtggtgcccatcgacatcgaggaggatgaggacagcgagggccctggcagcggggagagccggctgcagcacagccccagccagagctacctgtgcatccccttccccagaggagaagatggagatggccccagcagtgatggcatccacgaggagcccacccctgtgaacagcgccaccagcaccccccagctgacccccaccaacagcctgaagaggggcggggcccaccacagaagatgtgaggtggccctgctgggctgtggggctgtgctggccgccaccggcctgggctttgacctgctggaggccggcaagtgccagctgctgcccctggaggagcctgagcccccagcccgggaggagaagaagagaagagagggcctcttccagaggagcagccggcccaggaggagcaccagcccccccagcaggaagctgttcaagaaggaggagcccatgctgctgctgggggaccccagcgccagcctgaccctgctgagcctgagcagcatcagcgagtgcaacagcaccaggagcctgctgcggagtgacagtgatgaaattgtggtgtatgagatgcctgtgtcccctgtggaggccccacccctgagcccctgcacccacaaccccctggtgaatgtgcgggtggagcgcttcaagagggaccccaaccagagcctgacccccacccacgtgaccctgaccacccccagccagcccagcagccacaggaggacccccagtgatggagccctgaagccagagaccctgctggccagccgcagccccagcagcaatggcctgagccccagccctggagctggcatgctgaagacccccagccccagccgggaccctggagagttcccccggctgcctgaccccaacgtggtgtttcctcccaccccccggcgctggaacacccagcaggacagcaccctggagcggcccaagaccctggagttcctgccccggccccggcccagcgccaaccggcagaggctggacccctggtggtttgtgagccccagccacgcccggagcaccagccctgccaacagcagcagcacagagacccccagcaacctggacagctgctttgccagcagcagcagcacagtggaggagaggcctggcctgcctgccctgctgcccttccaggccggccccctgcccccaacagagaggaccctgctggacctggatgctgagggccagagccaggacagcacagtgcccctgtgcagagctgagctgaacacccacaggcctgccccctatgagatccagcaggagttctggagctag

SEQ ID NO: 160199 - DNA, 2463 bp, synthetic construct
  misc_feature 1..2463: note = Description of Artificial Sequence: Synthetic coding sequence
  source 1..2463: mol_type = other DNA
ctggtgctgatcctgcagaaggtggagaatggagacctgagcaacaagatcctgaagatcacagactttggcctggcccgggagtggcacaggaccaccaagatgtctgctgctggcacctacgcctggatggcccctgaggtgatccgggcctccatgttcagcaagggcagtgatgtgtggagctatggagtgctgctgtgggagctgctgaccggggaggtgcccttccggggcattgatggcctggccgtggcctatggagtggccatgaacaagctggccctgcccatccccagcacctgcccagagccctttgccaagctgatggaggactgctggaacccagacccccacagccggcccagcttcaccaacatcctggaccagctgaccaccatcgaggagagcggcttctttgagatgcccaaggacagcttccactgcctgcaggacaactggaagcatgagatccaggagatgtttgaccagctgcgggccaaggagaaggagctgcggacctgggaggaggagctgacccgggccgccctgcagcagaagaaccaggaggagctgctgcggcggcgggagcaggagctggccgagcgggagattgacatcctggagcgggagctgaacatcatcatccaccagctgtgccaggagaagccccgggtgaagaagaggaagggcaagttcaggaagagccggctgaagctgaaggatggcaaccgcatcagcctgcccagcgacttccagcacaagttcaccgtgcaggccagccccaccatggacaagaggaagagcctcatcaacagccgcagcagccccccagccagccccaccatcatcccccggctgcgggccatccagctgaccccaggagagagcagcaagacctggggccgcagctctgtggtgcccaaggaggagggggaggaggaggagaagagggcccccaagaagaagggccgcacctggggccctggcaccctgggccagaaggagctggccagcggagatgagggcctgaagagcctggtggatggctacaagcagtggagcagcagcgcccccaacctggtgaagggccccaggagcagccctgccctgcccggcttcaccagcctgatggagatggcctgcttcagcagcaccctggtgatcttcacagaagatgaggacagcgagggccctggcagcggggagagccggctgcagcacagccccagccagagctacctgtgcatccccttccccagaggagaagatggagatggccccagcagtgatggcatccacgaggagcccacccctgtgaacagcgccaccagcaccccccagctgacccccaccaacagcctgaagaggggcggggcccaccacagaagatgtgaggtggccctgctgggctgtggggctgtgctggccgccaccggcctgggctttgacctgctggaggccggcaagtgccagctgctgcccctggaggagcctgagcccccagcccgggaggagaagaagagaagagagggcctcttccagaggagcagccggcccaggaggagcaccagcccccccagcaggaagctgttcaagaaggaggagcccatgctgctgctgggggaccccagcgccagcctgaccctgctgagcctgagcagcatcagcgagtgcaacagcaccaggagcctgctgcggagtgacagtgatgaaattgtggtgtatgagatgcctgtgtcccctgtggaggccccacccctgagcccctgcacccacaaccccctggtgaatgtgcgggtggagcgcttcaagagggaccccaaccagagcctgacccccacccacgtgaccctgaccacccccagccagcccagcagccacaggaggacccccagtgatggagccctgaagccagagaccctgctggccagccgcagccccagcagcaatggcctgagccccagccctggagctggcatgctgaagacccccagccccagccgggaccctggagagttcccccggctgcctgaccccaacgtggtgtttcctcccaccccccggcgctggaacacccagcaggacagcaccctggagcggcccaagaccctggagttcctgccccggccccggcccagcgccaaccggcagaggctggacccctggtggtttgtgagccccagccacgcccggagcaccagccctgccaacagcagcagcacagagacccccagcaacctggacagctgctttgccagcagcagcagcacagtggaggagaggcctggcctgcctgccctgctgcccttccaggccggccccctgcccccaacagagaggaccctgctggacctggatgctgagggccagagccaggacagcacagtgcccctgtgcagagctgagctgaacacccacaggcctgccccctatgagatccagcaggagttctggagctag

SEQ ID NO: 160200 - DNA, 3315 bp, synthetic construct
  misc_feature 1..3315: note = Description of Artificial Sequence: Synthetic coding sequence
  source 1..3315: mol_type = other DNA
atggagcccagccgggccctgctgggctgcctggccagcgctgctgctgctgcccctcctggagaagatggagctggagctggagctgaggaggaggaggaggaggaggaggaggccgctgctgctgtgggccctggagagctgggctgtgatgcccccctgccctactggacagctgtgtttgaatatgaagctgctggggaggatgagctgaccctgcggctgggagatgtggtggaggtgctgagcaaggacagccaggtgtctggagatgagggctggtggacaggccagctgaaccagagggtgggcatcttccccagcaactacgtgacccccaggtctgccttcagcagccgctgccagcctggaggagaggaccccagctgctacccacccatccagctgctggagattgactttgctgagctgaccctggaggagatcatcggcatcggcggctttgggaaggtgtaccgggccttctggattggagatgaggtggccgtgaaggccgcccggcatgaccctgatgaggacatcagccagaccattgaaaatgtgcggcaggaggccaagctgtttgccatgctgaagcaccccaacatcatcgccctgcggggcgtgtgcctgaaggagcccaacctgtgcctggtgatggagtttgcccggggcggccccctgaacagagtgctgagcggcaagaggatccccccagacatcctggtgaactgggccgtgcagatcgcccggggcatgaactacctgcatgatgaggccatcgtgcccatcatccaccgggacctgaagagcagcaacatcctgatcctgcagaaggtggagaatggagacctgagcaacaagatcctgaagatcacagactttggcctggcccgggagtggcacaggaccaccaagatgtctgctgctggcacctacgcctggatggcccctgaggtgatccgggcctccatgttcagcaagggcagtgatgtgtggagctatggagtgctgctgtgggagctgctgaccggggaggtgcccttccggggcattgatggcctggccgtggcctatggagtggccatgaacaagctggccctgcccatccccagcacctgcccagagccctttgccaagctgatggaggactgctggaacccagacccccacagccggcccagcttcaccaacatcctggaccagctgaccaccatcgaggagagcggcttctttgagatgcccaaggacagcttccactgcctgcaggacaactggaagcatgagatccaggagatgtttgaccagctgcgggccaaggagaaggagctgcggacctgggaggaggagctgacccgggccgccctgcagcagaagaaccaggaggagctgctgcggcggcgggagcaggagctggccgagcgggagattgacatcctggagcgggagctgaacatcatcatccaccagctgtgccaggagaagccccgggtgaagaagaggaagggcaagttcaggaagagccggctgaagctgaaggatggcaaccgcatcagcctgcccagcgacttccagcacaagttcaccgtgcaggccagccccaccatggacaagaggaagagcctcatcaacagccgcagcagccccccagccagccccaccatcatcccccggctgcgggccatccagctgaccccaggagagagcagcaagacctggggccgcagctctgtggtgcccaaggaggagggggaggaggaggagaagagggcccccaagaagaagggccgcacctggggccctggcaccctgggccagaaggagctggccagcggagatgagggcagcccccagaggcgggagaaggccaacggcctgagcacccccagcgagagcccccacttccacctgggcctgaagagcctggtggatggctacaagcagtggagcagcagcgcccccaacctggtgaagggccccaggagcagccctgccctgcccggcttcaccagcctgatggagatggaggatgaggacagcgagggccctggcagcggggagagccggctgcagcacagccccagccagagctacctgtgcatccccttccccagaggagaagatggagatggccccagcagtgatggcatccacgaggagcccacccctgtgaacagcgccaccagcaccccccagctgacccccaccaacagcctgaagaggggcggggcccaccacagaagatgtgaggtggccctgctgggctgtggggctgtgctggccgccaccggcctgggctttgacctgctggaggccggcaagtgccagctgctgcccctggaggagcctgagcccccagcccgggaggagaagaagagaagagagggcctcttccagaggagcagccggcccaggaggagcaccagcccccccagcaggaagctgttcaagaaggaggagcccatgctgctgctgggggaccccagcgccagcctgaccctgctgagcctgagcagcatcagcgagtgcaacagcaccaggagcctgctgcggagtgacagtgatgaaattgtggtgtatgagatgcctgtgtcccctgtggaggccccacccctgagcccctgcacccacaaccccctggtgaatgtgcgggtggagcgcttcaagagggaccccaaccagagcctgacccccacccacgtgaccctgaccacccccagccagcccagcagccacaggaggacccccagtgatggagccctgaagccagagaccctgctggccagccgcagccccagcagcaatggcctgagccccagccctggagctggcatgctgaagacccccagccccagccgggaccctggagagttcccccggctgcctgaccccaacgtggtgtttcctcccaccccccggcgctggaacacccagcaggacagcaccctggagcggcccaagaccctggagttcctgccccggccccggcccagcgccaaccggcagaggctggacccctggtggtttgtgagccccagccacgcccggagcaccagccctgccaacagcagcagcacagagacccccagcaacctggacagctgctttgccagcagcagcagcacagtggaggagaggcctggcctgcctgccctgctgcccttccaggccggccccctgcccccaacagagaggaccctgctggacctggatgctgagggccagagccaggacagcacagtgcccctgtgcagagctgagctgaacacccacaggcctgccccctatgagatccagcaggagttctggagctag

SEQ ID NO: 160201 - DNA, 1005 bp, synthetic construct
  misc_feature 1..1005: note = Description of Artificial Sequence: Synthetic coding sequence
  source 1..1005: mol_type = other DNA
atggccctgcgctggggcatcgtgtctgtgggcctcatcagcagtgacttcaccgctgtgctgcagaccctgcccaggtctgagcaccaggtggtggccgtggccgcccgggacctgagccgggccaaggagtttgcccagaagcatgacatccccaaggcctacggcagctatgaggagctggccaaggaccccagcgtggaggtggcctacatcggcacccagcacccccagcacaaggctgctgtgatgctgtgcctggccgccggcaaggctgtgctgtgtgagaagcccactggagtgaatgctgctgaggtgcgggagatggtggccgaggcccggagccgggccctcttcctgatggaggccatctggacccgcttcttccctgccagcgaggccctgcggtctgtgctggcccagggcaccctgggggacctgcgggtggcccgggcagagtttgggaagaacctgatccacgtgcccagggctgtggaccgggcccaggccggcggggccctgctggacatcggcatctactgtgtgcagttcacctccatggtgtttggaggccagaagccagagaagatctctgtggtgggcagaagacatgagaccggggtggatgacacagtgacagtgctgctgcagtacccaggagaggtgcacggcagcttcacctgcagcatcaccgtgcagctgagcaacacagcctctgtgtctggcaccaagggcatggtgcagctgctgaacccctgctggtgccccacagagctggtggtgaagggggagcacaaggagttccccctgccccctgtgcccaaggactgcaactttgacaatggagctggcatgtcctatgaggccaagcacgtgtgggagtgcctgaggaagggcatgaaggagagccctgtgatccccctgtctgagagcgagctgctggccgacatcctggaggaggtgaggaaggccatcggcgtgaccttcccccaggacaagaggtag

SEQ ID NO: 160202 - DNA, 2466 bp, synthetic construct
  misc_feature 1..2466: note = Description of Artificial Sequence: Synthetic coding sequence
  source 1..2466: mol_type = other DNA
atggatgtggtggaccctgacatcttcaacagagacccccgggaccactatgacctgctgcagaggctgggcggcggcacctacggggaggtgttcaaggcccgggacaaggtgtctggggacctggtggccctgaagatggtgaagatggagccagatgatgatgtgtccaccctgcagaaggagatcctgatcctgaagacctgcagacatgccaacatcgtggcctaccacggcagctacctgtggctgcagaagctgtggatctgcatggagttctgtggggccggcagcctgcaggacatctaccaggtgacaggcagcctgtctgagctgcagatctcctatgtgtgccgggaggtgctgcagggcctggcctacctgcacagccagaagaagatccaccgggacatcaagggggccaacatcctgatcaatgatgctggggaggtgcggctggccgactttggcatcagcgcccagatcggggccaccctggcccggcggctgtccttcatcggcaccccctactggatggcccctgaggtggccgctgtggccctgaagggcggctacaatgagctgtgtgacatctggagcctgggcatcacagccatcgagctggccgagctgcagccccccctgtttgatgtgcaccccctgcgggtgctcttcctgatgaccaagagcggctaccagcccccccggctgaaggagaagggcaagtggagcgctgccttccacaacttcatcaaggtgaccctgaccaagagccccaagaagaggcccagcgccaccaagatgctgagccaccagctggtgtcccagcccggcctgaacagaggcctcatcctggacctgctggacaagctgaagaaccctgggaagggccccagcatcggggacattgaagatgaggagcctgagctgcccccagccatcccccggcgcatccgcagcacccacaggagcagcagcctgggcatcccagatgctgactgctgccgccgccacatggagttcaggaagctgcggggcatggagacccggcccccagccaacacagcccggctgcagcccccccgggacctgcggagcagcagccccaggaagcagctgtctgagagcagtgatgatgattatgatgatgtggacatccccaccccagctgaggacaccccaccacccctgccccccaagcccaagttccgcagccccagtgatgagggccctggctccatgggagatgatggccagctgagccctggggtgctggtgcgctgtgccagcggccccccacccaacagccccaggcctggccccccacccagcaccagcagcccccacctgacagcccacagcgagcccagcctgtggaacccccccagccgggagctggacaagccacccctgctgccccccaagaaggagaagatgaagaggaagggctgtgccctgctggtgaagctgttcaacggctgccccctgcgcatccacagcacagctgcctggacccaccccagcaccaaggaccagcacctgctgctgggcgctgaggagggcatcttcatcctgaacagaaatgaccaggaggccaccctggagatgctgttccccagcaggaccacctgggtgtacagcatcaacaacgtgctgatgagcctgagcggcaagaccccccacctgtacagccacagcatcctgggcctgctggagaggaaggagacccgggccggcaaccccatcgcccacatcagcccccaccggctgctggccaggaagaacatggtgtccaccaagatccaggacaccaagggctgccgggcctgctgcgtggccgagggcgccagcagcggcggccccttcctgtgtggggccctggagacctctgtggtgctgctgcagtggtaccagcccatgaacaagttcctgctggtgcggcaggtgctcttccccctgcccacccccctgtctgtgtttgccctgctgaccggccctggcagcgagctgcctgctgtgtgcattggagtgtccccaggccggcctgggaagtctgtgctcttccacacagtgcgctttggagccctgagctgctggctgggggagatgagcacagagcaccggggccctgtgcaggtgacccaggtggaggaggacatggtgatggtgctgatggatggctctgtgaagctggtgaccccagagggcagccctgtgcggggcctgcggaccccagagatccccatgacagaggccgtggaggccgtggccatggtgggcggccagctgcaggccttctggaagcatggagtgcaggtgtgggccctgggcagtgaccagctgctgcaggagctgcgggaccccaccctgaccttccggctgctgggcagccccaggcctgtggtggtggagaccaggcctgtggatgaccccacagcccccagcaacctgtacatccaggagtag

SEQ ID NO: 160203 - DNA, 720 bp, synthetic construct
  misc_feature 1..720: note = Description of Artificial Sequence: Synthetic coding sequence
  source 1..720: mol_type = other DNA
atggagttcaggaagctgcggggcatggagacccggcccccagccaacacagcccggctgcagcccccccgggacctgcggagcagcagccccaggaagcagctgtctgagagcagtgatgatgattatgatgatgtggacatccccaccccagctgaggacaccccaccacccctgccccccaagcccaagttccgcagccccagtgatgagggccctggctccatgggagatgatggccagctgagccctggggtgctggtgcgctgtgccagcggccccccacccaacagccccaggcctggccccccacccagcaccagcagcccccacctgacagcccacagcgagcccagcctgtggaacccccccagccgggagctggacaagccacccctgctgccccccaagaaggagaagatgaagaggaagggctgtgccctgctggtgaagctgttcaacggctgccccctgcgcatccacagcacagctgcctggacccaccccagcaccaaggaccagcacctgctgctgggcgctgaggagggcatcttcatcctgaacagaaatgaccaggaggccaccctggagatggagaggcctcccacctgcatcctgattgccagcctggcctgctggaatggcaagaggcctgagcaggagacccccagcctgaccctggcccccacagcctactggcagggcaccagcagccagtag

SEQ ID NO: 160204 - DNA, 2502 bp, synthetic construct
  misc_feature 1..2502: note = Description of Artificial Sequence: Synthetic coding sequence
  source 1..2502: mol_type = other DNA
atggatgtggtggaccctgacatcttcaacagagacccccgggaccactatgacctgctgcagaggctgggcggcggcacctacggggaggtgttcaaggcccgggacaaggtgtctggggacctggtggccctgaagatggtgaagatggagccagatgatgatgtgtccaccctgcagaaggagatcctgatcctgaagacctgcagacatgccaacatcgtggcctaccacggcagctacctgtggctgcagaagctgtggatctgcatggagttctgtggggccggcagcctgcaggacatctaccaggtgacaggcagcctgtctgagctgcagatctcctatgtgtgccgggaggtgctgcagggcctggcctacctgcacagccagaagaagatccaccgggacatcaagggggccaacatcctgatcaatgatgctggggaggtgcggctggccgactttggcatcagcgcccagatcggggccaccctggcccggcggctgtccttcatcggcaccccctactggatggcccctgaggtggccgctgtggccctgaagggcggctacaatgagctgtgtgacatctggagcctgggcatcacagccatcgagctggccgagctgcagccccccctgtttgatgtgcaccccctgcgggtgctcttcctgatgaccaagagcggctaccagcccccccggctgaaggagaagggcaagtggagcgctgccttccacaacttcatcaaggtgaccctgaccaagagccccaagaagaggcccagcgccaccaagatgctgagccaccagctggtgtcccagcccggcctgaacagaggcctcatcctggacctgctggacaagctgaagaaccctgggaagggccccagcatcggggacattgaagatgaggagcctgagctgcccccagccatcccccggcgcatccgcagcacccacaggagcagcagcctgggcatcccagatgctgactgctgccgccgccacatggagttcaggaagctgcggggcatggagacccggcccccagccaacacagcccggctgcagcccccccgggacctgcggagcagcagccccaggaagcagctgtctgagagcagtgatgatgattatgatgatgtggacatccccaccccagctgaggacaccccaccacccctgccccccaagcccaagttccgcagccccagtgatgagggccctggctccatgggagatgatggccagctgagccctggggtgctggtgcgctgtgccagcggccccccacccaacagccccaggcctggccccccacccagcaccagcagcccccacctgacagcccacagcgagcccagcctgtggaacccccccagccgggagctggacaagccacccctgctgccccccaagaaggagaagatgaagaggaagggctgtgccctgctggtgaagctgttcaacggctgccccctgcgcatccacagcacagctgcctggacccaccccagcaccaaggaccagcacctgctgctgggcgctgaggagggcatcttcatcctgaacagaaatgaccaggaggccaccctggagatgctgttccccagcaggaccacctgggtgtacagcatcaacaacgtgctgatgagcctgagcggcaagaccccccacctgtacagccacagcatcctgggcctgctggagaggaaggagacccgggccggcaaccccatcgcccacatcagcccccaccggctgctggccaggaagaacatggtgtccaccaagatccaggacaccaagggctgccgggcctgctgcgtggccgagggcgccagcagcggcggccccttcctgtgtggggccctggagacctctgtggtgctgctgcagtggtaccagcccatgaacaagttcctgctggtgcggcaggtgctcttccccctgcccacccccctgtctgtgtttgccctgctgaccggccctggcagcgagctgcctgctgtgtgcattggagtgtccccaggccggcctgggaagtctgtgctcttccacacagtgcgctttggagccctgagctgctggctgggggagatgagcacagagcaccggggccctgtgcaggtgacccaggtggaggaggacatggtgatggtgctgatggatggctctgtgaagctggtgaccccagagggcagccctgtgcggggcctgcggaccccagagatccccatgacagaggccgtggaggccgtggccatggtgggcggccagctgcaggccttctggaagcatggagtgcaggtgtgggccctgggcagtgaccagctgctgcaggagctgcgggaccccaccctgaccttccggctgctgggcagcccccggctggagtgcagcggcaccatcagcccccactgcaacctgctgctgcccggcagcagcaacagccctgccagcgccagccgggtggccggcatcaccggcctgtag

SEQ ID NO: 160205 - DNA, 2463 bp, synthetic construct
  misc_feature 1..2463: note = Description of Artificial Sequence: Synthetic coding sequence
  source 1..2463: mol_type = other DNA
atggccctgctgagagatgtgtccctgcaggacccccgggacagatttgagctgctgcagagggtgggcgccggcacctatggagatgtgtacaaggcccgggacacagtgaccagcgagctggccgctgtgaagatcgtgaagctggaccctggagatgacatcagcagcctgcagcaggagatcaccatcctgagagaatgtcgccaccccaacgtggtggcctacatcggcagctacctgagaaatgaccggctgtggatctgcatggagttctgtggcggcggcagcctgcaggagatctaccacgccaccggccccctggaggagcggcagatcgcctacgtgtgccgggaggccctgaagggcctgcaccacctgcacagccagggcaagatccaccgggacatcaagggggccaacctgctgctgaccctgcagggagatgtgaagctggccgactttggagtgtctggagagctgacagcctctgtggccaagaggaggagcttcatcggcaccccctactggatggcccctgaggtggccgctgtggagaggaagggcggctacaatgagctgtgtgatgtgtgggccctgggcatcacagccatcgagctgggggagctgcagcccccactcttccacctgcaccccatgagggccctgatgctgatgagcaagagcagcttccagccccccaagctgcgggacaagacccgctggacccagaacttccaccacttcctgaagctggccctgaccaagaaccccaagaagaggcccacagctgagaagctgctgcagcaccccttcaccacccagcagctgccccgggccctgctgacccagctgctggacaaggccagtgacccccacctgggcacccccagccctgaggactgtgagctggagacctatgacatgtttcctgacaccatccacagccggggccagcacggccctgctgagaggacccccagcgagatccagttccaccaggtgaagtttggagcccccaggaggaaggagacagaccccctgaatgagccctgggaggaggagtggaccctgctgggcaaggaggagctgagcggcagcctgctgcagagcgtgcaggaggccctggaggagaggagcctgaccatccgcagcgccagcgagttccaggagctggacagcccagatgacaccatgggcaccatcaagagggcccccttcctgggccccctgcccacagatcctcctgctgaggagcccctgagcagccccccaggcaccctgcccccacctccttctggccccaacagcagccccctgctgcccacagcctgggccaccatgaagcagcgggaggaccctgagaggagcagctgccacggcctgccccccacccccaaggtgcacatgggcgcctgcttcagcaaggtgttcaacggctgccccctgcgcatccatgctgctgtgacctggatccaccctgtgacccgggaccagttcctggtggtgggcgctgaggagggcatctacaccctgaacctgcacgagctgcacgaggacaccctggagaagctgatcagccaccgctgctcctggctgtactgtgtgaacaacgtgctgctgagcctgagcggcaagagcacccacatctgggcccatgacctgcccggcctgtttgagcagaggcggctgcagcagcaggtgcccctgagcatccccaccaaccggctgacccagaggatcatccccaggagatttgccctgagcaccaagatcccagacaccaagggctgcctgcagtgccgggtggtgaggaacccctacacaggagccaccttcctgctggccgccctgcccaccagcctgctgctgctgcagtggtatgagcccctgcagaagttcctgctgctgaagaacttcagcagccccctgcccagccctgctggcatgctggagcccctggtgctggatggcaaggagctgccccaggtgtgtgtgggcgctgagggccctgagggccctggctgccgggtgctcttccacgtgctgcccctggaggccggcctgaccccagacatcctgatccccccagagggcatccctggcagcgcccagcaggtgatccaggtggaccgggacaccatcctggtgtcctttgagcgctgtgtgagaattgtgaacatgcagggcgagcccacagccaccctggcccctgagctgacctttgacttccccatcgagaccgtggtgtgcctgcaggacagcgtgctggccttctggagccacggcatgcagggccgcagcctggacaccaatgaggtgacccaggagatcacagatgagacccgcatcttccgggtgctgggcgcccaccgggacatcatcctggagagcatccccacagacaaccctgaggcccacagcaacctgtacatcctgaccggccaccagagcacctactag

SEQ ID NO: 160206 - DNA, 2541 bp, synthetic construct
  misc_feature 1..2541: note = Description of Artificial Sequence: Synthetic coding sequence
  source 1..2541: mol_type = other DNA
atggaggcccccctgcggcctgctgctgacatcctgcggaggaacccccagcaggactatgagctggtgcagagggtgggcagcggcacctatggagatgtgtacaaggccagaaatgtgcacactggagagctggccgctgtgaagatcatcaagctggagcctggagatgacttcagcctcatccagcaggagatcttcatggtgaaggagtgcaagcactgcaacatcgtggcctacttcggcagctacctgagccgggagaagctgtggatctgcatggagtactgcggcggcggcagcctgcaggacatctaccacgtgacaggccccctgtctgagctgcagatcgcctacgtgtgccgggagaccctgcagggcctggcctacctgcacaccaagggcaagatgcaccgggacatcaagggggccaacatcctgctgacagaccatggagatgtgaagctggccgactttggagtggccgccaagatcacagccaccatcgccaagaggaagagcttcatcggcaccccctactggatggcccctgaggtggccgctgtggagaagaatggaggctacaaccagctgtgtgacatctgggccgtgggcatcacagccatcgagctgggggagctgcagccccccatgtttgacctgcaccccatgagggccctcttcctgatgagcaagagcaacttccagccccccaagctgaaggacaagaccaagtggagcagcaccttccacaactttgtgaagatcgccctgaccaagaaccccaagaagaggcccacagctgagcggctgctgacccacacctttgtggcccagcccggcctgagccgggccctggccgtggagctgctggacaaggtgaacaacccagacaaccacgcccactacacagaagcagatgatgatgactttgagccccacgccatcatccgccacaccatccgcagcaccaacagaaatgcccgggcagagaggacagccagcgagatcaactttgacaagctgcagtttgagccccccctgaggaaggagacagaggccagagatgagatgggcctgagcagtgaccccaacttcatgctgcagtggaacccctttgtggatggagccaacacaggcaagagcaccagcaagagggccatccccccacccctgccccccaagccccgcatcagcagctacccagaggacaacttcccagatgaggagaaggccagcaccatcaagcactgcccagattctgagagccgggccccccagatcctgcggcggcagagcagccccagctgtggccctgtggccgagaccagcagcattggaaatggagatggcatcagcaagctgatgtctgagaacacagagggcagcgcccaggccccccagctgcccaggaagaaggacaagagggacttccccaagccagccatcaatggcctgccccccacccccaaggtgctgatgggcgcctgcttcagcaaggtgtttgatggctgccccctgaagatcaactgtgccacctcctggatccacccagacaccaaggaccagtacatcatctttggaacagaagatggcatctacaccctgaacctgaatgagctgcacgaggccaccatggagcagctgttccccaggaagtgcacctggctgtatgtgatcaacaacaccctgatgagcctgtctgtgggcaagaccttccagctgtacagccacaacctgattgccctgtttgagcacgccaagaagccaggcctggccgcccacatccagacccaccgcttcccagaccgcatcctgcccaggaagtttgccctgaccaccaagatcccagacaccaagggctgccacaagtgctgcatcgtgaggaacccctacacaggccacaagtacctgtgtggggccctgcagagcggcatcgtgctgctgcagtggtatgagcccatgcagaagttcatgctgatcaagcactttgacttccccctgcccagccccctgaatgtgtttgagatgctggtgattcctgagcaggagtaccccatggtgtgtgtggccatcagcaagggcacagagagcaaccaggtggtgcagtttgagaccatcaacctgaacagcgccagctcctggttcacagaaattggagctggcagccagcagctggacagcatccacgtgacccagctggagcgggacacagtgctggtgtgcctggacaagtttgtgaagatcgtgaacctgcagggcaagctgaagagcagcaagaagctggccagcgagctgagctttgacttccgcatcgagagcgtggtgtgcctgcaggacagcgtgctggccttctggaagcacggcatgcagggcaagagcttcaagagtgatgaggtgacccaggagatcagtgatgagaccagggtcttccggctgctgggcagtgacagagtggtggtgctggagagccggcccacagagaaccccacagcccacagcaacctgtacatcctggccggccatgaaaattcctactag

SEQ ID NO: 160207 - DNA, 699 bp, synthetic construct
  misc_feature 1..699: note = Description of Artificial Sequence: Synthetic coding sequence
  source 1..699: mol_type = other DNA
atggccacagctgagagccgggccctgcagtttgctgagggcgccgccttccctgcctaccgggcccctcatgctggaggagccctgctgcccccacccagccctgctgctgccctgctgcctgcccctcctgctggccctggccctgccacctttgctggcttcctgggccgggaccccggccctgcccctcctcctccagccagcctgggcagccctgccccacccaagggagctgctgcccccagcgccagccagaggaggaagaggaccagcttctctgctgagcagctgcagctgctggagctggtgttccggaggacccgctacccagacatccacctgcgggagcggctggccgccctgaccctgctgcctgagagccgcatccaggtgtggttccagaacagaagagccaagagccggcggcagagcggcaagagcttccagcccctggcccggcctgagatcatcctgaaccactgtgcccctggaacagagaccaagtgcctgaagccccagctgcccctggaggtggatgtgaactgcctgcctgagcccaacggggtgggcggcggcatcagtgacagcagcagccagggccagaactttgagacctgcagccccctgtctgaggacatcggcagcaagctggacagctgggaggagcacatcttcagcgcctttggaaacttctag

SEQ ID NO: 160208 - DNA, 723 bp, synthetic construct
  misc_feature 1..723: note = Description of Artificial Sequence: Synthetic coding sequence
  source 1..723: mol_type = other DNA
atggccacagctgagagccgggccctgcagtttgctgagggcgccgccttccctgcctaccgggcccctcatgctggaggagccctgctgcccccacccagccctgctgctgccctgctgcctgcccctcctgctggccctggccctgccacctttgctggcttcctgggccgggaccccggccctgcccctcctcctccagccagcctgggcagccctgccccacccaagggagctgctgcccccagcgccagccagaggaggaagaggaccagcttctctgctgagcagctgcagctgctggagctggtgttccggaggacccgctacccagacatccacctgcgggagcggctggccgccctgaccctgctgcctgagagccgcatccagctgctcttcagccccctcttccaggtgtggttccagaacagaagagccaagagccggcggcagagcggcaagagcttccagcccctggcccggcctgagatcatcctgaaccactgtgcccctggaacagagaccaagtgcctgaagccccagctgcccctggaggtggatgtgaactgcctgcctgagcccaacggggtgggcggcggcatcagtgacagcagcagccagggccagaactttgagacctgcagccccctgtctgaggacatcggcagcaagctggacagctgggaggagcacatcttcagcgcctttggaaacttctag

SEQ ID NO: 160209 - DNA, 882 bp, synthetic construct
  misc_feature 1..882: note = Description of Artificial Sequence: Synthetic coding sequence
  source 1..882: mol_type = other DNA
atggccaccttcagcggccctgctggccccatcctgagcctgaacccccaggaggatgtggagttccagaaggaggtggcccaggtgaggaagaggatcacccagaggaagaagcaggagcagctgaccccaggagtggtgtatgtgcgccacctgcccaacctgctggatgagacccagatcttctcctacttcagccagtttggcaccgtgacccgcttccggctgagccgcagcaagaggacaggcaacagcaagggctacgcctttgtggagtttgaaagtgaagatgtggccaagatcgtggccgagaccatgaacaactacctgtttggagagcggctgctggagtgccacttcatgcctcctgagaaggtgcacaaggagctgttcaaggactggaacatccccttcaagcagcccagctaccccagcgtgaagcgctacaacagaaacagaaccctgacccagaagctgaggatggaggagcgcttcaagaagaaggagcggctgctgaggaagaagctggccaagaagggcattgattatgacttccccagcctcatcctgcagaagacagagagcatcagcaagaccaaccggcagaccagcaccaagggccaggtgctgaggaagaagaagaagaaggtgtctggcaccctggacaccccagagaagacagtggacagccagggccccacccctgtgtgcacccccaccttcctggagaggaggaagagccaggtggccgagctgaatgatgatgacaaggatgatgaaattgtgttcaagcagcccatcagctgtgtgaaggaggagatccaggagacccagacccccacccacagcaggaagaagagaagaagaagcagcaaccagtag

SEQ ID NO: 160210 - DNA, 1257 bp, synthetic construct
  misc_feature 1..1257: note = Description of Artificial Sequence: Synthetic coding sequence
  source 1..1257: mol_type = other DNA
atggccccccggggcagaagaagaccccggccccacaggtctgagggcgcccggcgcagcaagaacaccctggagaggacccacagcatgaaggacaaggccggccagaagtgcaagcccattgatgtgtttgacttcccagacaacagtgatgtgagcagcatcggccgcctgggggagaatgagaaggatgaggagacctatgagacctttgatcctcccctgcacagcacagccatctatgcagatgaggaggagttcagcaagcactgcggcctgagcctgagcagcaccccacctgggaaggaggccaagaggagcagtgacaccagcggaaatgaggccagcgagattgagagcgtgaagatcagcgccaagaagccaggcaggaagctgcggcccatcagtgatgattctgagagcattgaggagagtgacaccaggaggaaggtgaagtctgctgagaagatcagcacccagagacatgaggtgatccgcaccacagccagcagcgagctgtctgagaagccagctgagagcgtgaccagcaagaagacaggccccctgagcgcccagcccagcgtggagaaggagaacctggccatcgagagccagagcaagacccagaagaagggcaagatcagccatgacaagaggaagaagagccgcagcaaggccatcggcagtgacaccagtgacatcgtgcacatctggtgcccagagggcatgaagaccagtgacatcaaggagctgaacatcgtgctgcctgagtttgagaagacccacctggagcaccagcagagaattgagagcaaggtgtgcaaggccgccatcgccaccttctacgtgaatgtgaaggagcagttcatcaagatgctgaaggagagccagatgctgaccaacctgaagaggaagaatgccaagatgatcagtgacatcgagaagaagaggcagaggatgattgaggtgcaggatgagctgctgcggctggagccccagctgaagcagctgcagaccaagtatgatgagctgaaggagaggaagagcagcctgagaaatgctgcctacttcctgagcaacctgaagcagctgtaccaggactacagtgatgtgcaggcccaggagcccaacgtgaaggagacctatgacagcagcagcctgcctgccctgctcttcaaggcccggaccctgctgggcgctgagagccacctgaggaacatcaaccaccagctggagaagctgctggaccagggctag

SEQ ID NO: 160211 - DNA, 963 bp, synthetic construct
  misc_feature 1..963: note = Description of Artificial Sequence: Synthetic coding sequence
  source 1..963: mol_type = other DNA
atggccccccggggcagaagaagaccccggccccacaggtctgagggcgcccggcgcagcaagaacaccctggagaggacccacagcatgaaggacaaggccggccagaagtgcaagcccattgatgtgtttgacttcccagacaacagtgatgtgagcagcatcggccgcctgggggagaatgagaaggatgaggagacctatgagacctttgatcctcccctgcacagcacagccatctatgcagatgaggaggagttcagcaagcactgcggcctgagcctgagcagcaccccacctgggaaggaggccaagaggagcagtgacaccagcggaaatgaggccagcgagattgagagcgtgaagatcagcgccaagaagccaggcaggaagctgcggcccatcagtgatgattctgagagcattgaggagagtgacaccaggaggaaggtgaagtctgctgagaagatcagcacccagagacatgaggtgatccgcaccacagccagcagcgagctgtctgagaagccagctgagagcgtgaccagcaagaagacaggccccctgagcgcccagcccagcgtggagaaggagaacctggccatcgagagccagagcaagacccagaagaagggcaagatcagccatgacaagaggaagaagagccgcagcaaggccatcggcagtgacaccagtgacatcgtgcacatctggtgcccagagggcatgaagaccagtgacatcaaggagctgaacatcgtgctgcctgagtttgagaagacccacctggagcaccagcagagaattgagagcaaggtgtgcaaggccgccatcgccaccttctacgtgaatgtgaaggagcagttcatcaagatgctgaaggagagccagatgctgaccaacctgaagaggaagaatgccaaggtgcgggccacagctgagaccaccaccaacaagatctag

SEQ ID NO: 160212 - DNA, 963 bp, synthetic construct
  misc_feature 1..963: note = Description of Artificial Sequence: Synthetic coding sequence
  source 1..963: mol_type = other DNA
atggccccccggggcagaagaagaccccggccccacaggtctgagagcgcccggcgcagcaagaacaccctggagaggacccacagcatgaaggacaaggccggccagaagtgcaagcccattgatgtgtttgacttcccagacaacagtgatgtgagcagcatcggccgcctgggggagaatgagaaggatgaggagacctatgagacctttgatcctcccctgcacagcacagccatctatgcagatgaggaggagttcagcaagcactgcggcctgagcctgagcagcaccccacctgggaaggaggccaagaggagcagtgacaccagcggaaatgaggccagcgagattgagagcgtgaagatcagcgccaagaagccaggcaggaagctgcggcccatcagtgatgattctgagagcattgaggagagtgacaccaggaggaaggtgaagtctgctgagaagatcagcacccagagacatgaggtgatccgcaccacagccagcagcgagctgtctgagaagccagctgagagcgtgaccagcaagaagacaggccccctgagcgcccagcccagcgtggagaaggagaacctggccatcgagagccagagcaagacccagaagaagggcaagatcagccatgacaagaggaagaagagccgcagcaaggccatcggcagtgacaccagtgacatcgtgcacatctggtgcccagagggcatgaagaccagtgacatcaaggagctgaacatcgtgctgcctgagtttgagaagacccacctggagcaccagcagagaattgagagcaaggtgtgcaaggccgccatcgccaccttctacgtgaatgtgaaggagcagttcatcaagatgctgaaggagagccagatgctgaccaacctgaagaggaagaatgccaaggtgcgggccacagctgagaccaccaccaacaagatctag

SEQ ID NO: 160213 - DNA, 1014 bp, synthetic construct
  misc_feature 1..1014: note = Description of Artificial Sequence: Synthetic coding sequence
  source 1..1014: mol_type = other DNA
atggccccccggggcagaagaagaccccggccccacaggtctgagggcgcccggcgcagcaagaacaccctggagaggacccacagcatgaaggacaaggccggccagaagtgcaagcccattgatgtgtttgacttcccagacaacagtgatgtgagcagcatcggccgcctgggggagaatgagaaggatgaggagacctatgagacctttgatcctcccctgcacagcacagccatctatgcagatgaggaggagttcagcaagcactgcggcctgagcctgagcagcaccccacctgggaaggaggccaagaggagcagtgacaccagcggaaatgaggccagcgagattgagagcgtgaagatcagcgccaagaagccaggcaggaagctgcggcccatcagtgatgattctgagagcattgaggagagtgacaccaggaggaaggtgaagtctgctgagaagatcagcacccagagacatgaggtgatccgcaccacagccagcagcgagctgtctgagaagccagctgagagcgtgaccagcaagaagacaggccccctgagcgcccagcccagcgtggagaaggagaacctggccatcgagagccagagcaagacccagaagaagggcaagatcagccatgacaagaggaagaagagccgcagcaaggccatcggcagtgacaccagtgacatcgtgcacatctggtgcccagagggcatgaagaccagtgacatcaaggagctgaacatcgtgctgcctgagtttgagaagacccacctggagcaccagcagagaattgagagcaaggtgtgcaaggccgccatcgccaccttctacgtgaatgtgaaggagcagttcatcaagatgctgaaggagagccagatgctgaccaacctgaagaggaagaatgccaagatgatcagtgacatcgagaagaagaggcagaggatgattgaggtgcaggatgagctgctgcggctgtggacaggagctggcctgtggtag

SEQ ID NO: 160214 - DNA, 2760 bp, synthetic construct
  misc_feature 1..2760: note = Description of Artificial Sequence: Synthetic coding sequence
  source 1..2760: mol_type = other DNA
atggctgctgatgtgttcatgtgcagcccccggcggcccaggagccggggccggcaggtgctgctgaagccccaggtgtctgaagatgatgatgacagcgacacagatgagcccagccccccaccagccagcggggccgccaccccagcccgggcccacgccagcgctgcccctcctccacccagggctggccctggccgggaggagcccccccggcggcagcagatcatccacagcggccacttcatggtgagcagcccccaccgggagcacccccccaagaagggctatgactttgacacagtgaacaagcagacctgccagacctacagctttgggaagaccagcagctgccacctgagcattgatgccagcctgaccaagctgtttgagtgcatgaccctggcctacagcggcaagctggtgagccccaagtggaagaacttcaagggcctgaagctgcagtggagggacaagatccggctgaacaatgccatctggagggcctggtacatgcagtacctggagaagaggaagaaccctgtgtgccactttgtgacccccctggatggctctgtggatgtggatgagcacagaagacctgaggccatcaccacagagggcaagtactggaagagcagaattgaaattgtcatccgggagtaccacaagtggaggacctacttcaagaagaggctgcagcagcacaaggatgaggacctgagcagcctggtgcaggatgatgacatgctgtactggcacaagcatggagatggctggaagacccctgtgcccatggaggaggaccccctgctggacacagacatgctgatgtctgagttcagtgacaccctcttcagcaccctgagcagccaccagcctgtggcctggcccaacccccgggagatcgcccacctgggcaatgctgacatgatccagcccggcctcatccccctgcagcccaacctggacttcatggacacctttgagcccttccaggacctcttcagcagcagccgcagcatcttcggctccatgctgcctgccagcgccagcgcccctgtgcctgaccccaacaaccccccagcccaggagagcatcctgcccaccacagccctgcccaccgtgtccctgcctgacagcctgattgccccacccacagcccccagcctggcccacatggatgagcagggctgtgagcacaccagcaggacagaggaccccttcatccagcccacagactttggccccagcgagccccccctgtctgtgccccagcccttcctgcccgtcttcaccatgcccctgctgagccccagccctgcccccccacccatcagccctgtgctgcccctggtgcccccaccagccacagccctgaaccccccagccccacccaccttccaccagccccagaagtttgctggggtgaacaaggcccccagcgtcatcacccacacagccagcgccaccctgacccatgatgccccagccaccaccttcagccagagccagggcctggtgatcaccacccaccacccagcccccagcgctgccccctgtggcctggccctgagccctgtgaccaggcctccccagccccggctgacctttgtgcaccccaagcctgtgtccctgactggaggccggcccaagcagccccacaagatcgtgcctgcccccaagccagagcctgtgtccctggtgctgaagaatgccagaattgccccagctgccttcagcggccagccccaggccgtcatcatgaccagcggccccctgaagcgggagggcatgctggccagcacagtgtcccagagcaatgtggtgattgccccagctgccatcgcccgggcccctggggtgcctgagttccacagcagcatcctggtgacagacctgggccacggcaccagcagccccccagcccctgtgtcccggctcttccccagcacagcccaggaccccctgggcaaaggagagcaggtgcccctgcacggcggcagcccccaggtgacagtgacaggccccagccgggactgccccaacagcggccaggccagcccctgtgccagcgagcagagccccagcccccagagcccccagaacaactgcagcggcaagagtgaccccaagaatgtggccgccctgaagaaccggcagatgaagcacatctctgctgagcagaagaggcgcttcaacatcaagatgtgctttgacatgctgaacagcctcatcagcaacaacagcaagctgaccagccacgccatcaccctgcagaagacagtggagtacatcaccaagctgcagcaggagcggggccagatgcaggaggaggcccggcggctgcgggaggagattgaggagctgaatgccaccatcatcagctgccagcagctgctgcctgccaccggggtgcctgtgacccggcggcagtttgaccacatgaaggacatgtttgatgaatatgtgaagaccaggaccctgcagaactggaagttctggatcttcagcatcatcatcaagcccctgtttgagagcttcaagggcatggtgtccaccagcagcctggaggagctgcacaggacagccctgtcctggctggaccagcactgcagcctgcccatcctgcggcccatggtgctgagcaccctgcggcagctgagcaccagcaccagcatcctgacagatcctgcccagctgcctgagcaggccagcaaggctgtgacccgcatcggcaagaggctgggggagagctag

SEQ ID NO: 160215 - DNA, 657 bp, synthetic construct
  misc_feature 1..657: note = Description of Artificial Sequence: Synthetic coding sequence
  source 1..657: mol_type = other DNA
atggatgagcagggctgtgagcacaccagcaggacagaggaccccttcatccagcccacagactttggccccagcgagccccccctgtctgtgcccccaccacccatcagccctgtgctgcccctggtgcccccaccagccacagccctgaaccccccagccccacccaccttccaccagccccagaagtttgctggggtgaacaaggcccccagcgtcatcacccacacagccagcgccaccctgacccatgatgccccagccaccaccttcagccagagccagggcctggtgatcaccacccaccacccagcccccagcgctgccccctgtggcctggccctgagccctgtgaccaggcctccccagccccggctgacctttgtgcaccccaagcctgtgtccctgactggaggccggcccaagcagccccacaagatcgtgcctgcccccaagccagagcctgtgtccctggtgctgaagaatgccagaattgcccctggagagcccggcggggagacccagtgtggggcccccccagaccctgagggctgcttccccatccccaaggccttcaagctggtgaccaccaccaccaccctggtgtgcacctgcatgaggacccacatccacctgaatgagaccaaggtgtcctag

SEQ ID NO: 160216 - DNA, 1581 bp, synthetic construct
  misc_feature 1..1581: note = Description of Artificial Sequence: Synthetic coding sequence
  source 1..1581: mol_type = other DNA
atggatgagcagggctgtgagcacaccagcaggacagaggaccccttcatccagcccacagactttggccccagcgagccccccctgtctgtgccccagcccttcctgcctgtgttcaccatgcccctgctgagccccagccctgcccccccacccatcagccctgtgctgcccctggtgcccccaccagccacagccctgaaccccccagccccacccaccttccaccagccccagaagtttgctggggtgaacaaggcccccagcgtcatcacccacacagccagcgccaccctgacccatgatgccccagccaccaccttcagccagagccagggcctggtgatcaccacccaccacccagcccccagcgctgccccctgtggcctggccctgagccctgtgacccggcccccccagccccggctgacctttgtgcaccccaagcctgtgtccctgaccggcggccggcccaagcagccccacaagatcgtgcctgcccccaagccagagcctgtgtccctggtgctgaagaatgcccgcatcgccccagctgccttcagcggccagccccaggccgtcatcatgaccagcggccccctgaagcgggagggcatgctggccagcacagtgtcccagagcaatgtggtgattgccccagctgccatcgcccgggcccctggggtgcctgagttccacagcagcatcctggtgacagacctgggccacggcaccagcagccccccagcccctgtgagccgcctcttccccagcacagcccaggaccccctgggcaagggggagcaggtgcccctgcatggaggcagcccccaggtgacagtgacaggccccagccgggactgccccaacagcggccaggccagcccctgtgccagcgagcagagccccagcccccagagcccccagaacaactgcagcggcaagagtgaccccaagaatgtggccgccctgaagaaccggcagatgaagcacatctctgctgagcagaagaggcgcttcaacatcaagatgtgctttgacatgctgaacagcctcatcagcaacaacagcaagctgaccagccacgccatcaccctgcagaagacagtggagtacatcaccaagctgcagcaggagcggggccagatgcaggaggaggcccggcggctgcgggaggagattgaggagctgaatgccaccatcatcagctgccagcagctgctgcctgccactggagtgcctgtgacccggcggcagtttgaccacatgaaggacatgtttgatgaatatgtgaagaccaggaccctgcagaactggaagttctggatcttcagcatcatcatcaagcccctgtttgagagcttcaagggcatggtgtccaccagcagcctggaggagctgcacaggacagccctgtcctggctggaccagcactgcagcctgcccatcctgcggcccatggtgctgagcaccctgcggcagctgagcaccagcaccagcatcctgacagatcctgcccagctgcctgagcaggccagcaaggctgtgaccagaattggcaagaggctgggggagagctag

SEQ ID NO: 160217 - DNA, 2559 bp, synthetic construct
  misc_feature 1..2559: note = Description of Artificial Sequence: Synthetic coding sequence
  source 1..2559: mol_type = other DNA
atggccggggccctggccggcctggccgccggcctgcaggtgccccgggtggcccccagcccagacagcgacagcgacacagattctgaggaccccagcctgcggcgctctgctgggggcctgctgcggagccaggtgatccacagcggccacttcatggtgagcagcccccacagcgacagcctgcccaggagaagagaccaggagggctctgtgggccccagcgactttggccccaggagcattgaccccaccctgacccggctgtttgaatgtctgagcctggcctacagcggcaagctggtgagccccaagtggaagaacttcaagggcctgaagctgctgtgccgggacaagatccggctgaacaatgccatctggagggcctggtacatccagtatgtgaagaggaggaagagccctgtgtgtggctttgtgacccccctgcagggccctgaggctgatgcccacaggaagccagaggccgtggtgctggagggcaactactggaagaggcgcatcgaggtggtgatgagggagtaccacaagtggaggatctactacaagaagaggctgaggaagcccagccgggaggatgacctgctggcccccaagcaggccgagggccgctggcccccacctgagcagtggtgcaagcagctgttcagctctgtggtgcctgtgctgctgggggaccctgaggaggagcccggcggccggcagctgctggacctgaactgcttcctgagtgacatcagtgacaccctcttcaccatgacccagagcggccccagccccctgcagctgcccccagaagatgcctacgtgggcaatgctgacatgatccagcctgacctgacccccctgcagcccagcctggatgacttcatggacatcagtgacttcttcaccaacagccggctgccccagccccccatgcccagcaacttccctgagccccccagcttcagccctgtggtggacagcctcttcagcagcggcaccctgggccctgaggtgcccccagccagcagcgccatgacccacctgagcggccacagccggctgcaggccaggaacagctgccccggccccctggacagcagcgccttcctgagcagtgacttcctgctgcctgaggaccccaagccccggctgcccccacctcctgtgcccccacccctgctgcactacccacctccagccaaggtgcccggcctggagccctgccccccaccacccttcccccccatggccccacccacagccctgctgcaggaggagcccctcttcagcccccgcttccccttccccaccgtgcccccagcccctggggtgagccccctgcctgccccagctgccttcccccccaccccccagagcgtgcccagccctgcccccacccccttccccatcgagctgctgcccctgggctacagcgagcccgccttcggcccctgcttctccatgccccggggcaagcccccagcccccagcccccggggccagaaggccagcccccccaccctggccccagccacagccagcccccccaccacagctggcagcaacaacccctgcctgacccagctgctgacagctgccaagccagagcaggccctggagccccccctggtgagcagcaccctgctgcggagccctggcagcccccaggagaccgtgcctgagttcccctgcaccttcctgccccccaccccagcccccaccccaccccggcccccacctggccctgccaccctggcccccagccggcccctgctggtgcccaaggccgagcggctgagccccccagcccccagcggcagcgagcggcggctgagcggggacctgagctccatgcctggccctggcaccctgtctgtgcgggtgagccccccccagcccatcctgagccggggccgcccagacagcaacaagacagagaacagacgcatcacccacatctctgctgagcagaagaggcgcttcaacatcaagctgggctttgacaccctgcacggcctggtgtccaccctgagcgcccagcccagcctgaaggtgtccaaggccaccaccctgcagaagacagctgagtacatcctgatgctgcagcaggagcgggccggcctgcaggaggaggcccagcagctgagagatgaaattgaggagctgaatgctgccatcaacctgtgccagcagcagctgcctgccaccggggtgcccatcacccaccagagatttgaccagatgagggacatgtttgatgattatgtgaggaccaggaccctgcacaactggaagttctgggtgttcagcatcctgatccggcccctgtttgagagcttcaacggcatggtgtccacagcctctgtgcacaccctgcggcagaccagcctggcctggctggaccagtactgcagcctgcctgccctgcggcccaccgtgctgaacagcctgcggcagctgggcaccagcaccagcatcctgacagaccccggccgcatccctgagcaggccaccagggctgtgacagagggcaccctgggcaagcccctgtag

SEQ ID NO: 160218 - DNA, 2496 bp, synthetic construct
  misc_feature 1..2496: note = Description of Artificial Sequence: Synthetic coding sequence
  source 1..2496: mol_type = other DNA
atggccggggccctggccggcctggccgccggcctgcaggtgccccgggtggcccccagcccagacagcgacagcgacacagattctgaggaccccagcctgcggcgctctgctgggggcctgctgcggagccaggtgatccacagcggccacttcatggtgagcagcccccacagcgacagcctgcccaggagaagagaccaggagggctctgtgggccccagcgactttggccccaggagcattgaccccaccctgacccggctgtttgaatgtctgagcctggcctacagcggcaagctggtgagccccaagtggaagaacttcaagggcctgaagctgctgtgccgggacaagatccggctgaacaatgccatctggagggcctggtacatccagtatgtgaagaggaggaagagccctgtgtgtggctttgtgacccccctgcagggccctgaggctgatgcccacaggaagccagaggccgtggtgctggagggcaactactggaagaggcgcatcgaggtggtgatgagggagtaccacaagtggaggatctactacaagaagaggctgaggaagcccagccgggaggatgacctgctggcccccaagcaggccgagggccgctggcccccacctgagcagtggtgcaagcagctgttcagctctgtggtgcctgtgctgctgggggaccctgaggaggagcccggcggccggcagctgctggacctgaactgcttcctgagtgacatcagtgacaccctcttcaccatgacccagagcggccccagccccctgcagctgcccccagaagatgcctacgtgggcaatgctgacatgatccagcctgacctgacccccctgcagcccagcctggatgacttcatggacatcagtgacttcttcaccaacagccggctgccccagccccccatgcccagcaacttccctgagccccccagcttcagccctgtggtggacagcctcttcagcagcggcaccctgggccctgaggtgcccccagccagcagcgccatgacccacctgagcggccacagccggctgcaggccaggaacagctgccccggccccctggacagcagcgccttcctgagcagtgacttcctgctgcctgaggaccccaagccccggctgcccccacctcctgtgcccccacccctgctgcactacccacctccagccaaggtgcccggcctggagccctgccccccaccacccttcccccccatggccccacccacagccctgctgcaggaggagcccctcttcagcccccgcttccccttccccaccgtgcccccagcccctggggtgagccccctgcctgccccagctgccttcccccccaccccccagagcgtgcccagccctgcccccacccccttccccatcgagctgctgcccctgggctacagcgagcccgccttcggcccctgcttctccatgccccggggcaagcccccagcccccagcccccggggccagaaggccagcccccccaccctggccccagccacagccagcccccccaccacagctggcagcaacaacccctgcctgacccagctgctgacagctgccaagccagagcaggccctggagccccccctggtgagcagcaccctgctgcggagccctggcagcccccaggagaccgtgcctgagttcccctgcaccttcctgccccccaccccagcccccaccccaccccggcccccacctggccctgccaccctggcccccagccggcccctgctggtgcccaaggccgagcggctgagccccccagcccccagcggcagcgagcggcggctgagcggggacctgagctccatgcctggccctggcaccctgtctgtgcgggtgagccccccccagcccatcctgagccggggccgcccagacagcaacaagaacagacgcatcacccacatctctgctgagcagaagaggcgcttcaacatcaagctgggctttgacaccctgcacggcctggtgtccaccctgagcgcccagcccagcctgaaggagagagctggcctgcaggaggaggcccagcagctgagagatgaaattgaggagctgaatgctgccatcaacctgtgccagcagcagctgcctgccactggagtgcccatcacccaccagagatttgaccagatgagggacatgtttgatgattatgtgaggaccaggaccctgcacaactggaagttctgggtgttcagcatcctgatccggcccctgtttgagagcttcaacggcatggtgtccacagcctctgtgcacaccctgcggcagaccagcctggcctggctggaccagtactgcagcctgcctgccctgcggcccaccgtgctgaacagcctgcggcagctgggcaccagcaccagcatcctgacagatcctggccgcatccctgagcaggccaccagggctgtgacagagggcaccctgggcaagcccctgtag

SEQ ID NO: 160219 - DNA, 2280 bp, synthetic construct
  misc_feature 1..2280: note = Description of Artificial Sequence: Synthetic coding sequence
  source 1..2280: mol_type = other DNA
atggccggggccctggccggcctggccgccggcctgcaggtgccccgggtggcccccagcccagacagcgacagcgacacagattctgaggaccccagcctgcggcgctctgctgggggcctgctgcggagccaggtgatccacagcggccacttcatggtgagcagcccccacagcgacagcctgcccaggagaagagaccaggagggctctgtgggccccagcgactttggccccaggagcattgaccccaccctgacccggctgtttgaatgtctgagcctggcctacagcggcaagctggtgagccccaagtggaagaacttcaagggcctgaagctgctgtgccgggacaagatccggctgaacaatgccatctggagggcctggtacatccagtatgtgaagaggaggaagagccctgtgtgtggctttgtgacccccctgcagggccctgaggctgatgcccacaggaagccagaggccgtggtgctggagggcaactactggaagaggcgcatcgagctgcccccagaagatgcctacgtgggcaatgctgacatgatccagcctgacctgacccccctgcagcccagcctggatgacttcatggacatcagtgacttcttcaccaacagccggctgccccagccccccatgcccagcaacttccctgagcccccatccttcagccctgtggtggacagcctcttcagcagcggcaccctgggccctgaggtgcccccagccagcagcgccatgacccacctgagcggccacagccggctgcaggccaggaacagctgccccggccccctggacagcagcgccttcctgagcagtgacttcctgctgcctgaggaccccaagccccggctgcccccacctcctgtgcccccacccctgctgcactacccacctccagccaaggtgcccggcctggagccctgccccccaccacccttcccccccatggccccacccacagccctgctgcaggaggagcccctcttcagcccccgcttccccttccccaccgtgcccccagcccctggggtgagccccctgcctgccccagctgccttcccccccaccccccagagcgtgcccagccctgcccccacccccttccccatcgagctgctgcccctgggctacagcgagcccgccttcggcccctgcttctccatgccccggggcaagcccccagcccccagcccccggggccagaaggccagcccccccaccctggccccagccacagccagcccccccaccacagctggcagcaacaacccctgcctgacccagctgctgacagctgccaagccagagcaggccctggagccccccctggtgagcagcaccctgctgcggagccctggcagcccccaggagaccgtgcctgagttcccctgcaccttcctgccccccaccccagcccccaccccacccaggcctcctcctggccctgccaccctggcccccagccggcccctgctggtgcccaaggccgagcggctgagccccccagcccccagcggcagcgagcggcggctgagcggggacctgagctccatgcctggccctggcaccctgtctgtgcgggtgtccccaccccagcccatcctgagccggggccgcccagacagcaacaagacagaaaatcgccgcatcacccacatctctgctgagcagaagaggcgcttcaacatcaagctgggctttgacaccctgcacggcctggtgtccaccctgagcgcccagcccagcctgaaggtgtccaaggccaccaccctgcagaagacagctgagtacatcctgatgctgcagcaggagagagctggcctgcaggaggaggcccagcagctgagagatgaaattgaggagctgaatgctgccatcaacctgtgccagcagcagctgcctgccactggagtgcccatcacccaccagagatttgaccagatgagggacatgtttgatgattatgtgaggaccaggaccctgcacaactggaagttctgggtgttcagcatcctgatccggcccctgtttgagagcttcaacggcatggtgtccacagcctctgtgcacaccctgcggcagaccagcctggcctggctggaccagtactgcagcctgcctgccctgcggcccaccgtgctgaacagcctgcggcagctgggcaccagcaccagcatcctgacagatcctggccgcatccctgagcaggccaccagggctgtgacagagggcaccctgggcaagcccctgtag

SEQ ID NO: 160220 - DNA, 2553 bp, synthetic construct
  misc_feature 1..2553: note = Description of Artificial Sequence: Synthetic coding sequence
  source 1..2553: mol_type = other DNA
atggccggggccctggccggcctggccgccggcctgcaggtgccccgggtggcccccagcccagacagcgacagcgacacagattctgaggaccccagcctgcggcgctctgctgggggcctgctgcggagccaggtgatccacagcggccacttcatggtgagcagcccccacagcgacagcctgcccaggagaagagaccaggagggctctgtgggccccagcgactttggccccaggagcattgaccccaccctgacccggctgtttgaatgtctgagcctggcctacagcggcaagctggtgagccccaagtggaagaacttcaagggcctgaagctgctgtgccgggacaagatccggctgaacaatgccatctggagggcctggtacatccagtatgtgaagaggaggaagagccctgtgtgtggctttgtgacccccctgcagggccctgaggctgatgcccacaggaagccagaggccgtggtgctggagggcaactactggaagaggcgcatcgaggtggtgatgagggagtaccacaagtggaggatctactacaagaagaggctgaggaagcccagccgggaggatgacctgctggcccccaagcaggccgagggccgctggcccccacctgagcagtggtgcaagcagctgttcagctctgtggtgcctgtgctgctgggggaccctgaggaggagcccggcggccggcagctgctggacctgaactgcttcctgagtgacatcagtgacaccctcttcaccatgacccagagcggccccagccccctgcagctgcccccagaagatgcctacgtgggcaatgctgacatgatccagcctgacctgacccccctgcagcccagcctggatgacttcatggacatcagtgacttcttcaccaacagccggctgccccagccccccatgcccagcaacttccctgagccccccagcttcagccctgtggtggacagcctcttcagcagcggcaccctgggccctgaggtgcccccagccagcagcgccatgacccacctgagcggccacagccggctgcaggccaggaacagctgccccggccccctggacagcagcgccttcctgagcagtgacttcctgctgcctgaggaccccaagccccggctgcccccacctcctgtgcccccacccctgctgcactacccacctccagccaaggtgcccggcctggagccctgccccccaccacccttcccccccatggccccacccacagccctgctgcaggaggagcccctcttcagcccccgcttccccttccccaccgtgcccccagcccctggggtgagccccctgcctgccccagctgccttcccccccaccccccagagcgtgcccagccctgcccccacccccttccccatcgagctgctgcccctgggctacagcgagcccgccttcggcccctgcttctccatgccccggggcaagcccccagcccccagcccccggggccagaaggccagcccccccaccctggccccagccacagccagcccccccaccacagctggcagcaacaacccctgcctgacccagctgctgacagctgccaagccagagcaggccctggagccccccctggtgagcagcaccctgctgcggagccctggcagcccccaggagaccgtgcctgagttcccctgcaccttcctgccccccaccccagcccccaccccaccccggcccccacctggccctgccaccctggcccccagccggcccctgctggtgcccaaggccgagcggctgagccccccagcccccagcggcagcgagcggcggctgagcggggacctgagctccatgcctggccctggcaccctgtctgtgcgggtgagccccccccagcccatcctgagccggggccgcccagacagcaacaagaacagacgcatcacccacatctctgctgagcagaagaggcgcttcaacatcaagctgggctttgacaccctgcacggcctggtgtccaccctgagcgcccagcccagcctgaaggtgtccaaggccaccaccctgcagaagacagctgagtacatcctgatgctgcagcaggagcgggccggcctgcaggaggaggcccagcagctgagagatgaaattgaggagctgaatgctgccatcaacctgtgccagcagcagctgcctgccaccggggtgcccatcacccaccagagatttgaccagatgagggacatgtttgatgattatgtgaggaccaggaccctgcacaactggaagttctgggtgttcagcatcctgatccggcccctgtttgagagcttcaacggcatggtgtccacagcctctgtgcacaccctgcggcagaccagcctggcctggctggaccagtactgcagcctgcctgccctgcggcccaccgtgctgaacagcctgcggcagctgggcaccagcaccagcatcctgacagaccccggccgcatccctgagcaggccaccagggctgtgacagagggcaccctgggcaagcccctgtag

SEQ ID NO: 160221 - DNA, 2502 bp, synthetic construct
  misc_feature 1..2502: note = Description of Artificial Sequence: Synthetic coding sequence
  source 1..2502: mol_type = other DNA
atggccggggccctggccggcctggccgccggcctgcaggtgccccgggtggcccccagcccagacagcgacagcgacacagattctgaggaccccagcctgcggcgctctgctgggggcctgctgcggagccaggtgatccacagcggccacttcatggtgagcagcccccacagcgacagcctgcccaggagaagagaccaggagggctctgtgggccccagcgactttggccccaggagcattgaccccaccctgacccggctgtttgaatgtctgagcctggcctacagcggcaagctggtgagccccaagtggaagaacttcaagggcctgaagctgctgtgccgggacaagatccggctgaacaatgccatctggagggcctggtacatccagtatgtgaagaggaggaagagccctgtgtgtggctttgtgacccccctgcagggccctgaggctgatgcccacaggaagccagaggccgtggtgctggagggcaactactggaagaggcgcatcgaggtggtgatgagggagtaccacaagtggaggatctactacaagaagaggctgaggaagcccagccgggaggatgacctgctggcccccaagcaggccgagggccgctggcccccacctgagcagtggtgcaagcagctgttcagctctgtggtgcctgtgctgctgggggaccctgaggaggagcccggcggccggcagctgctggacctgaactgcttcctgagtgacatcagtgacaccctcttcaccatgacccagagcggccccagccccctgcagctgcccccagaagatgcctacgtgggcaatgctgacatgatccagcctgacctgacccccctgcagcccagcctggatgacttcatggacatcagtgacttcttcaccaacagccggctgccccagccccccatgcccagcaacttccctgagccccccagcttcagccctgtggtggacagcctcttcagcagcggcaccctgggccctgaggtgcccccagccagcagcgccatgacccacctgagcggccacagccggctgcaggccaggaacagctgccccggccccctggacagcagcgccttcctgagcagtgacttcctgctgcctgaggaccccaagccccggctgcccccacctcctgtgcccccacccctgctgcactacccacctccagccaaggtgcccggcctggagccctgccccccaccacccttcccccccatggccccacccacagccctgctgcaggaggagcccctcttcagcccccgcttccccttccccaccgtgcccccagcccctggggtgagccccctgcctgccccagctgccttcccccccaccccccagagcgtgcccagccctgcccccacccccttccccatcgagctgctgcccctgggctacagcgagcccgccttcggcccctgcttctccatgccccggggcaagcccccagcccccagcccccggggccagaaggccagcccccccaccctggccccagccacagccagcccccccaccacagctggcagcaacaacccctgcctgacccagctgctgacagctgccaagccagagcaggccctggagccccccctggtgagcagcaccctgctgcggagccctggcagcccccaggagaccgtgcctgagttcccctgcaccttcctgccccccaccccagcccccaccccaccccggcccccacctggccctgccaccctggcccccagccggcccctgctggtgcccaaggccgagcggctgagccccccagcccccagcggcagcgagcggcggctgagcggggacctgagctccatgcctggccctggcaccctgtctgtgcgggtgagccccccccagcccatcctgagccggggccgcccagacagcaacaagacagagaacagacgcatcacccacatctctgctgagcagaagaggcgcttcaacatcaagctgggctttgacaccctgcacggcctggtgtccaccctgagcgcccagcccagcctgaaggagagagctggcctgcaggaggaggcccagcagctgagagatgaaattgaggagctgaatgctgccatcaacctgtgccagcagcagctgcctgccactggagtgcccatcacccaccagagatttgaccagatgagggacatgtttgatgattatgtgaggaccaggaccctgcacaactggaagttctgggtgttcagcatcctgatccggcccctgtttgagagcttcaacggcatggtgtccacagcctctgtgcacaccctgcggcagaccagcctggcctggctggaccagtactgcagcctgcctgccctgcggcccaccgtgctgaacagcctgcggcagctgggcaccagcaccagcatcctgacagatcctggccgcatccctgagcaggccaccagggctgtgacagagggcaccctgggcaagcccctgtag

SEQ ID NO: 160222 - DNA, 1059 bp, synthetic construct
  misc_feature 1..1059: note = Description of Artificial Sequence: Synthetic coding sequence
  source 1..1059: mol_type = other DNA
atgaacaccatcgtgttcaacaagctgagcggggctgtgctgtttgaagatggaggagccagcgagcgggagcggggcggccggccctacagcggcgtgctggacagcccccacgcccggcctgaggtgggcatcccagatggcccccccctgaaggacaacctgggcctgcggcacagaagaactggagcccggcagaatggaggcaaggtgcgccacaagaggcaggccctgcaggacatggcccggcccctgaagcagtggctgtacaagcaccgggacaacccctaccccaccaagacagagaagatcctgctggccctgggcagccagatgaccctggtgcaggtgagcaactggtttgccaatgcccggcggcggctgaagaacacagtgcggcagcctgacctgtcctgggccctgcgcatcaagctgtacaacaagtatgtgcagggcaatgctgagcggctgtctgtgtccagtgatgacagctgcagtgaagatggagagaacccccccaggacccacatgaatgaaggaggctacaacacccctgtgcaccaccctgtgatcaagtctgagaacagcgtcatcaaggccggcgtgcggcctgagagccgggccagcgaggactatgtggccccacccaagtacaagagcagcctgctgaaccgctacctgaatgacagcctgcggcacgtgatggccaccaacaccaccatgatgggcaagacccggcagaggaaccacagcggcagcttcagcagcaatgaatttgaggaggagctggtgagccccagcagcagcgagacagagggcaactttgtgtacagaacagacaccctggagaatggcagcaacaagggggagagcgctgccaacaggaagggccccagcaaggatgacacctactggaaggagatcaatgctgccatggccctgaccaacctggcccagggcaaggacaagctgcagggcaccaccagctgcatcatccagaagagcagccacatcgccgaggtgaagacagtgaaggtgcccctggtgcagcagttctag

SEQ ID NO: 160223 - DNA, 1059 bp, synthetic construct; identical to SEQ ID NO: 160222
  misc_feature 1..1059: note = Description of Artificial Sequence: Synthetic coding sequence
  source 1..1059: mol_type = other DNA

SEQ ID NO: 160224 - DNA, 177 bp, synthetic construct
  misc_feature 1..177: note = Description of Artificial Sequence: Synthetic coding sequence
  source 1..177: mol_type = other DNA
atgaacaccatcgtgttcaacaagctgagcggggctgtgctgtttgaagatggaggagccagcgagcgggagcggggcggccggccctacagcggcgtgctggacagcccccacgcccggcctgaggtgggcatcccagatggcccccccctgaaggacaacctgggcctgaggtag

SEQ ID NO: 160225 - DNA, 288 bp, synthetic construct
  misc_feature 1..288: note = Description of Artificial Sequence: Synthetic coding sequence
  source 1..288: mol_type = other DNA
atgaactttgacttccccttcaagaagggcagcggcatccccctgctgaccaccaacctgagcccccagtgcctgagcctgctgcacgccatggtggcctatgaccctgatgaaagaattgctgcccaccaggccctgcagcacccctacttccaggagcagaggacccagaatggaagtgaagatgaggccagcgctgtgctgctgcccatccagaccaggagcagcctgaaccccctgctgagcacctgcatgctgcccggccgctctgtgaccctgctggtgtag

SEQ ID NO: 160226 - DNA, 1260 bp, synthetic construct
  misc_feature 1..1260: note = Description of Artificial Sequence: Synthetic coding sequence
  source 1..1260: mol_type = other DNA
atgaagaactacaaggccatcggcaagatcggggagggcaccttcagcgaggtgatgaagatgcagagcctgagagatggcaactactatgcctgcaagcagatgaagcagagatttgagagcattgagcaggtgaacaacctgcgggagatccaggccctgcggcggctgaacccccaccccaacatcctgatgctgcacgaggtggtgtttgacaggaagagcggcagcctggccctgatctgtgagctgatggacatgaacatctatgagctgatccggggccgccgctaccccctgtctgagaagaagatcatgcactacatgtaccagctgtgcaagagcctggaccacatccacagaaatggcatcttccacagagatgtgaagccagagaacatcctgatcaagcaggatgtgctgaagctgggggactttggcagctgccgctctgtgtacagcaagcagccctacacagagtacatcagcacccgctggtaccgggccccagaatgtctgctgacagatggcttctacacctacaagatggacctgtggagcgctggctgtgtgttctatgaaattgccagcctgcagcccctcttccctggggtgaatgagctggaccagatcagcaagatccatgatgtgattggcaccccagcccagaagatcctgaccaagttcaagcagagccgggccatgaactttgacttccccttcaagaagggcagcggcatccccctgctgaccaccaacctgagcccccagtgcctgagcctgctgcacgccatggtggcctatgaccctgatgaaagaattgctgcccaccaggccctgcagcacccctacttccaggagcagaggaagacagagaagagggccctgggcagccacaggaaggccggcttccctgagcaccctgtggcccctgagcccctgagcaacagctgccagatcagcaaggagggcaggaagcagaagcagagcctgaagcaggaggaggaccggcccaagaggcggggccctgcctacgtgatggagctgcccaagctgaagctgtctggagtggtgcggctgagcagctacagcagccccaccctgcagagcgtgctgggcagcggcaccaacggccgggtgcctgtgctgcggcccctgaagtgcatcccagccagcaagaagacagacccccagaaggacctgaagccagccccccagcagtgccgcctgcccaccatcgtgaggaagggcggccgctag

SEQ ID NO: 160227 - DNA, 2667 bp, synthetic construct
  misc_feature 1..2667: note = Description of Artificial Sequence: Synthetic coding sequence
  source 1..2667: mol_type = other DNA
atggccggggctgctgctgagagcggccgggagctgtggacctttgctggcagccgggaccccagcgccccccggctggcctacggctacggccctggcagcctgcgggagctgcgggcccgggagttcagccggctggccggcaccgtgtacctggaccatgctggggccaccctcttcagccagagccagctggagagcttcaccagtgacctgatggagaacacctacggcaacccccacagccagaacatcagcagcaagctgacccatgacacagtggagcaggtgcgctaccgcatcctggcccacttccacaccacagctgaggactacaccgtcatcttcaccgctggcagcacagctgccctgaagctggtggccgaggccttcccctgggtgtcccagggccctgagagcagcggcagccgcttctgctacctgacagacagccacacctctgtggtgggcatgagaaatgtgaccatggccatcaacgtcatcagcacccctgtgcggcctgaggacctgtggagcgctgaggagaggtctgccagcgccagcaacccagactgccagctgccccacctgttctgctacccagcccagagcaacttctctggagtgcgctaccccctgtcctggattgaggaggtgaagagcggccgcctgcaccctgtgtccacccctgggaagtggtttgtgctgctggatgctgccagctatgtgtccaccagccccctggacctgagcgcccaccaggccgactttgtgcccatctccttctacaagatcttcggcttccccaccggcctgggcgccctgctggtgcacaacagagctgcccccctgctgaggaagacctactttggaggcggcacagccagcgcctacctggccggggaggacttctacatcccccggcagagcgtggcccagagatttgaagatggcaccatctccttcctggatgtgattgccctgaagcacggctttgacaccctggagcggctgactggaggcatggagaacatcaagcagcacaccttcaccctggcccagtacacctacgtggccctgagcagcctgcagtacccaaatggagcccctgtggtgcgcatctacagcgacagcgagttcagcagccctgaggtgcagggccccatcatcaacttcaacgtgctggatgacaagggcaacatcatcggctacagccaggtggacaagatggccagcctgtacaacatccacctgaggacaggctgcttctgcaacacaggagcctgccagaggcacctgggcatcagcaatgagatggtgaggaagcacttccaggccggccacgtgtgtggggacaacatggacctgattgatggccagcccaccggctctgtgcgcatcagctttggctacatgagcaccctggatgatgtgcaggccttcctgcgcttcatcatcgacacccggctgcacagcagcggggactggcctgtgccccaggcccatgctgacacaggagagaccggggcccccagcgctgacagccaggctgatgtgatcccagctgtgatgggccgccgcagcctgagcccccaggaggatgccctgaccggcagccgggtgtggaacaacagcagcacagtgaatgctgtgcctgtggcccctcctgtgtgtgatgtggcccggacccagcccacccccagcgagaaggccgccggcgtgctggagggcgccctgggcccccacgtggtgaccaacctgtacctgtaccccatcaagagctgtgccgcctttgaggtgacccgctggcctgtgggcaaccagggcctgctgtatgaccgctcctggatggtggtgaaccacaacggggtgtgcctgagccagaagcaggagccccggctgtgcctgatccagcccttcatcgacctgcggcagaggatcatggtgatcaaggccaagggcatggagcccatcgaggtgcccctggaggagaacagcgagaggacccagatccggcagagccgggtgtgtgccgacagagtgtccacctatgactgtggggagaagatcagctcctggctgagcaccttcttcggccggccctgccacctgatcaagcagagcagcaacagccagagaaatgccaagaagaagcacggcaaggaccagctgcccggcaccatggccaccctgagcctggtgaatgaggcccagtacctgctgatcaacaccagcagcatcctggagctgcaccggcagctgaacaccagtgatgaaaatggcaaggaggagctgttcagcctgaaggacctgagcctgcgcttccgggccaacatcatcatcaacgggaagagggcctttgaggaggagaagtgggatgagatcagcatcggcagcctgcgcttccaggtgctgggcccctgccaccgctgccagatgatctgcatcgaccagcagacaggccagaggaaccagcacgtgttccagaagctgtctgagagccgggagaccaaggtgaactttggcatgtacctgatgcacgccagcctggacctgagcagcccctgcttcctgtctgtgggcagccaggtgctgcctgtgctgaaggaaaatgtggagggccatgacctgcctgccagcgagaagcaccaggatgtgaccagctag

SEQ ID NO: 160228 - DNA, 1863 bp, synthetic construct
  misc_feature 1..1863: note = Description of Artificial Sequence: Synthetic coding sequence
  source 1..1863: mol_type = other DNA
atggccgcccggcccctgagcaggatgctgcggcggctgctgcggagcagcgcccggagctgcagcagcggggcccctgtgacccagccctgccctggagagagcgcccgggccgccagcgaggaggtgtccagaagacggcagttcctgcgggagcacgccgcccccttcagcgccttcctgacagacagctttggccggcagcacagctacctgcgcatcagcctgacagagaagtgcaacctgcgctgccagtactgcatgcctgaggagggcgtgcccctgacccccaaggccaacctgctgaccacagaggagatcctgaccctggcccggctgtttgtgaaggagggcatcgacaagatccggctgactggaggagagcccctcatccggccagatgtggtggacatcgtggcccagctgcagaggctggagggcctgcggaccatcggcgtgaccaccaacggcatcaacctggcccggctgctgccccagctgcagaaggccggcctgagcgccatcaacatcagcctggacaccctggtgcctgccaagtttgagttcatcgtgcggaggaagggcttccacaaggtgatggagggcatccacaaggccatcgagctgggctacaaccctgtgaaggtgaactgtgtggtgatgaggggcctgaatgaagatgagctgctggactttgctgccctgacagagggcctgcccctggatgtgcgcttcatcgagtacatgccctttgatggcaacaagtggaacttcaagaagatggtgtcctacaaggagatgctggacacagtgcggcagcagtggccagagctggagaaggtgcctgaggaggagagcagcacagccaaggccttcaagatccctggcttccagggccagatctccttcatcacctccatgtctgagcacttctgtggcacctgcaaccggctgcgcatcacagcagatggcaacctgaaggtgtgcctgtttggaaacagcgaggtgtccctgcgggaccacctgcgggccggggccagcgagcaggagctgctgcgcatcattggagctgctgtgggcaggaagaagaggcagcacgccgagctgttcctgatgttccccaacagccccccagccaaccccagcatcttctcctgggaccccctgcacgtgcagggcctgcggcccaggatgtccttcagcagccaggtggccaccctgtggaagggctgccgggtgccccagaccccacccctggcccagcagaggctgggcagcggcagcttccagaggcactacaccagcagagctgacagtgatgccaacagcaagtgcctgagccctggctcctgggccagcgctgcccccagcggcccccagctgaccagcgagcagctgacccacgtggacagcgagggccgggccgccatggtggatgtgggcaggaagccagacacagagcgggtggccgtggccagcgctgtggtgctgctgggccctgtggccttcaagctggtgcagcagaaccagctgaagaagggagatgccctggtggtggcccagctggccggcgtgcaggccgccaaggtgaccagccagctgatccccctgtgccaccacgtggccctgagccacatccaggtgcagctggagctggacagcaccaggcatgctgtgaagatccaggccagctgccgggcccggggccccactggagtggagatggaggccctgaccagcgctgctgtggccgccctgaccctgtatgacatgtgcaaggctgtgtcccgggacatcgtgctggaggagatcaagctgatcagcaagacaggaggccagagaggagacttccaccgggcctag

SEQ ID NO: 160229 - DNA, 1911 bp, synthetic construct
  misc_feature 1..1911: note = Description of Artificial Sequence: Synthetic coding sequence
  source 1..1911: mol_type = other DNA
atggccgcccggcccctgagcaggatgctgcggcggctgctgcggagcagcgcccggagctgcagcagcggggcccctgtgacccagccctgccctggagagagcgcccgggccgccagcgaggaggtgtccagaagacggcagttcctgcgggagcacgccgcccccttcagcgccttcctgacagacagctttggccggcagcacagctacctgcgcatcagcctgacagagaagtgcaacctgcgctgccagtactgcatgcctgaggagggcgtgcccctgacccccaaggccaacctgctgaccacagaggagatcctgaccctggcccggctgtttgtgaaggagggcatcgacaagatccggctgactggaggagagcccctcatccggccagatgtggtggacatcgtggcccagctgcagaggctggagggcctgcggaccatcggcgtgaccaccaacggcatcaacctggcccggctgctgccccagctgcagaaggccggcctgagcgccatcaacatcagcctggacaccctggtgcctgccaagtttgagttcatcgtgcggaggaagggcttccacaaggtgatggagggcatccacaaggccatcgagctgggctacaaccctgtgaaggtgaactgtgtggtgatgaggggcctgaatgaagatgagctgctggactttgctgccctgacagagggcctgcccctggatgtgcgcttcatcgagtacatgccctttgatggcaacaagtggaacttcaagaagatggtgtcctacaaggagatgctggacacagtgcggcagcagtggccagagctggagaaggtgcctgaggaggagagcagcacagccaaggccttcaagatccctggcttccagggccagatctccttcatcacctccatgtctgagcacttctgtggcacctgcaaccggctgcgcatcacagcagatggcaacctgaaggtgtgcctgtttggaaacagcgaggtgtccctgcgggaccacctgcgggccggggccagcgagcaggagctgctgcgcatcattggagctgctgtgggcaggaagaagaggcagcacgccggcatgttcagcatcagccagatgaagaaccggcccatgatcctgattgagctgttcctgatgttccccaacagccccccagccaaccccagcatcttctcctgggaccccctgcacgtgcagggcctgcggcccaggatgtccttcagcagccaggtggccaccctgtggaagggctgccgggtgccccagaccccacccctggcccagcagaggctgggcagcggcagcttccagaggcactacaccagcagagctgacagtgatgccaacagcaagtgcctgagccctggctcctgggccagcgctgcccccagcggcccccagctgaccagcgagcagctgacccacgtggacagcgagggccgggccgccatggtggatgtgggcaggaagccagacacagagcgggtggccgtggccagcgctgtggtgctgctgggccctgtggccttcaagctggtgcagcagaaccagctgaagaagggagatgccctggtggtggcccagctggccggcgtgcaggccgccaaggtgaccagccagctgatccccctgtgccaccacgtggccctgagccacatccaggtgcagctggagctggacagcaccaggcatgctgtgaagatccaggccagctgccgggcccggggccccactggagtggagatggaggccctgaccagcgctgctgtggccgccctgaccctgtatgacatgtgcaaggctgtgtcccgggacatcgtgctggaggagatcaagctgatcagcaagacaggaggccagagaggagacttccaccgggcctag

SEQ ID NO: 160230 - DNA, 456 bp, synthetic construct
  misc_feature 1..456: note = Description of Artificial Sequence: Synthetic coding sequence
  source 1..456: mol_type = other DNA
atgccctttgatggcaacaagtggaacttcaagaagatggtgtcctacaaggagatgctggacacagtgcggcagcagtggccagagctggagaaggtgcctgaggaggagagcagcacagccaaggccttcaagatccctggcttccagggccagatctccttcatcaccagcatcctgactgtggcccggagctgctggcccctcttcctgtggccacccagcagcgagaccggctgtgcccacatgggccacagccccaaggacagctgccagaccacccagcccaccccaggccctgtgcacggctgcagcacccaccccagcctcttctggagcatcagcggcaaggagaagctgatgattgactgcctgcacccccacagcgcccagatcaagctgcgctgccagctgtgccgctgcaagaatgaagacacagtgtgggtgggccactag

SEQ ID NO: 160231 - DNA, 1071 bp, synthetic construct
  misc_feature 1..1071: note = Description of Artificial Sequence: Synthetic coding sequence
  source 1..1071: mol_type = other DNA
atgtggaagtcctggaagctgaggacagatgtgcgggaggtgtccagaagacggcagttcctgcgggagcacgccgcccccttcagcgccttcctgacagacagctttggccggcagcacagctacctgcgcatcagcctgacagagaagtgcaacctgcgctgccagtactgcatgcctgaggagggcgtgcccctgacccccaaggccaacctgctgaccacagaggagatcctgaccctggcccggctgtttgtgaaggagggcatcgacaagatccggctgaccggcggggagcccctcatccggccagatgtggtggacatcgtggcccagctgcagaggctggagggcctgcggaccatcggcgtgaccaccaacggcatcaacctggcccggctgctgccccagctgcagaaggccggcctgagcgccatcaacatcagcctggacaccctggtgcctgccaagtttgagttcatcgtgcggaggaagggcttccacaaggtgatggagggcatccacaaggccatcgagctgggctacaaccctgtgaaggtgaactgtgtggtgatgaggggcctgaatgaagatgagctgctggactttgctgccctgacagagggcctgcccctggatgtgcgcttcatcgagtacatgccctttgatggcaacaagtggaacttcaagaagatggtgtcctacaaggagatgctggacacagtgcggcagcagtggccagagctggagaaggtgcctgaggaggagagcagcacagccaaggccttcaagatccctggcttccagggccagatctccttcatcacctccatgtctgagcacttctgtggcacctgcaaccggctgcgcatcacagcagatggcaacctgaaggtgtgcctgtttggaaattctgaggtgtccctgcgggaccacctgcgggccggggccagcgagcaggagctgctgcgcatcatcggggctgctgtgggcaggaagaagaggcagcacgccggcatgttcagcatcagccagatgaagaaccggcccatgatcctgattggaggatag

SEQ ID NO: 160232 - DNA, 1158 bp, synthetic construct
  misc_feature 1..1158: note = Description of Artificial Sequence: Synthetic coding sequence
  source 1..1158: mol_type = other DNA
atgtggaagtcctggaagctgaggacagatgtgcgggtgcgggagggcgccggcggcagcccctgtgccagcagccagcccggcagccggggcccctgcttcctgcccggcctgagcagccaggaggtgtccagaagacggcagttcctgcgggagcacgccgcccccttcagcgccttcctgacagacagctttggccggcagcacagctacctgcgcatcagcctgacagagaagtgcaacctgcgctgccagtactgcatgcctgaggagggcgtgcccctgacccccaaggccaacctgctgaccacagaggagatcctgaccctggcccggctgtttgtgaaggagggcatcgacaagatccggctgactggaggagagcccctcatccggccagatgtggtggacatcgtggcccagctgcagaggctggagggcctgcggaccatcggcgtgaccaccaacggcatcaacctggcccggctgctgccccagctgcagaaggccggcctgagcgccatcaacatcagcctggacaccctggtgcctgccaagtttgagttcatcgtgcggaggaagggcttccacaaggtgatggagggcatccacaaggccatcgagctgggctacaaccctgtgaaggtgaactgtgtggtgatgaggggcctgaatgaagatgagctgctggactttgctgccctgacagagggcctgcccctggatgtgcgcttcatcgagtacatgccctttgatggcaacaagtggaacttcaagaagatggtgtcctacaaggagatgctggacacagtgcggcagcagtggccagagctggagaaggtgcctgaggaggagagcagcacagccaaggccttcaagatccctggcttccagggccagatctccttcatcacctccatgtctgagcacttctgtggcacctgcaaccggctgcgcatcacagcagatggcaacctgaaggtgtgcctgtttggaaacagcgaggtgtccctgcgggaccacctgcgggccggggccagcgagcaggagctgctgcgcatcattggagctgctgtgggcaggaagaagaggcagcacgccggcatgttcagcatcagccagatgaagaaccggcccatgatcctgattggaggatag

SEQ ID NO: 160233 - DNA, 1158 bp, synthetic construct
  misc_feature 1..1158: note = Description of Artificial Sequence: Synthetic coding sequence
  source 1..1158: mol_type = other DNA
atggccgcccggcccctgagcaggatgctgcggcggctgctgcggagcagcgcccggagctgcagcagcggggcccctgtgacccagccctgccctggagagagcgcccgggccgccagcgaggaggtgtccagaagacggcagttcctgcgggagcacgccgcccccttcagcgccttcctgacagacagctttggccggcagcacagctacctgcgcatcagcctgacagagaagtgcaacctgcgctgccagtactgcatgcctgaggagggcgtgcccctgacccccaaggccaacctgctgaccacagaggagatcctgaccctggcccggctgtttgtgaaggagggcatcgacaagatccggctgactggaggagagcccctcatccggccagatgtggtggacatcgtggcccagctgcagaggctggagggcctgcggaccatcggcgtgaccaccaacggcatcaacctggcccggctgctgccccagctgcagaaggccggcctgagcgccatcaacatcagcctggacaccctggtgcctgccaagtttgagttcatcgtgcggaggaagggcttccacaaggtgatggagggcatccacaaggccatcgagctgggctacaaccctgtgaaggtgaactgtgtggtgatgaggggcctgaatgaagatgagctgctggactttgctgccctgacagagggcctgcccctggatgtgcgcttcatcgagtacatgccctttgatggcaacaagtggaacttcaagaagatggtgtcctacaaggagatgctggacacagtgcggcagcagtggccagagctggagaaggtgcctgaggaggagagcagcacagccaaggccttcaagatccctggcttccagggccagatctccttcatcacctccatgtctgagcacttctgtggcacctgcaaccggctgcgcatcacagcagatggcaacctgaaggtgtgcctgtttggaaacagcgaggtgtccctgcgggaccacctgcgggccggggccagcgagcaggagctgctgcgcatcattggagctgctgtgggcaggaagaagaggcagcacgccggcatgttcagcatcagccagatgaagaaccggcccatgatcctgattggaggatag

SEQ ID NO: 160234 - DNA, 1602 bp, synthetic construct
  misc_feature 1..1602: note = Description of Artificial Sequence: Synthetic coding sequence
  source 1..1602: mol_type = other DNA
atgcctgaggagggcgtgcccctgacccccaaggccaacctgctgaccacagaggagatcctgaccctggcccggctgtttgtgaaggagggcatcgacaagatccggctgaccggcggggagcccctcatccggccagatgtggtggacatcgtggcccagctgcagaggctggagggcctgcggaccatcggcgtgaccaccaacggcatcaacctggcccggctgctgccccagctgcagaaggccggcctgagcgccatcaacatcagcctggacaccctggtgcctgccaagtttgagttcatcgtgcggaggaagggcttccacaaggtgatggagggcatccacaaggccatcgagctgggctacaaccctgtgaaggtgaactgtgtggtgatgaggggcctgaatgaagatgagctgctggactttgctgccctgacagagggcctgcccctggatgtgcgcttcatcgagtacatgccctttgatggcaacaagtggaacttcaagaagatggtgtcctacaaggagatgctggacacagtgcggcagcagtggccagagctggagaaggtgcctgaggaggagagcagcacagccaaggccttcaagatccctggcttccagggccagatctccttcatcacctccatgtctgagcacttctgtggcacctgcaaccggctgcgcatcacagcagatggcaacctgaaggtgtgcctgtttggaaattctgaggtgtccctgcgggaccacctgcgggccggggccagcgagcaggagctgctgcgcatcatcggggctgctgtgggcaggaagaagaggcagcacgccgagctgttcctgatgttccccaacagccccccagccaaccccagcatcttctcctgggaccccctgcacgtgcagggcctgcggcccaggatgtccttcagcagccaggtggccaccctgtggaagggctgccgggtgccccagaccccacccctggcccagcagaggctgggcagcggcagcttccagaggcactacaccagcagagctgacagtgatgccaacagcaagtgcctgagccctggctcctgggccagcgctgcccccagcggcccccagctgaccagcgagcagctgacccacgtggacagcgagggccgggccgccatggtggatgtgggcaggaagccagacacagagcgggtggccgtggccagcgctgtggtgctgctgggccctgtggccttcaagctggtgcagcagaaccagctgaagaagggagatgccctggtggtggcccagctggccggcgtgcaggccgccaaggtgaccagccagctgatccccctgtgccaccacgtggccctgagccacatccaggtgcagctggagctggacagcaccaggcatgctgtgaagatccaggccagctgccgggcccggggccccaccggggtggagatggaggccctgaccagcgctgctgtggccgccctgaccctgtatgacatgtgcaaggctgtgtcccgggacatcgtgctggaggagatcaagctgatcagcaagacaggaggccagagaggagacttccaccgggcctag

SEQ ID NO: 160235 - DNA, 1911 bp, synthetic construct
  misc_feature 1..1911: note = Description of Artificial Sequence: Synthetic coding sequence
  source 1..1911: mol_type = other DNA
atgtggaagtcctggaagctgaggacagatgtgcgggtgcgggagggcgccggcggcagcccctgtgccagcagccagcccggcagccggggcccctgcttcctgcccggcctgagcagccaggaggtgtccagaagacggcagttcctgcgggagcacgccgcccccttcagcgccttcctgacagacagctttggccggcagcacagctacctgcgcatcagcctgacagagaagtgcaacctgcgctgccagtactgcatgcctgaggagggcgtgcccctgacccccaaggccaacctgctgaccacagaggagatcctgaccctggcccggctgtttgtgaaggagggcatcgacaagatccggctgactggaggagagcccctcatccggccagatgtggtggacatcgtggcccagctgcagaggctggagggcctgcggaccatcggcgtgaccaccaacggcatcaacctggcccggctgctgccccagctgcagaaggccggcctgagcgccatcaacatcagcctggacaccctggtgcctgccaagtttgagttcatcgtgcggaggaagggcttccacaaggtgatggagggcatccacaaggccatcgagctgggctacaaccctgtgaaggtgaactgtgtggtgatgaggggcctgaatgaagatgagctgctggactttgctgccctgacagagggcctgcccctggatgtgcgcttcatcgagtacatgccctttgatggcaacaagtggaacttcaagaagatggtgtcctacaaggagatgctggacacagtgcggcagcagtggccagagctggagaaggtgcctgaggaggagagcagcacagccaaggccttcaagatccctggcttccagggccagatctccttcatcacctccatgtctgagcacttctgtggcacctgcaaccggctgcgcatcacagcagatggcaacctgaaggtgtgcctgtttggaaacagcgaggtgtccctgcgggaccacctgcgggccggggccagcgagcaggagctgctgcgcatcattggagctgctgtgggcaggaagaagaggcagcacgccggcatgttcagcatcagccagatgaagaaccggcccatgatcctgattgagctgttcctgatgttccccaacagccccccagccaaccccagcatcttctcctgggaccccctgcacgtgcagggcctgcggcccaggatgtccttcagcagccaggtggccaccctgtggaagggctgccgggtgccccagaccccacccctggcccagcagaggctgggcagcggcagcttccagaggcactacaccagcagagctgacagtgatgccaacagcaagtgcctgagccctggctcctgggccagcgctgcccccagcggcccccagctgaccagcgagcagctgacccacgtggacagcgagggccgggccgccatggtggatgtgggcaggaagccagacacagagcgggtggccgtggccagcgctgtggtgctgctgggccctgtggccttcaagctggtgcagcagaaccagctgaagaagggagatgccctggtggtggcccagctggccggcgtgcaggccgccaaggtgaccagccagctgatccccctgtgccaccacgtggccctgagccacatccaggtgcagctggagctggacagcaccaggcatgctgtgaagatccaggccagctgccgggcccggggccccactggagtggagatggaggccctgaccagcgctgctgtggccgccctgaccctgtatgacatgtgcaaggctgtgtcccgggacatcgtgctggaggagatcaagctgatcagcaagacaggaggccagagaggagacttccaccgggcctag

SEQ ID NO: 160236 - DNA, 1071 bp, synthetic construct; identical to SEQ ID NO: 160231
  misc_feature 1..1071: note = Description of Artificial Sequence: Synthetic coding sequence
  source 1..1071: mol_type = other DNA

SEQ ID NO: 160237 - DNA, 267 bp, synthetic construct
  misc_feature 1..267: note = Description of Artificial Sequence: Synthetic coding sequence
  source 1..267: mol_type = other DNA
atggtgcccctgtgccaggtggaggtgctgtactttgccaagtctgctgagatcactggagtgcgctctgagaccatctctgtgccccaggagatcaaggccctgcagctgtggaaggagattgagaccaggcaccctggcctggctgatgtgaggaaccagatcatctttgctgtgcggcaggagtatgtggagctgggggaccagctgctggtgctgcagcctggagatgaaattgctgtgattcctcccatcagcggcggctag

SEQ ID NO: 160238 - DNA, 567 bp, synthetic construct
  misc_feature 1..567: note = Description of Artificial Sequence: Synthetic coding sequence
  source 1..567: mol_type = other DNA
atgagcagcctggagatcagcagcagctgcttcagcctggagaccaagctgcccctgagcccccccctggtggaggacagcgcctttgagcccagcaggaaggacatggatgaggtggaggagaagagcaaggatgtgatcaacttcaccgctgagaagctgtctgtggatgaggtgtcccagctggtgatcagccccctgtgtggggccatcagcctgtttgtgggcaccaccaggaacaactttgagggcaagaaggtgatcagcctggagtatgaggcctacctgcccatggccgagaatgaggtgaggaagatctgcagcgacatccggcagaagtggcctgtgaagcacatcgctgtgttccaccggctgggcctggtgcctgtgtctgaggccagcatcatcatcgctgtgtcctctgcccacagagctgccagcctggaggccgtgtcctatgccatcgacaccctgaaggccaaggtgcccatctggaagaaggagatctatgaggagagcagcacctggaagggcaacaaggagtgcttctgggccagcaacagctag

SEQ ID NO: 160239 - DNA, 267 bp, synthetic construct; identical to SEQ ID NO: 160237
  misc_feature 1..267: note = Description of Artificial Sequence: Synthetic coding sequence
  source 1..267: mol_type = other DNA

SEQ ID NO: 160240 - DNA, 267 bp, synthetic construct; identical to SEQ ID NO: 160237
  misc_feature 1..267: note = Description of Artificial Sequence: Synthetic coding sequence
  source 1..267: mol_type = other DNA

SEQ ID NO: 160241 - DNA, 267 bp, synthetic construct; identical to SEQ ID NO: 160237
  misc_feature 1..267: note = Description of Artificial Sequence: Synthetic coding sequence
  source 1..267: mol_type = other DNA

SEQ ID NO: 160242 - DNA, 462 bp, synthetic construct
  misc_feature 1..462: note = Description of Artificial Sequence: Synthetic coding sequence
  source 1..462: mol_type = other DNA
atgagcagcctggagatcagcagcagctgcttcagcctggagaccaagctgcccctgagcccccccctggtggaggacagcgcctttgagcccagcaggaaggacatggatgaggtggaggagaagagcaaggatgtgatcaacttcaccgctgagaagctgtctgtggatgaggtgtcccagctggtgatcagccccctgtgtggggccatcagcctgtttgtgggcaccaccaggaacaactttgagggcaagaaggtgatcagcctggagtatgaggcctacctgcccatggccgagaatgaggtgaggaagatctgcagcgacatccggcagaagtggcctgtgaagcacatcgctgtgttccaccggctgggcctggtgcctgtgtctgaggccagcatcatcatcgctgtgtcctctgcccacagagctgccagcctggaggccgtgtcctactag

SEQ ID NO: 160243 - DNA, 1644 bp, synthetic construct
  misc_feature 1..1644: note = Description of Artificial Sequence: Synthetic coding sequence
  source 1..1644: mol_type = other DNA
atggaggtgggcggggacacagctgccccagcccctgggggcgctgaggacctggaggacacccagttccccagcgaggaggcccgggagggcggcggcgtgcatgctgtgcccccagaccctgaagatgagggcctggaggagaccggcagcaaggacaaggaccagccccccagccccagccccccaccccagagcgaggccctgagcagcaccagccggctgtggagccctgctgcccctgagaacagccccacctgcagccctgagagcagcagcggcggccagggcggggaccccagtgatgaggagtggaggagccagaggaagcacgtgtttgtgctgtctgaggccggcaagcccatctacagccgctatggctctgtggaggccctgagcgccaccatgggcgtgatgacagccctggtgtcctttgtgcagagcgctggagatgccatccgggccatctatgcagaggaccacaagctggtgttcctgcagcagggccccctgctgctggtggccatgagcaggaccagccagagcgctgcccagctgcggggggagctgctggccgtgcacgcccagatcgtgtccaccctgacccgggcctctgtggcccgcatctttgcccacaagcagaactatgacctgcggcggctgctggccggcagcgagaggaccctggaccggctgctggacagcatggagcaggaccccggggccctgctgctgggcgctgtgcgctgtgtgcccctggcccggcccctgagagatgccctgggcgccctgctgcggcgctgcacagcccctggcctggccctgtctgtgctggccgtgggcggccgcctcatcacagctgcccaggagagaaatgtgctggccgagtgccgcctggaccctgctgacctgcagctgctgctggactgggtgggcgccccagcctttgctgctggggaggcctgggcccctgtgtgcctgccccgcttcaacccagatggcttcttctacgcctacgtggcccggctggatgccatgcctgtgtgcctgctgctgctgggcacccagcgggaggccttccacgccatggccgcctgccggcggctggtggaggatggcatgcacgccctgggcgccatgagggccctgggggaggccgccagcttcagcaatgccagcagcgccagcgccccagcctacagcgtgcaggccgtgggcgcccctggcctgcggcacttcctgtacaagcccctggacatcccagaccaccaccggcagctgccccagttcaccagccctgagctggaggccccctacagccgggaggaggagcggcagaggctgagtgacctgtaccaccggctgcacgcccggctgcacagcaccagccggcccctgcggctcatctaccacgtggccgagaaggagaccctgctggcctgggtgaccagcaagtttgagctgtacacctgcctgagccccctggtgaccaaggccggggccatcctggtggtgaccaagctgctgcgctgggtgaagaaggaggaggacaggctcttcatccgctacccacccaagtacagcaccccaccagccaccagcacagaccaggccgcccacaacggcctcttcaccggcctgtag

SEQ ID NO: 160244 - DNA, 438 bp, synthetic construct
  misc_feature 1..438: note = Description of Artificial Sequence: Synthetic coding sequence
  source 1..438: mol_type = other DNA
atggaggtgggcggggacacagctgccccagcccctgggggcgctgaggacctggaggacacccagttccccagcgaggaggcccgggagggcggcggcgtgcatgctgtgcccccagaccctgaagatgagggcctggaggagaccggcagcaaggacaaggaccagccccccagccccagccccccaccccagagcgaggccctgagcagcaccagccggctgtggagccctgctgcccctgagaacagccccacctgcagccctgagagcagcagcggcggccagggcggggaccccagtgatgaggagtggaggagccagagaaatggctgcaggacctgcaccacagcctgcatgctggtgtccacagcccccccagacccctgtgccagcttcaccacctggctgcggcggcggcactactggccaggatag

SEQ ID NO: 160245 - DNA, 1317 bp, synthetic construct
  misc_feature 1..1317: note = Description of Artificial Sequence: Synthetic coding sequence
  source 1..1317: mol_type = other DNA
atggaggtgggcggggacacagctgccccagcccctgggggcgctgaggacctggaggacacccagttccccagcgaggaggcccgggagggcggcggcgtgcatgctgtgcccccagaccctgaagatgagggcctggaggagacagaggaccacaagctggtgttcctgcagcagggccccctgctgctggtggccatgagcaggaccagccagagcgctgcccagctgcggggggagctgctggccgtgcacgcccagatcgtgtccaccctgacccgggcctctgtggcccgcatctttgcccacaagcagaactatgacctgcggcggctgctggccggcagcgagaggaccctggaccggctgctggacagcatggagcaggaccccggggccctgctgctgggcgctgtgcgctgtgtgcccctggcccggcccctgagagatgccctgggcgccctgctgcggcgctgcacagcccctggcctggccctgtctgtgctggccgtgggcggccgcctcatcacagctgcccaggagagaaatgtgctggctgaatgtcggctggaccctgctgacctgcagctgctgctggactgggtgggcgccccagcctttgctgctggggaggcctgggcccctgtgtgcctgccccgcttcaacccagatggcttcttctacgcctacgtggcccggctggatgccatgcctgtgtgcctgctgctgctgggcacccagcgggaggccttccacgccatggccgcctgccggcggctggtggaggatggcatgcacgccctgggcgccatgagggccctgggggaggccgccagcttcagcaatgccagcagcgccagcgccccagcctacagcgtgcaggccgtgggcgcccctggcctgcggcacttcctgtacaagcccctggacatcccagaccaccaccggcagctgccccagttcaccagccctgagctggaggccccctacagccgggaggaggagcggcagaggctgagtgacctgtaccaccggctgcacgcccggctgcacagcaccagccggcccctgcggctcatctaccacgtggccgagaaggagaccctgctggcctgggtgaccagcaagtttgagctgtacacctgcctgagccccctggtgaccaaggccggggccatcctggtggtgaccaagctgctgcgctgggtgaagaaggaggaggacaggctcttcatccgctacccacccaagtacagcaccccaccagccaccagcacagaccaggccgcccacaacggcctcttcaccggcctgtag

SEQ ID NO: 160246 - DNA, 1206 bp, synthetic construct
  misc_feature 1..1206: note = Description of Artificial Sequence: Synthetic coding sequence
  source 1..1206: mol_type = other DNA
atggtgtctggccagctgcgcttcggcgtgaagacagaggaccacaagctggtgttcctgcagcagggccccctgctgctggtggccatgagcaggaccagccagagcgctgcccagctgcggggggagctgctggccgtgcacgcccagatcgtgtccaccctgacccgggcctctgtggcccgcatctttgcccacaagcagaactatgacctgcggcggctgctggccggcagcgagaggaccctggaccggctgctggacagcatggagcaggaccccggggccctgctgctgggcgctgtgcgctgtgtgcccctggcccggcccctgagagatgccctgggcgccctgctgcggcgctgcacagcccctggcctggccctgtctgtgctggccgtgggcggccgcctcatcacagctgcccaggagagaaatgtgctggccgagtgccgcctggaccctgctgacctgcagctgctgctggactgggtgggcgccccagcctttgctgctggggaggcctgggcccctgtgtgcctgccccgcttcaacccagatggcttcttctacgcctacgtggcccggctggatgccatgcctgtgtgcctgctgctgctgggcacccagcgggaggccttccacgccatggccgcctgccggcggctggtggaggatggcatgcacgccctgggcgccatgagggccctgggggaggccgccagcttcagcaatgccagcagcgccagcgccccagcctacagcgtgcaggccgtgggcgcccctggcctgcggcacttcctgtacaagcccctggacatcccagaccaccaccggcagctgccccagttcaccagccctgagctggaggccccctacagccgggaggaggagcggcagaggctgagtgacctgtaccaccggctgcacgcccggctgcacagcaccagccggcccctgcggctcatctaccacgtggccgagaaggagaccctgctggcctgggtgaccagcaagtttgagctgtacacctgcctgagccccctggtgaccaaggccggggccatcctggtggtgaccaagctgctgcgctgggtgaagaaggaggaggacaggctcttcatccgctacccacccaagtacagcaccccaccagccaccagcacagaccaggccgcccacaacggcctcttcaccggcctgtag

SEQ ID NO: 160247 - DNA, 1584 bp, synthetic construct
  misc_feature 1..1584: note = Description of Artificial Sequence: Synthetic coding sequence
  source 1..1584: mol_type = other DNA
atggagaaccaggagaaggccagcattgctggccacatgtttgatgtggtggtgattggaggcggcatcagcggcctgtctgctgccaagctgctgacagaatatggagtgtctgtgctggtgctggaggcccgggacagagtgggcggccgcacctacaccatcagaaatgaacatgtggactatgtggatgtgggcggggcctacgtgggccccacccagaaccgcatcctgcggctgagcaaggagctgggcatcgagacctacaaggtgaatgtgtctgagcggctggtgcagtatgtgaagggcaagacctaccccttccggggggccttcccccctgtgtggaaccccatcgcctacctggactacaacaacctgtggaggaccatcgacaacatgggcaaggagatccccacagatgccccctgggaggcccagcacgccgacaagtgggacaagatgaccatgaaggagctgattgacaagatctgctggaccaagacagccaggagatttgcctacctgtttgtgaacatcaacgtgaccagcgagccccatgaggtgtctgccctgtggttcctgtggtacgtgaagcagtgtggcggcaccacccgcatcttctctgtgaccaacggcggccaggagaggaagtttgtgggcggcagcggccaggtgtctgagcgcatcatggacctgctgggggaccaggtgaagctgaaccaccctgtgacccacgtggaccagagcagtgacaacatcatcatcgagaccctgaaccacgagcactatgagtgcaagtatgtgatcaatgccatcccccccaccctgacagccaagatccacttccggcctgagctgcctgctgagaggaaccagctgatccagaggctgcccatgggcgccgtcatcaagtgcatgatgtactacaaggaggccttctggaagaagaaggactactgcggctgcatgatcattgaagatgaagatgcccccatcagcatcaccctggatgacaccaagccagatggcagcctgcctgccatcatgggcttcatcctggccaggaaggctgaccggctggccaagctgcacaaggagatcaggaagaagaagatctgtgagctgtatgccaaggtgctgggcagccaggaggccctgcaccctgtgcactatgaggagaagaactggtgtgaggagcagtacagcggcggctgctacacagcctacttccccccaggcatcatgacccagtatggccgggtcatccggcagcctgtgggccgcatcttctttgctggaacagaaacagccaccaagtggagcggctacatggagggcgctgtggaggccggggagagagctgcccgggaggtgctgaatggcctgggcaaggtgacagagaaggacatctgggtgcaggagcctgagagcaaggatgtgcctgctgtggagatcacccacaccttctgggagaggaacctgcccagcgtgtctggcctgctgaagatcatcggcttcagcacctctgtgacagccctgggctttgtgctgtacaagtacaagctgctgcccaggagctag

SEQ ID NO: 160248 - DNA, 1185 bp, synthetic construct
  misc_feature 1..1185: note = Description of Artificial Sequence: Synthetic coding sequence
  source 1..1185: mol_type = other DNA
atgggcaaggagatccccacagatgccccctgggaggcccagcacgccgacaagtgggacaagatgaccatgaaggagctgattgacaagatctgctggaccaagacagccaggagatttgcctacctgtttgtgaacatcaacgtgaccagcgagccccatgaggtgtctgccctgtggttcctgtggtacgtgaagcagtgtggcggcaccacccgcatcttctctgtgaccaatggaggccaggagaggaagtttgtgggcggcagcggccaggtgtctgagcgcatcatggacctgctgggggaccaggtgaagctgaaccaccctgtgacccacgtggaccagagcagtgacaacatcatcatcgagaccctgaaccacgagcactatgagtgcaagtatgtgatcaatgccatcccccccaccctgacagccaagatccacttccggcctgagctgcctgctgagaggaaccagctgatccagaggctgcccatgggcgctgtgatcaagtgcatgatgtactacaaggaggccttctggaagaagaaggactactgcggctgcatgatcattgaagatgaagatgcccccatcagcatcaccctggatgacaccaagccagatggcagcctgcctgccatcatgggcttcatcctggccaggaaggctgaccggctggccaagctgcacaaggagatcaggaagaagaagatctgtgagctgtatgccaaggtgctgggcagccaggaggccctgcaccctgtgcactatgaggagaagaactggtgtgaggagcagtacagcggcggctgctacacagcctacttccccccaggcatcatgacccagtatggccgggtcatccggcagcctgtgggccgcatcttctttgctggaacagaaacagccaccaagtggagcggctacatggagggcgctgtggaggccggggagcgggccgcccgggaggtgctgaatggcctgggcaaggtgacagagaaggacatctgggtgcaggagcctgagagcaaggatgtgcctgctgtggagatcacccacaccttctgggagaggaacctgcccagcgtgtctggcctgctgaagatcatcggcttcagcacctctgtgacagccctgggctttgtgctgtacaagtacaagctgctgcccaggagctag

SEQ ID NO: 160249 - DNA, 1563 bp, synthetic construct
  misc_feature 1..1563: note = Description of Artificial Sequence: Synthetic coding sequence
  source 1..1563: mol_type = other DNA
atgagcaacaagtgtgatgtggtggtggtgggcggcggcatcagcggcatggctgctgccaagctgctgcatgacagcggcctgaatgtggtggtgctggaggcccgggacagagtgggcggccgcacctacaccctgaggaaccagaaggtgaagtatgtggacctgggcggcagctatgtgggccccacccagaaccgcatcctgcggctggccaaggagctgggcctggagacctacaaggtgaatgaggtggagcggctcatccaccacgtgaagggcaagagctaccccttccggggccccttcccccctgtgtggaaccccatcacctacctggaccacaacaacttctggaggaccatggatgacatgggccgggagatccccagtgatgccccctggaaggcccccctggccgaggagtgggacaacatgaccatgaaggagctgctggacaagctgtgctggacagagagcgccaagcagctggccaccctgtttgtgaacctgtgtgtgacagctgagacccatgaggtgtctgccctgtggttcctgtggtacgtgaagcagtgtggcggcaccacccgcatcatcagcaccaccaatggaggccaggagaggaagtttgtgggcggcagcggccaggtgtctgagcgcatcatggacctgctgggggacagagtgaagctggagaggcctgtgatctacatcgaccagaccagagaaaatgtgctggtggagaccctgaaccacgagatgtatgaggccaagtatgtgatcagcgccatcccccccaccctgggcatgaagatccacttcaacccccccctgcccatgatgaggaaccagatgatcaccagggtgcccctgggcagcgtcatcaagtgcatcgtgtactacaaggagcccttctggaggaagaaggactactgcggcaccatgatcattgatggagaggaggcccctgtggcctacaccctggatgacaccaagccagagggcaactatgctgccatcatgggcttcatcctggcccacaaggccaggaagctggcccggctgaccaaggaggagcggctgaagaagctgtgtgagctgtatgccaaggtgctgggcagcctggaggccctggagcctgtgcactatgaggagaagaactggtgtgaggagcagtacagcggcggctgctacaccacctacttccccccaggcatcctgacccagtatggccgggtgctgcggcagcctgtggaccgcatctactttgctggaacagaaacagccacccactggagcggctacatggagggcgctgtggaggccggggagcgggccgcccgggagatcctgcacgccatgggcaagatcccagaagatgagatctggcagagcgagcctgagagcgtggatgtgcctgcccagcccatcaccaccaccttcctggagcggcacctgcccagcgtgcccggcctgctgcggctcatcggcctgaccaccatcttcagcgccacagccctgggcttcctggcccacaagaggggcctgctggtgcgggtgtag

SEQ ID NO: 160250 - DNA, 1515 bp, synthetic construct
  misc_feature 1..1515: note = Description of Artificial Sequence: Synthetic coding sequence
  source 1..1515: mol_type = other DNA
atggctgctgccaagctgctgcatgacagcggcctgaatgtggtggtgctggaggcccgggacagagtgggcggccgcacctacaccctgaggaaccagaaggtgaagtatgtggacctgggcggcagctatgtgggccccacccagaaccgcatcctgcggctggccaaggagctgggcctggagacctacaaggtgaatgaggtggagcggctcatccaccacgtgaagggcaagagctaccccttccggggccccttcccccctgtgtggaaccccatcacctacctggaccacaacaacttctggaggaccatggatgacatgggccgggagatccccagtgatgccccctggaaggcccccctggccgaggagtgggacaacatgaccatgaaggagctgctggacaagctgtgctggacagagagcgccaagcagctggccaccctgtttgtgaacctgtgtgtgacagctgagacccatgaggtgtctgccctgtggttcctgtggtacgtgaagcagtgtggcggcaccacccgcatcatcagcaccaccaatggaggccaggagaggaagtttgtgggcggcagcggccaggtgtctgagcgcatcatggacctgctgggggacagagtgaagctggagaggcctgtgatctacatcgaccagaccagagaaaatgtgctggtggagaccctgaaccacgagatgtatgaggccaagtatgtgatcagcgccatcccccccaccctgggcatgaagatccacttcaacccccccctgcccatgatgaggaaccagatgatcaccagggtgcccctgggcagcgtcatcaagtgcatcgtgtactacaaggagcccttctggaggaagaaggactactgcggcaccatgatcattgatggagaggaggcccctgtggcctacaccctggatgacaccaagccagagggcaactatgctgccatcatgggcttcatcctggcccacaaggccaggaagctggcccggctgaccaaggaggagcggctgaagaagctgtgtgagctgtatgccaaggtgctgggcagcctggaggccctggagcctgtgcactatgaggagaagaactggtgtgaggagcagtacagcggcggctgctacaccacctacttccccccaggcatcctgacccagtatggccgggtgctgcggcagcctgtggaccgcatctactttgctggaacagaaacagccacccactggagcggctacatggagggcgctgtggaggccggggagcgggccgcccgggagatcctgcacgccatgggcaagatcccagaagatgagatctggcagagcgagcctgagagcgtggatgtgcctgcccagcccatcaccaccaccttcctggagcggcacctgcccagcgtgcccggcctgctgcggctcatcggcctgaccaccatcttcagcgccacagccctgggcttcctggcccacaagaggggcctgctggtgcgggtgtag

SEQ ID NO: 160251 - DNA, 1236 bp, synthetic construct
  misc_feature 1..1236: note = Description of Artificial Sequence: Synthetic coding sequence
  source 1..1236: mol_type = other DNA
atggctgctgccaagctgctgcatgacagcggcctgaatgtggtggtgctggaggcccgggacagagtgggcggccgcacctacaccctgaggaaccagaaggtgaagtatgtggacctgggcggcagctatgtgggccccacccagaaccgcatcctgcggctggccaaggagctgggcctggagacctacaaggtgaatgaggtggagcggctcatccaccacgtgaagggcaagagctaccccttccggggccccttcccccctgtgtggaaccccatcacctacctggaccacaacaacttctggaggaccatggatgacatgggccgggagatccccagtgatgccccctggaaggcccccctggccgaggagtgggacaacatgaccatgaaggagctgctggacaagctgtgctggacagagagcgccaagcagctggccaccctgtttgtgaacctgtgtgtgacagctgagacccatgaggtgtctgccctgtggttcctgtggtacgtgaagcagtgtggcggcaccacccgcatcatcagcaccaccaatggaggccaggagaggaagtttgtgggcggcagcggccaggtgtctgagcgcatcatggacctgctgggggacagagtgaagctggagaggcctgtgatctacatcgaccagaccagagaaaatgtgctggtggagaccctgaaccacgagatgtatgaggccaagtatgtgatcagcgccatcccccccaccctgggcatgaagatccacttcaacccccccctgcccatgatgaggaaccagatgatcaccagggtgcccctgggcagcgtcatcaagtgcatcgtgtactacaaggagcccttctggaggaagaaggactactgcggcaccatgatcattgatggagaggaggcccctgtggcctacaccctggatgacaccaagccagagggcaactatgctgccatcatgggcttcatcctggcccacaaggccaggaagctggcccggctgaccaaggaggagcggctgaagaagctgtgtgagctgtatgccaaggtgctgggcagcctggaggccctggagggcagcaccccagccagcggccaggacctgctgtgccgccaccgggactgccacaccctggagcggctgcatggaggcggctgccggggccgcggggagagcagcccccgggaccctgcctgccacggggaggacagccggggctag

SEQ ID NO: 160252 - DNA, 741 bp, synthetic construct
  misc_feature 1..741: note = Description of Artificial Sequence: Synthetic coding sequence
  source 1..741: mol_type = other DNA
atgtttgccccccggctgctggacttccagaagaccaagtatgcccgcttcatgaaccaccgggtgcctgcccacaagcgctaccagcccacagaatatgaacatgctgccaactgtgccacccacgccttctggatcatccccagcatcctgggcagcagcaacctgtacttcctgagtgatgatgactgggagaccatcagcgcctggatctacggcctgggcctgtgtggcctgtttgtggtgtccaccgtcttccacaccatctcctggaagaagagccacctgaggatggtggagcactgcctgcacatgtttgacaggatggtgatctacttcttcatcgccgccagctatgccccctggctgaacctgcgggagctgggcccctgggccagccacatgcgctggctggtgtggatcatggcctctgtgggcaccatctacgtgttcttcttccacgagcgctacaagctggtggagctgctgtgctacgtggtgatgggcttcttccctgccctggtgatcctgtccatgcccaacacagagggcatctgggagctggtgactggaggagtcttctactgcctgggcatggtgttcttcaagagtgatggccgcatcccctttgcccacgccatctggcacctgtttgtggcctttggagctggcacccactactatgccatctggagatacctgtacctgcccagcaccctgcagaccaaggtgtccaagtag

SEQ ID NO: 160253 - DNA, 813 bp, synthetic construct
  misc_feature 1..813: note = Description of Artificial Sequence: Synthetic coding sequence
  source 1..813: mol_type = other DNA
atgtttgccccccggctgctggacttccagaagaccaagtatgcccgcttcatgaaccaccgggtgcctgcccacaagcgctaccagcccacagaatatgaacatgctgccaactgtgccacccacgccttctggatcatccccagcatcctgggcagcagcaacctgtacttcctgagtgatgatgactgggagaccatcagcgcctggatctacggcctgggcctgtgtggcctgtttgtggtgtccaccgtcttccacaccatctcctggaagaagagccacctgaggatggtggagcactgcctgcacatgtttgacaggatggtgatctacttcttcatcgccgccagctatgccccctggctgaacctgcgggagctgggcccctgggccagccacatgcgctggctggtgtggatcatggcctctgtgggcaccatctacgtgttcttcttccacgagaggacaggcagctgtgtgcagttcctgcggggggaggcctgccccaaggccggcacagcctgcctgcctgcccgctacaagctggtggagctgctgtgctacgtggtgatgggcttcttccctgccctggtgatcctgtccatgcccaacacagagggcatctgggagctggtgactggaggagtcttctactgcctgggcatggtgttcttcaagagtgatggccgcatcccctttgcccacgccatctggcacctgtttgtggcctttggagctggcacccactactatgccatctggagatacctgtacctgcccagcaccctgcagaccaaggtgtccaagtag

SEQ ID NO: 160254 - DNA, 582 bp, synthetic construct
  misc_feature 1..582: note = Description of Artificial Sequence: Synthetic coding sequence
  source 1..582: mol_type = other DNA
atgtttgccccccggctgctggacttccagaagaccaagtatgcccgcttcatgaaccaccgggtgcctgcccacaagcgctaccagcccacagaatatgaacatgctgccaactgtgccacccacgccttctggatcatccccagcatcctgggcagcagcaacctgtacttcctgagtgatgatgactgggagaccatcagcgcctggatctacggcctgggcctgtgtggcctgtttgtggtgtccaccgtcttccacaccatctcctggaagaagagccacctgaggatggtggagcactgcctgcacatgtttgacaggatggtgatctacttcttcatcgccgccagctatgccccctggctgaacctgcgggagctgggcccctgggccagccacatgcgctggctggtgtggatcatggcctctgtgggcaccatctacgtgttcttcttccacgagcgctacaagctggtggagctgctgtgctacgtggtgatgggcttcttccctgccctggtgatcctgtccatggccggcaagctgcggcccggcatgacctgcctgaagaggcagtag

SEQ ID NO: 160255 - DNA, 942 bp, synthetic construct
  misc_feature 1..942: note = Description of Artificial Sequence: Synthetic coding sequence
  source 1..942: mol_type = other DNA
atggagactggacctgaggaccccagctccatgcctgaggagagcagccccaggaggaccccccagagcatcccctaccaggacctgccccacctggtgaatgctgatggccagtacctgttctgccgctactggaagcccaccggcacccccaaggccctgatctttgtgtcccatggagctggggagcacagcggccgctatgaggagctggccaggatgctgatgggcctggacctgctggtgtttgcccatgaccacgtgggccacggccagagcgagggggagaggatggtggtgtctgacttccacgtgtttgtgagagatgtgctgcagcacgtggacagcatgcagaaggactacccaggcctgcctgtgttcctgctgggccacagcatgggcggggccatcgccatcctgacagctgctgagcggcccggccactttgctggcatggtgctgatcagccccctggtgctggccaaccctgagagcgccaccaccttcaaggtgctggccgccaaggtgctgaacctggtgctgcccaacctgagcctgggccccatcgacagctctgtgctgagcaggaacaagacagaggtggacatctacaacagcgaccccctcatctgcagagctggcctgaaggtgtgcttcggcatccagctgctgaatgctgtgtcccgggtggagcgggccctgcccaagctgactgtgcccttcctgctgctgcagggcagcgctgaccggctgtgtgacagcaaaggagcctacctgctgatggagctggccaagagccaggacaagaccctgaagatctatgagggcgcctaccacgtgctgcacaaggagctgcctgaggtgaccaacagcgtcttccacgagatcaacatgtgggtgtcccagaggacagccacagctggaacagccagccccccatag

SEQ ID NO: 160256 - DNA, 912 bp, synthetic construct
  misc_feature 1..912: note = Description of Artificial Sequence: Synthetic coding sequence
  source 1..912: mol_type = other DNA
atgcctgaggagagcagccccaggaggaccccccagagcatcccctaccaggacctgccccacctggtgaatgctgatggccagtacctgttctgccgctactggaagcccaccggcacccccaaggccctgatctttgtgtcccatggagctggggagcacagcggccgctatgaggagctggccaggatgctgatgggcctggacctgctggtgtttgcccatgaccacgtgggccacggccagagcgagggggagaggatggtggtgtctgacttccacgtgtttgtgagagatgtgctgcagcacgtggacagcatgcagaaggactacccaggcctgcctgtgttcctgctgggccacagcatgggcggggccatcgccatcctgacagctgctgagcggcccggccactttgctggcatggtgctgatcagccccctggtgctggccaaccctgagagcgccaccaccttcaaggtgctggccgccaaggtgctgaacctggtgctgcccaacctgagcctgggccccatcgacagctctgtgctgagcaggaacaagacagaggtggacatctacaacagcgaccccctcatctgcagagctggcctgaaggtgtgcttcggcatccagctgctgaatgctgtgtcccgggtggagcgggccctgcccaagctgactgtgcccttcctgctgctgcagggcagcgctgaccggctgtgtgacagcaaaggagcctacctgctgatggagctggccaagagccaggacaagaccctgaagatctatgagggcgcctaccacgtgctgcacaaggagctgcctgaggtgaccaacagcgtcttccacgagatcaacatgtgggtgtcccagaggacagccacagctggaacagccagccccccatag

SEQ ID NO: 160257 - DNA, 912 bp, synthetic construct; identical to SEQ ID NO: 160256
  misc_feature 1..912: note = Description of Artificial Sequence: Synthetic coding sequence
  source 1..912: mol_type = other DNA

SEQ ID NO: 160258 - DNA, 852 bp, synthetic construct
  misc_feature 1..852: note = Description of Artificial Sequence: Synthetic coding sequence
  source 1..852: mol_type = other DNA
atggagactggacctgaggaccccagctccatgcctgaggagagcagccccaggaggaccccccagagcatcccctaccaggacctgccccacctggtgaatgctgatggccagtacctgttctgccgctactggaagcccaccggcacccccaaggccctgatctttgtgtcccatggagctggggagcacagcggccgctatgaggagctggccaggatgctgatgggcctggacctgctggtgtttgcccatgaccacgtgggccacggccagagcgagggggagaggatggtggtgtctgacttccacgtgtttgtgagagatgtgctgcagcacgtggacagcatgcagaaggactacccaggcctgcctgtgttcctgctgggccacagcatgggcggggccatcgccatcctgacagctgctgagcggcccggccactttgctggcatggtgctgatcagccccctggtgctggccaaccctgagagcgccaccaccttcaaggtggacatctacaacagcgaccccctcatctgcagagctggcctgaaggtgtgcttcggcatccagctgctgaatgctgtgtcccgggtggagcgggccctgcccaagctgactgtgcccttcctgctgctgcagggcagcgctgaccggctgtgtgacagcaaaggagcctacctgctgatggagctggccaagagccaggacaagaccctgaagatctatgagggcgcctaccacgtgctgcacaaggagctgcctgaggtgaccaacagcgtcttccacgagatcaacatgtgggtgtcccagaggacagccacagctggaacagccagccccccatag

SEQ ID NO: 160259 - DNA, 234 bp, synthetic construct
  misc_feature 1..234: note = Description of Artificial Sequence: Synthetic coding sequence
  source 1..234: mol_type = other DNA
atgcctgaggagagcagccccaggaggaccccccagagcatcccctaccaggacctgccccacctggtgaatgctgatggccagtacctgttctgccgctactggaagcccaccggcacccccaaggccctgatctttgtgtcccatggagctggggagcacagcggccgctatgaggagctggccaggatgctgatgggcctggacctgctggtgtttgcccatgaccactag

SEQ ID NO: 160260 - DNA, 942 bp, synthetic construct
  misc_feature 1..942: note = Description of Artificial Sequence: Synthetic coding sequence
  source 1..942: mol_type = other DNA
atgaagaccaggcctgaggaccccagctccatgcctgaggagagcagccccaggaggaccccccagagcatcccctaccaggacctgccccacctggtgaatgctgatggccagtacctgttctgccgctactggaagcccaccggcacccccaaggccctgatctttgtgtcccatggagctggggagcacagcggccgctatgaggagctggccaggatgctgatgggcctggacctgctggtgtttgcccatgaccacgtgggccacggccagagcgagggggagaggatggtggtgtctgacttccacgtgtttgtgagagatgtgctgcagcacgtggacagcatgcagaaggactacccaggcctgcctgtgttcctgctgggccacagcatgggcggggccatcgccatcctgacagctgctgagcggcccggccactttgctggcatggtgctgatcagccccctggtgctggccaaccctgagagcgccaccaccttcaaggtgctggccgccaaggtgctgaacctggtgctgcccaacctgagcctgggccccatcgacagctctgtgctgagcaggaacaagacagaggtggacatctacaacagcgaccccctcatctgcagagctggcctgaaggtgtgcttcggcatccagctgctgaatgctgtgtcccgggtggagcgggccctgcccaagctgactgtgcccttcctgctgctgcagggcagcgctgaccggctgtgtgacagcaaaggagcctacctgctgatggagctggccaagagccaggacaagaccctgaagatctatgagggcgcctaccacgtgctgcacaaggagctgcctgaggtgaccaacagcgtcttccacgagatcaacatgtgggtgtcccagaggacagccacagctggaacagccagccccccatag

SEQ ID NO: 160261 - DNA, 1842 bp, synthetic construct
  misc_feature 1..1842: note = Description of Artificial Sequence: Synthetic coding sequence
  source 1..1842: mol_type = other DNA
atgtgctgctggcccctgctgctgctgtggggcctgctgcccggcacagctgctgggggcagcggccgcacctacccccacaggaccctgctggacagcgagggcaagtactggctgggctggagccagaggggcagccagatcgccttccggctgcaggtgaggacagctggctacgtgggcttcggcttcagccccactggagccatggccagcgctgacatcgtggtgggcggcgtggcccacggccggccctacctgcaggactacttcaccaatgccaaccgggagctgaagaaggatgcccagcaggactaccacctggagtatgccatggagaacagcacccacaccatcatcgagttcacccgggagctgcacacctgtgacatcaatgacaagagcatcacagacagcacagtgcgggtcatctgggcctaccaccatgaagatgctggggaggccggccccaagtaccatgacagcaacagaggcaccaagagcctgcggctgctgaaccctgagaagacctctgtgctgagcacagccctgccctactttgacctggtgaaccaggatgtgcccatccccaacaaggacaccacctactggtgccagatgttcaagatccctgtgttccaggagaagcaccacgtgatcaaggtggagcccgtcatccagaggggccacgagagcctggtgcaccacatcctgctgtaccagtgcagcaacaacttcaatgattctgtgctggagagcggccacgagtgctaccaccccaacatgccagatgccttcctgacctgtgaaacagtcatctttgcctgggccatcggcggggagggcttctcctacccaccccacgtgggcctgagcctgggcacccccctggacccccactacgtgctgctggaggtgcactatgacaaccccacctatgaggagggcctgattgacaacagcggcctgcggctcttctacaccatggacatcagaaaatatgatgctggggtgattgaagctggcctgtgggtgtccctcttccacaccatccccccaggcatgcctgagttccagagcgagggccactgcaccctggagtgcctggaggaggccctggaggccgagaagcccagcggcatccacgtgtttgctgtgctgctgcacgcccacctggccggccggggcatccggctgcggcacttcaggaagggcaaggagatgaagctgctggcctatgatgatgactttgacttcaacttccaggagttccagtacctgaaggaggagcagaccatcctgcccggggacaacctgatcacagagtgccgctacaacaccaaggacagagctgagatgacctggggcggcctgagcaccaggtctgagatgtgcctgagctacctgctgtactacccccgcatcaacctgacccgctgtgccagcatcccagacatcatggagcagctgcagttcatcggcgtgaaggagatctacagacctgtgaccacctggcccttcatcatcaagagccccaagcagtacaagaacctgtccttcatggatgccatgaacaagttcaagtggaccaagaaggagggcctgtccttcaacaagctggtgctgagcctgcctgtgaatgtgcgctgcagcaagacagacaatgctgagtggagcatccagggcatgacagccctgcccccagacatcgagcggccctacaaggccgagcccctggtgtgtggcaccagcagcagcagcagcctgcaccgggacttcagcatcaacctgctggtgtgcctgctgctgctgagctgcaccctgagcaccaagagcctgtag

SEQ ID NO: 160262 - DNA, 1023 bp, synthetic construct; identical to SEQ ID NO: 154687
  misc_feature 1..1023: note = Description of Artificial Sequence: Synthetic coding sequence
  source 1..1023: mol_type = other DNA

SEQ ID NO: 160263 - DNA, 1089 bp, synthetic construct
  misc_feature 1..1089: note = Description of Artificial Sequence: Synthetic coding sequence
  source 1..1089: mol_type = other DNA
atggcccccaagcaggaccccaagcccaagttccaggagggggagcgggtgctgtgcttccacggccccctgctgtatgaggccaagtgtgtgaaggtggccatcaaggacaagcaggtgaagtacttcatccactacagcggctggaacaagaagtctgctgtgcggccccggcgctctgagaagagcctgaagacccatgaggacatcgtggccctcttccctgtgcctgagggcgcccccagcgtgcaccaccccctgctgaccagctcctgggatgagtgggtgcctgagagccgggtgctgaagtatgtggacaccaacctgcagaagcagcgggagctgcagaaggccaaccaggagcagtatgcagagggcaagatgagaggagctgcccctgggaagaagaccagcggcctgcagcagaagaatgtggaggtgaagaccaagaagaacaagcagaagaccccaggaaatggagatggcggcagcaccagcgagaccccccagccccccaggaagaagagggcccgggtggaccccaccgtggagaatgaggagaccttcatgaacagagtggaggtgaaggtgaagatccctgaggagctgaagccctggctggtggatgactgggacctgatcacccggcagaagcagctgttctacctgcctgccaagaagaatgtggacagcatcctggaggactatgccaactacaagaagagccggggcaacacagacaacaaggagtatgctgtgaatgaggtggtggccggcatcaaggagtacttcaacgtgatgctgggcacccagctgctgtacaagtttgagcggccccagtatgcagagatcctggccgaccacccagatgcccccatgagccaggtgtatggagccccccacctgctgcggctgtttgtgagaattggagccatgctggcctacacccccctggatgagaagagcctggccctgctgctgaactacctgcatgacttcctgaagtacctggccaagaacagcgccaccctcttcagcgccagtgactatgaggtggcccctcctgagtaccacaggaaggctgtgtag

SEQ ID NO: 160264 - DNA, 1047 bp, synthetic construct
  misc_feature 1..1047: note = Description of Artificial Sequence: Synthetic coding sequence
  source 1..1047: mol_type = other DNA
atgatccccttcccccacccccaggtgacagatgccctgggccgctacagcaactacatcctgagcagcacagtggagagccccagcctgcgctccatgaactttgagaagcagggcgagcgggtgctgtgcttccacggccccctgctgtatgaggccaagtgtgtgaaggtggccatcaaggacaagcaggtgaagtacttcatccactacagcggctggaacaagaactgggatgagtgggtgcctgagagccgggtgctgaagtatgtggacaccaacctgcagaagcagcgggagctgcagaaggccaaccaggagcagtatgcagagggcaagatgagaggagctgcccctgggaagaagaccagcggcctgcagcagaagaatgtggaggtgaagaccaagaagaacaagcagaagaccccaggaaatggagatggcggcagcaccagcgagaccccccagccccccaggaagaagagggcccgggtggaccccaccgtggagaatgaggagaccttcatgaacagagtggaggtgaaggtgaagatccctgaggagctgaagccctggctggtggatgactgggacctgatcacccggcagaagcagctgttctacctgcctgccaagaagaatgtggacagcatcctggaggactatgccaactacaagaagagccggggcaacacagacaacaaggagtatgctgtgaatgaggtggtggccggcatcaaggagtacttcaacgtgatgctgggcacccagctgctgtacaagtttgagcggccccagtatgcagagatcctggccgaccacccagatgcccccatgagccaggtgtatggagccccccacctgctgcggctgtttgtgagaattggagccatgctggcctacacccccctggatgagaagagcctggccctgctgctgaactacctgcatgacttcctgaagtacctggccaagaacagcgccaccctcttcagcgccagtgactatgaggtggcccctcctgagtaccacaggaaggctgtgtag

SEQ ID NO: 160265 - DNA, 972 bp, synthetic construct
  misc_feature 1..972: note = Description of Artificial Sequence: Synthetic coding sequence
  source 1..972: mol_type = other DNA
atggcccccaagcaggaccccaagcccaagttccaggagggggagcgggtgctgtgcttccacggccccctgctgtatgaggccaagtgtgtgaaggtggccatcaaggacaagcaggtgaagtacttcatccactacagcggctggaacaagaactgggatgagtgggtgcctgagagccgggtgctgaagtatgtggacaccaacctgcagaagcagcgggagctgcagaaggccaaccaggagcagtatgcagagggcaagatgagaggagctgcccctgggaagaagaccagcggcctgcagcagaagaatgtggaggtgaagaccaagaagaacaagcagaagaccccaggaaatggagatggcggcagcaccagcgagaccccccagccccccaggaagaagagggcccgggtggaccccaccgtggagaatgaggagaccttcatgaacagagtggaggtgaaggtgaagatccctgaggagctgaagccctggctggtggatgactgggacctgatcacccggcagaagcagctgttctacctgcctgccaagaagaatgtggacagcatcctggaggactatgccaactacaagaagagccggggcaacacagacaacaaggagtatgctgtgaatgaggtggtggccggcatcaaggagtacttcaacgtgatgctgggcacccagctgctgtacaagtttgagcggccccagtatgcagagatcctggccgaccacccagatgcccccatgagccaggtgtatggagccccccacctgctgcggctgtttgtgcgcatcggggccatgctggcctacacccccctggatgagaagagcctggccctgctgctgaactacctgcatgacttcctgaagtacctggccaagaacagcgccaccctcttcagcgccagtgactatgaggtggcccctcctgagtaccacaggaaggctgtgtag

SEQ ID NO: 160266 - DNA, 708 bp, synthetic construct
  misc_feature 1..708: note = Description of Artificial Sequence: Synthetic coding sequence
  source 1..708: mol_type = other DNA
atgagaggagctgcccctgggaagaagaccagcggcctgcagcagaagaatgtggaggtgaagaccaagaagaacaagcagaagaccccaggaaatggagatggcggcagcaccagcgagaccccccagccccccaggaagaagagggcccgggtggaccccaccgtggagaatgaggagaccttcatgaacagagtggaggtgaaggtgaagatccctgaggagctgaagccctggctggtggatgactgggacctgatcacccggcagaagcagctgttctacctgcctgccaagaagaatgtggacagcatcctggaggactatgccaactacaagaagagccggggcaacacagacaacaaggagtatgctgtgaatgaggtggtggccggcatcaaggagtacttcaacgtgatgctgggcacccagctgctgtacaagtttgagcggccccagtatgcagagatcctggccgaccacccagatgcccccatgagccaggtgtatggagccccccacctgctgcggctgtttgtgcgcatcggggccatgctggcctacacccccctggatgagaagagcctggccctgctgctgaactacctgcatgacttcctgaagtacctggccaagaacagcgccaccctcttcagcgccagtgactatgaggtggcccctcctgagtaccacaggaaggctgtgtag

SEQ ID NO: 160267 - DNA, 708 bp, synthetic construct; identical to SEQ ID NO: 160266
  misc_feature 1..708: note = Description of Artificial Sequence: Synthetic coding sequence
  source 1..708: mol_type = other DNA

SEQ ID NO: 160268 - DNA, 345 bp, synthetic construct
  misc_feature 1..345: note = Description of Artificial Sequence: Synthetic coding sequence
  source 1..345: mol_type = other DNA
atggtgtccaggaaggctgtggccgccctgctggtggtgcacgtggccgccatgctggccagccagacagaggcctttgtgcccatcttcacctacggggagctgcagaggatgcaggagaaggagagaaataaaggccagaagaagagcctgtctgtgtggcagaggtctggagaggagggccctgtggaccctgctgagcccatccgggaggaggagaatgagatgatcaagctgacagcccccctggagatcggcatgaggatgaacagccggcagctggagaagtacccagccaccctggagggcctgctgtctgagatgctgccccagcacgccaagtag

SEQ ID NO: 160269 - DNA, 348 bp, synthetic construct
  misc_feature 1..348: note = Description of Artificial Sequence: Synthetic coding sequence
  source 1..348: mol_type = other DNA
atggtgtccaggaaggctgtggccgccctgctggtggtgcacgtggccgccatgctggccagccagacagaggcctttgtgcccatcttcacctacggggagctgcagaggatgcaggagaaggagagaaataaaggccagaagaagagcctgtctgtgtggcagaggtctggagaggagggccctgtggaccctgctgagcccatccgggaggaggagaatgagatgatcaagctgacagcccccctggagatcggcatgaggatgaacagccggcagctggagaagtacccagccaccctggagggcctgctgtctgagatgctgccccagcacgccgccaagtag

SEQ ID NO: 160270 - DNA, 327 bp, synthetic construct
  misc_feature 1..327: note = Description of Artificial Sequence: Synthetic coding sequence
  source 1..327: mol_type = other DNA
atggtgtccaggaaggctgtggccgccctgctggtggtgcacgtggccgccatgctggccagccagacagaggcctttgtgcccatcttcacctacggggagctgcagaggatgcaggagaaggagagaaataaaggccagaagaagagcctgtctgtgtggcagaggtctggagaggagggccctgtggaccctgctgagcccatccgggaggaggagaatgagatgatcaagctgacagcccccctggagatcggcatgaggatgaacagccggcagctggagaagtacccagccaccctggagggcctgctgacagccaagtag

SEQ ID NO: 160271 - DNA, 1011 bp, synthetic construct
  misc_feature 1..1011: note = Description of Artificial Sequence: Synthetic coding sequence
  source 1..1011: mol_type = other DNA
atggcccggcggcgcagccagagggtgtgtgccagcggccccagcatgctgaacagcgcccggggggcccctgagctgctgcggggcacagccaccaatgctgaggtgtctgctgctgctgctggggccaccggcagcgaggagctgcccccaggggaccggggctgcagaaatggaggcggccggggccctgctgccaccaccagcagcactggagtggccgtgggcgctgagcacggggaggacagcctgagcaggaagccagaccctgagcccggccgcatggaccaccaccagcccggcaccggccgctaccaggtgctgctgaatgaggaggacaacagcgagagcagcgccatcgagcagccccccaccagcaacccagccccccagatcgtgcaggccgccagcagcgccccagccctggagacagacagcagccccccaccctacagcagcatcaccgtggaggtgcccaccaccagtgacacagaggtgtatggagagttctaccctgtgcccccaccctacagcgtggccaccagcctgcccacctatgatgaagctgagaaggccaaggctgctgccatggctgctgctgctgctgagaccagccagaggatccaggaggaggagtgccccccaagagatgacttcagtgatgctgaccagctgcgggtgggcaatgatggcatcttcatgctggccttcttcatggccttcatcttcaactggctgggcttctgcctgtccttctgcatcaccaacaccatcgccggccgctacggggccatctgtggcttcggcctgagcctcatcaagtggatcctgattgtgcgcttcagtgactacttcaccggctacttcaacggccagtactggctgtggtggatcttcctggtgctgggcctgctgctcttcttccggggctttgtgaactacctgaaggtgaggaacatgtctgagagcatggccgccgcccacaggacccgctacttcttcctgctgtag

SEQ ID NO: 160272 - DNA, 1161 bp, synthetic construct
  misc_feature 1..1161: note = Description of Artificial Sequence: Synthetic coding sequence
  source 1..1161: mol_type = other DNA
atgggcagcccctggaatggaagtgatggccctgagggcgcccgggagcccccctggccagccctgcccccctgtgatgagcggcgctgcagccccttccccctgggcgccctggtgcctgtgacagctgtgtgcctgtgcctgtttgtggtgggcgtgtctggaaatgtggtgacagtgatgctgattggccgctacagagacatgaggaccaccaccaacctgtacctgggctccatggctgtgtctgacctgctgatcctgctgggcctgccctttgacctgtaccgcctgtggaggagccggccctgggtgtttggccccctgctgtgccgcctgagcctgtatgtgggggagggctgcacctacgccaccctgctgcacatgacagccctgtctgtggagcgctacctggccatctgccggcccctgcgggcccgggtgctggtgaccaggagaagagtgcgggccctgattgctgtgctgtgggccgtggccctgctgtctgctggccccttcctgttcctggtgggcgtggagcaggaccccggcatctctgtggtgcccggcctgaatggaacagccagaattgccagcagccccctggccagcagcccccccctgtggctgagccgggcccccccacccagcccccccagcggccctgagacagctgaggccgccgccctcttcagccgggagtgccggcccagccctgcccagctgggcgccctgcgggtgatgctgtgggtgaccacagcctacttcttcctgcccttcctgtgcctgagcatcctgtatggcctcatcggccgggagctgtggagcagccggcggcccctgcggggccctgctgccagcggccgggagcggggccaccggcagacagtgcgggtgctgaggaagtggagcagaagaggcagcaaggatgcctgcctgcagagcgcccctcctggaacagcccagaccctgggccccctgcccctgctggcccagctgtgggcccccctgcctgcccccttccccatcagcatcccagccagcacccggcggggcggcggcagcggcatctacaacctgctggtggccctgccccgctggcagaaccacctgcacaagcacggccgctttgctgatgatgtgctgctgtctgtgctgtag

SEQ ID NO: 160273 - DNA, 1206 bp, synthetic construct
  misc_feature 1..1206: note = Description of Artificial Sequence: Synthetic coding sequence
  source 1..1206: mol_type = other DNA
atggagaagagcaagaacttcagaattgatgccctgctggccgtggaccccccccgggccgccagcgcccagagcgcccccctggccctggtgaccagcctggccgctgctgccagcggcactggaggcggcggcggcggcggcggggccagcggcggcaccagcggcagctgcagccctgccagcagcgagcccccagctgccccagctgaccggctgcgggcagagagccccagccccccccggctgctggccgcccactgtgccctgctgcccaagccaggcttcctgggcgccggcggcggcggcggcggcaccggcggcggccacggcggcccccaccaccacgcccaccctggagctgctgctgctgctgctgctgctgctgctgctgctgctgctgggggcctggccctgggcctgcaccctggaggagcccagggcggggccggcctgcctgcccaggccgccctgtatggccaccctgtgtatggctacagcgctgctgctgctgctgctgccctggccggccagcacccagccctgagctacagctacccccaggtgcagggcgcccacccagcccaccctgctgaccccatcaagctgggcgccggcaccttccagctggaccagtggctgcgggccagcacagctggcatgatcctgcccaagatgccagacttcaacagccaggcccagagcaacctgctgggcaagtgccggcggcccaggacagccttcaccagccagcagctgctggagctggagcaccagttcaagctgaacaagtacctgagccggcccaagagatttgaggtggccaccagcctgatgctgacagagacccaggtgaagatctggttccagaacagaaggatgaagtggaagaggagcaagaaggccaaggagcaggccgcccaggaggccgagaagcagaagggcggcggcggcggggccggcaagggcggcgctgaggagcccggggctgaggagctgctgggccccccagcccctggggacaagggcagcggccggcggctgcgggacctgcgggacagcgaccctgaggaggatgaagatgaagatgatgaggaccacttcccctacagcaatggagcctctgtgcacgccgccagcagtgactgcagcagtgaagatgacagccccccaccccggcccagccaccagcctgccccccagtag

SEQ ID NO: 160274 - DNA, 696 bp, synthetic construct
  misc_feature 1..696: note = Description of Artificial Sequence: Synthetic coding sequence
  source 1..696: mol_type = other DNA
gctgctgctgccctggccggccagcacccagccctgagctacagctacccccaggtgcagggcgcccacccagcccaccctgctgaccccatcaagctgggcgccggcaccttccagctggaccagtggctgcgggccagcacagctggcatgatcctgcccaagatgccagacttcaacagccaggcccagagcaacctgctgggcaagtgccggcggcccaggacagccttcaccagccagcagctgctggagctggagcaccagttcaagctgaacaagtacctgagccggcccaagagatttgaggtggccaccagcctgatgctgacagagacccaggtgaagatctggttccagaacagaaggatgaagtggaagaggagcaagaaggccaaggagcaggccgcccaggaggccgagaagcagaagggcggcggcggcggggccggcaagggcggcgctgaggagcccggggctgaggagctgctgggccccccagcccctggggacaagggcagcggccggcggctgcgggacctgcgggacagcgaccctgaggaggatgaagatgaagatgatgaggaccacttcccctacagcaatggagcctctgtgcacgccgccagcagtgactgcagcagtgaagatgacagccccccaccccggcccagccaccagcctgccccccagtag

SEQ ID NO: 160275 - DNA, 570 bp, synthetic construct
  misc_feature 1..570: note = Description of Artificial Sequence: Synthetic coding sequence
  source 1..570: mol_type = other DNA
atgggcggcctgagcacagtgggcgcctgccccggcatcctgggcgcccagcaggcccaggcccagagcaacctgctgggcaagtgccggcggcccaggacagccttcaccagccagcagctgctggagctggagcaccagttcaagctgaacaagtacctgagccggcccaagagatttgaggtggccaccagcctgatgctgacagagacccaggtgaagatctggttccagaacagaaggatgaagtggaagaggagcaagaaggccaaggagcaggccgcccaggaggccgagaagcagaagggcggcggcggcggggccggcaagggcggcgctgaggagcccggggctgaggagctgctgggccccccagcccctggggacaagggcagcggccggcggctgcgggacctgcgggacagcgaccctgaggaggatgaagatgaagatgatgaggaccacttcccctacagcaatggagcctctgtgcacgccgccagcagtgactgcagcagtgaagatgacagccccccaccccggcccagccaccagcctgccccccagtag

SEQ ID NO: 160276 - DNA, 1692 bp, synthetic construct
  misc_feature 1..1692: note = Description of Artificial Sequence: Synthetic coding sequence
  source 1..1692: mol_type = other DNA
atgcccagcaagttcagctgccggcagctgcgggaggccggccagtgctttgagagcttcctggtggtgcggggcctggacatggagacagaccgggagcggctgcggaccatctacaacagagacttcaagatcagctttggcaccccagcccctggcttcagctccatgctgtatggcatgaagatcgccaacctggcctacgtgaccaagaccagggtgcgcttcttccggctggaccgctgggcagatgtgcgcttccctgagaagaggaggatgaagctgggcagtgacatcagcaagcaccacaagagcctgctggccaagatcttctatgacagagctgagtacctgcacggcaagcacggcgtggatgtggaggtgcagggcccccatgaggccagagatggccagctgctgatccggctggacctgaacaggaaggaggtgctgaccctgcggctgagaaatggaggcacccagagcgtgaccctgacccacctgttccccctgtgcaggaccccccagtttgccttctacaatgaagaccaggagctgccctgccccctgggccctggagagtgctatgagctgcacgtgcactgcaagaccagctttgtgggctacttccctgccaccgtgctgtgggagctgctgggccctggagagagcggcagcgagggcgccggcaccttctacatcgcccgcttcctggccgctgtggcccacagccccctggccgcccagctgaagcccatgacccccttcaagaggacccgcatcaccggcaaccctgtggtgaccaacagaattgaggagggggagaggccagaccgggccaagggctatgacctggagctgtccatggccctgggcacctactaccccccaccccggctgcggcagctgctgcccatgctgctgcagggcaccagcatcttcaccgcccccaaggagattgctgagatcaaggcccagctggagacagccctgaagtggaggaactatgaggtgaagctgcggctgctgctgcacctggaggagctgcagatggagcatgacatccgccactatgacctggagagcgtgcccatgacctgggaccctgtggaccagaacccccggctgctgaccctggaggtgcctggggtgacagagagccggcccagcgtgctgcggggggaccacctgtttgccctgctgagcagcgagacccaccaggaggaccccatcacctacaagggctttgtgcacaaggtggagctggacagagtgaagctgtccttctccatgagcctgctgagcagatttgtggatggcctgaccttcaaggtgaacttcaccttcaaccggcagcccctgcgggtgcagcaccgggccctggagctgaccggccgctggctgctgtggcccatgctgtttcctgtggcccccagagatgtgcccctgctgcccagtgatgtgaagctgaagctgtatgacaggagcctggagagcaaccctgagcagctgcaggccatgaggcacatcgtgacaggcaccaccaggcctgccctgacagcctgcctgaccctgaaccagaacccagctgagctgcccctgcagggcaccggccgcctgggggagggcgtgtacaaccccagccacagcacccccagccctgctggagaaaatgacaccagcagctgctag

SEQ ID NO: 160277 - DNA, 3012 bp, synthetic construct
  misc_feature 1..3012: note = Description of Artificial Sequence: Synthetic coding sequence
  source 1..3012: mol_type = other DNA
atgcccagcaagttcagctgccggcagctgcgggaggccggccagtgctttgagagcttcctggtggtgcggggcctggacatggagacagaccgggagcggctgcggaccatctacaacagagacttcaagatcagctttggcaccccagcccctggcttcagctccatgctgtatggcatgaagatcgccaacctggcctacgtgaccaagaccagggtgcgcttcttccggctggaccgctgggcagatgtgcgcttccctgagaagaggaggatgaagctgggcagtgacatcagcaagcaccacaagagcctgctggccaagatcttctatgacagagctgagtacctgcacggcaagcacggcgtggatgtggaggtgcagggcccccatgaggccagagatggccagctgctgatccggctggacctgaacaggaaggaggtgctgaccctgcggctgagaaatggaggcacccagagcgtgaccctgacccacctgttccccctgtgcaggaccccccagtttgccttctacaatgaagaccaggagctgccctgccccctgggccctggagagtgctatgagctgcacgtgcactgcaagaccagctttgtgggctacttccctgccaccgtgctgtgggagctgctgggccctggagagagcggcagcgagggcgccggcaccttctacatcgcccgcttcctggccgctgtggcccacagccccctggccgcccagctgaagcccatgacccccttcaagaggacccgcatcaccggcaaccctgtggtgaccaacagaattgaggagggggagaggccagaccgggccaagggctatgacctggagctgtccatggccctgggcacctactaccccccaccccggctgcggcagctgctgcccatgctgctgcagggcaccagcatcttcaccgcccccaaggagattgctgagatcaaggcccagctggagacagccctgaagtggaggaactatgaggtgaagctgcggctgctgctgcacctggaggagctgcagatggagcatgacatccgccactatgacctggagagcgtgcccatgacctgggaccctgtggaccagaacccccggctgctgaccctggaggtgcctggggtgacagagagccggcccagcgtgctgcggggggaccacctgtttgccctgctgagcagcgagacccaccaggaggaccccatcacctacaagggctttgtgcacaaggtggagctggacagagtgaagctgtccttctccatgagcctgctgagcagatttgtggatggcctgaccttcaaggtgaacttcaccttcaaccggcagcccctgcgggtgcagcaccgggccctggagctgaccggccgctggctgctgtggcccatgctgtttcctgtggcccccagagatgtgcccctgctgcccagtgatgtgaagctgaagctgtatgacaggagcctggagagcaaccctgagcagctgcaggccatgaggcacatcgtgacaggcaccaccaggcctgccccctacatcatctttggacctcctggcaccgggaagacagtgaccctggtggaggccatcaagcaggtggtgaagcacctgcccaaggcccacatcctggcctgtgcccccagcaacagcggggctgacctgctgtgccagaggctgcgggtgcacctgcccagcagcatctaccgcctgctggcccccagccgggacatccgcatggtgcctgaggacatcaagccctgctgcaactgggatgccaagaagggggagtatgtgtttcctgccaagaagaagctgcaggagtacagagtgctgatcaccaccctcatcacagctggccgcctggtgtctgcccagttccccatcgaccacttcacccacatcttcattgatgaagctggccactgcatggagcctgagagcctggtggccatcgccggcctgatggaggtgaaggagaccggggaccccggcggccagctggtgctggccggggacccccggcagctgggccctgtgctgcggagccccctgacccagaagcacggcctgggctacagcctgctggagcggctgctgacctacaacagcctgtacaagaagggcccagatggctatgacccccagttcatcaccaagctgctgaggaactaccgcagccaccccaccatcctggacatccccaaccagctgtactatgaaggagagctgcaggcctgtgctgatgtggtggaccgggagcgcttctgccgctgggccggcctgccccggcagggcttccccatcatcttccatggagtgatgggcaaggatgagcgggagggcaacagccccagcttcttcaaccctgaggaggccgccaccgtgaccagctacctgaagctgctgctggcccccagcagcaagaagggcaaggcccggctgagccccaggtctgtgggcgtcatcagcccctacaggaagcaggtggagaagatccgctactgcatcaccaagctggaccgggagctgcggggcctggatgacatcaaggacctgaaggtgggctctgtggaggagttccagggccaggagaggagcgtcatcctgatcagcacagtgcgcagcagccagagctttgtgcagctggacctggacttcaacctgggcttcctgaagaaccccaagcgcttcaacgtggccgtgacccgggccaaggccctgctgatcatcgtgggcaaccccctgctgctgggccatgaccctgactggaaggtgttcctggagttctgcaaggaaaatggaggctacacaggctgccccttccctgccaagctggacctgcagcagggccagaacctgctgcagggcctgagcaagctgagccccagcaccagcggcccccacagccatgactacctgccccaggagcgggagggggagggcggcctgagcctgcaggtggagcctgagtggagaaatgagctgtag

SEQ ID NO: 160278 - DNA, 2844 bp, synthetic construct
  misc_feature 1..2844: note = Description of Artificial Sequence: Synthetic coding sequence
  source 1..2844: mol_type = other DNA
atgctgtatggcatgaagatcgccaacctggcctacgtgaccaagaccagggtgcgcttcttccggctggaccgctgggcagatgtgcgcttccctgagaagaggaggatgaagctgggcagtgacatcagcaagcaccacaagagcctgctggccaagatcttctatgacagagctgagtacctgcacggcaagcacggcgtggatgtggaggtgcagggcccccatgaggccagagatggccagctgctgatccggctggacctgaacaggaaggaggtgctgaccctgcggctgagaaatggaggcacccagagcgtgaccctgacccacctgttccccctgtgcaggaccccccagtttgccttctacaatgaagaccaggagctgccctgccccctgggccctggagagtgctatgagctgcacgtgcactgcaagaccagctttgtgggctacttccctgccaccgtgctgtgggagctgctgggccctggagagagcggcagcgagggcgccggcaccttctacatcgcccgcttcctggccgctgtggcccacagccccctggccgcccagctgaagcccatgacccccttcaagaggacccgcatcaccggcaaccctgtggtgaccaacagaattgaggagggggagaggccagaccgggccaagggctatgacctggagctgtccatggccctgggcacctactaccccccaccccggctgcggcagctgctgcccatgctgctgcagggcaccagcatcttcaccgcccccaaggagattgctgagatcaaggcccagctggagacagccctgaagtggaggaactatgaggtgaagctgcggctgctgctgcacctggaggagctgcagatggagcatgacatccgccactatgacctggagagcgtgcccatgacctgggaccctgtggaccagaacccccggctgctgaccctggaggtgcctggggtgacagagagccggcccagcgtgctgcggggggaccacctgtttgccctgctgagcagcgagacccaccaggaggaccccatcacctacaagggctttgtgcacaaggtggagctggacagagtgaagctgtccttctccatgagcctgctgagcagatttgtggatggcctgaccttcaaggtgaacttcaccttcaaccggcagcccctgcgggtgcagcaccgggccctggagctgaccggccgctggctgctgtggcccatgctgtttcctgtggcccccagagatgtgcccctgctgcccagtgatgtgaagctgaagctgtatgacaggagcctggagagcaaccctgagcagctgcaggccatgaggcacatcgtgacaggcaccaccaggcctgccccctacatcatctttggacctcctggcaccgggaagacagtgaccctggtggaggccatcaagcaggtggtgaagcacctgcccaaggcccacatcctggcctgtgcccccagcaacagcggggctgacctgctgtgccagaggctgcgggtgcacctgcccagcagcatctaccgcctgctggcccccagccgggacatccgcatggtgcctgaggacatcaagccctgctgcaactgggatgccaagaagggggagtatgtgtttcctgccaagaagaagctgcaggagtacagagtgctgatcaccaccctcatcacagctggccgcctggtgtctgcccagttccccatcgaccacttcacccacatcttcattgatgaagctggccactgcatggagcctgagagcctggtggccatcgccggcctgatggaggtgaaggagaccggggaccccggcggccagctggtgctggccggggacccccggcagctgggccctgtgctgcggagccccctgacccagaagcacggcctgggctacagcctgctggagcggctgctgacctacaacagcctgtacaagaagggcccagatggctatgacccccagttcatcaccaagctgctgaggaactaccgcagccaccccaccatcctggacatccccaaccagctgtactatgaaggagagctgcaggcctgtgctgatgtggtggaccgggagcgcttctgccgctgggccggcctgccccggcagggcttccccatcatcttccatggagtgatgggcaaggatgagcgggagggcaacagccccagcttcttcaaccctgaggaggccgccaccgtgaccagctacctgaagctgctgctggcccccagcagcaagaagggcaaggcccggctgagccccaggtctgtgggcgtcatcagcccctacaggaagcaggtggagaagatccgctactgcatcaccaagctggaccgggagctgcggggcctggatgacatcaaggacctgaaggtgggctctgtggaggagttccagggccaggagaggagcgtcatcctgatcagcacagtgcgcagcagccagagctttgtgcagctggacctggacttcaacctgggcttcctgaagaaccccaagcgcttcaacgtggccgtgacccgggccaaggccctgctgatcatcgtgggcaaccccctgctgctgggccatgaccctgactggaaggtgttcctggagttctgcaaggaaaatggaggctacacaggctgccccttccctgccaagctggacctgcagcagggccagaacctgctgcagggcctgagcaagctgagccccagcaccagcggcccccacagccatgactacctgccccaggagcgggagggggagggcggcctgagcctgcaggtggagcctgagtggagaaatgagctgtag

SEQ ID NO: 160279 - DNA, 3012 bp, synthetic construct; identical to SEQ ID NO: 160277
  misc_feature 1..3012: note = Description of Artificial Sequence: Synthetic coding sequence
  source 1..3012: mol_type = other DNA

SEQ ID NO: 160280 - DNA, 2826 bp, synthetic construct
  misc_feature 1..2826: note = Description of Artificial Sequence: Synthetic coding sequence
  source 1..2826: mol_type = other DNA
atggagacagaccgggagcggctgcggaccatctacaacagagacttcaagatcagctttggcaccccagcccctggcttcagctccatgctgtatggcatgaagatcgccaacctggcctacgtgaccaagaccagggtgcgcttcttccggctggaccgctgggcagatgtgcgcttccctgagaagaggaggatgaagctgggcagtgacatcagcaagcaccacaagagcctgctggccaagatcttctatgacagagctgagtacctgcacggcaagcatggaggcacccagagcgtgaccctgacccacctgttccccctgtgcaggaccccccagtttgccttctacaatgaagaccaggagctgccctgccccctgggccctggagagtgctatgagctgcacgtgcactgcaagaccagctttgtgggctacttccctgccaccgtgctgtgggagctgctgggccctggagagagcggcagcgagggcgccggcaccttctacatcgcccgcttcctggccgctgtggcccacagccccctggccgcccagctgaagcccatgacccccttcaagaggacccgcatcaccggcaaccctgtggtgaccaacagaattgaggagggggagaggccagaccgggccaagggctatgacctggagctgtccatggccctgggcacctactaccccccaccccggctgcggcagctgctgcccatgctgctgcagggcaccagcatcttcaccgcccccaaggagattgctgagatcaaggcccagctggagacagccctgaagtggaggaactatgaggtgaagctgcggctgctgctgcacctggaggagctgcagatggagcatgacatccgccactatgacctggagagcgtgcccatgacctgggaccctgtggaccagaacccccggctgctgaccctggaggtgcctggggtgacagagagccggcccagcgtgctgcggggggaccacctgtttgccctgctgagcagcgagacccaccaggaggaccccatcacctacaagggctttgtgcacaaggtggagctggacagagtgaagctgtccttctccatgagcctgctgagcagatttgtggatggcctgaccttcaaggtgaacttcaccttcaaccggcagcccctgcgggtgcagcaccgggccctggagctgaccggccgctggctgctgtggcccatgctgtttcctgtggcccccagagatgtgcccctgctgcccagtgatgtgaagctgaagctgtatgacaggagcctggagagcaaccctgagcagctgcaggccatgaggcacatcgtgacaggcaccaccaggcctgccccctacatcatctttggacctcctggcaccgggaagacagtgaccctggtggaggccatcaagcaggtggtgaagcacctgcccaaggcccacatcctggcctgtgcccccagcaacagcggggctgacctgctgtgccagaggctgcgggtgcacctgcccagcagcatctaccgcctgctggcccccagccgggacatccgcatggtgcctgaggacatcaagccctgctgcaactgggatgccaagaagggggagtatgtgtttcctgccaagaagaagctgcaggagtacagagtgctgatcaccaccctcatcacagctggccgcctggtgtctgcccagttccccatcgaccacttcacccacatcttcattgatgaagctggccactgcatggagcctgagagcctggtggccatcgccggcctgatggaggtgaaggagaccggggaccccggcggccagctggtgctggccggggacccccggcagctgggccctgtgctgcggagccccctgacccagaagcacggcctgggctacagcctgctggagcggctgctgacctacaacagcctgtacaagaagggcccagatggctatgacccccagttcatcaccaagctgctgaggaactaccgcagccaccccaccatcctggacatccccaaccagctgtactatgaaggagagctgcaggcctgtgctgatgtggtggaccgggagcgcttctgccgctgggccggcctgccccggcagggcttccccatcatcttccatggagtgatgggcaaggatgagcgggagggcaacagccccagcttcttcaaccctgaggaggccgccaccgtgaccagctacctgaagctgctgctggcccccagcagcaagaagggcaaggcccggctgagccccaggtctgtgggcgtcatcagcccctacaggaagcaggtggagaagatccgctactgcatcaccaagctggaccgggagctgcggggcctggatgacatcaaggacctgaaggtgggctctgtggaggagttccagggccaggagaggagcgtcatcctgatcagcacagtgcgcagcagccagagctttgtgcagctggacctggacttcaacctgggcttcctgaagaaccccaagcgcttcaacgtggccgtgacccgggccaaggccctgctgatcatcgtgggcaaccccctgctgctgggccatgaccctgactggaaggtgttcctggagttctgcaaggaaaatggaggctacacaggctgccccttccctgccaagctggacctgcagcagggccagaacctgctgcagggcctgagcaagctgagccccagcaccagcggcccccacagccatgactacctgccccaggagcgggagggggagggcggcctgagcctgcaggtggagcctgagtggagaaatgagctgtag

SEQ ID NO: 160281 - DNA, 3012 bp, synthetic construct; identical to SEQ ID NO: 160277
  misc_feature 1..3012: note = Description of Artificial Sequence: Synthetic coding sequence
  source 1..3012: mol_type = other DNA

SEQ ID NO: 160282 - DNA, 171 bp, synthetic construct
  misc_feature 1..171: note = Description of Artificial Sequence: Synthetic coding sequence
  source 1..171: mol_type = other DNA
atgcccagcaagttcagctgccggcagctgcgggaggccggccagtgctttgagagcttcctggtggtgcggggcctggacatggagacagaccgggagcggctgcggaccatctacaacagagacttcaagatcagcctggccagcagcaagagcatcctgcagagctag

SEQ ID NO: 160283 - DNA, 3636 bp, synthetic construct
  misc_feature 1..3636: note = Description of Artificial Sequence: Synthetic coding sequence
  source 1..3636: mol_type = other DNA
atgctgagcctggccgccaagctggtggccttcttctggaggacagctgacaccccccgggaggaggccggccagctggagcctgagctggccgagggggacaccaagctgaagacagtgcggggcgtggtgacccgctactgcagcgactatggcatgattgatgacatgatctacttcagcagtgatgctgtgaccagccgggtgctgctgaatgtgggccaggaggtgattgctgtggtggaggagaacaaggtgtccaatggcctgaaggccatccgggtggaggccgtgtctgacaagtgggaggatgacagcagaaatcatggcagccccagcgactgtggcccccgggtgctgattggctgtgtgaccagcctggtggagggcgccggctgcatcagccagaccacctacttcagcctggagagcgtgtgtgagggctttgagccctgcaagggggactgggtggaggccgagtaccgcatccggcccggcacctggagcagcgaggccacctctgtgaagcccctgcgctacaagagggtggacaaggtgtgcatcagcagcctgtgtggcagaaatggagtgctggaggagagcatcttcttcaccctggacagcctgaagctgcctgatggctacacccccaggagaggagatgtggtgaatgctgtggtggtggagagcagccagagctgctacgtgtggagggccctgtgcatgaccctggtgaagagaagagatgctgcccctgtgcatgaggccacccacttctacggcaccatcctgctgaagaacaagggggacatcgaggtgacccaggtgacccacttcggcaccctgaaggagggccgcagcaagaccatggtgatctggattgaaaataaaggagacatcccccagaacctggtgtcctgcaagctggccggctgggacaagagcaagcagttccgcttccagatgctggacaaggaccagatgtgccctgtggtgtcctttgtgtctgtgcctgagaaggagaacagcagtgatgagaacatcaacagcctgaacagccacaccaagaacaagaccagccagatgtctgagagcagcctggtgaacaacagaggcatcagccctggggactgcacctgcaagggagaaaatggagagaaggacaacatcctgagcaggaagcagatgacagagcctgagcccggcggcctggtgcccccaggcggcaagaccttcatcgtggtgatctgtgatggcaagaaccctggccgctgcaaggagctgctgctgctgtgcttcagtgacttcctgattggccgctacctggaggtgaatgtcatcagcggggaggagagcctgattgctgcccgggagcccttctcctggaagaagctgaagagcagccaggccctgaccagcgccaagaccaccgtggtggtgacagcccagaagaggaacagccggcggcagctgcccagcttcctgccccagtaccccatcccagaccggctgaggaaatgtgtggagcagaagattgacatcctgaccttccagcccctgctggccgagctgctgaacatgagcaactacaaggagaagttcagcaccctgctgtggctggaggagatctatgcagagatggagctgaaggagtacaacatgagcggcatcatcctgcggagaaatggagacctgctggtgctggaggtgcccggcctggccgagggccggcccagcctgtatgctggggacaagctgatcctgaagacccaggagtacaacggccacgccatcgagtacatctcctatgtgacagagatccacgaggaggatgtgaccctgaagatcaaccctgagtttgagcaggcctacaactttgagcccatggatgtggagttcacctacaacagaaccaccagccgccgctgccactttgccctggagcacgtgatccacctgggcgtgaaggtgctcttccctgaggagatcatcctgcagagcccccaggtgactggaaactggaaccacgcccaggacaccaagagcagcggccagagcaccagcaagaagaacaggaagaccatgacagaccaggccgagcacggcacagaggagcggcgggtgggggacaaggacctgcctgtgctggcccccttcaccgctgagatgtctgactgggtggatgagatccagacccccaaggccaggaagatggagttcttcaaccctgtgctgaatgaaaaccagaagctggccgtgaagaggatcctgagcggggactgccggcccctgccctacatcctgtttggacctcctggcaccgggaagacagtgaccatcattgaagctgtgctgcaggtgcactttgccctgcctgacagccgcatcctggtgtgtgcccccagcaacagcgctgctgacctggtgtgcctgcggctgcacgagagcaaggtgctgcagcctgccaccatggtgcgggtgaatgccacctgccgctttgaggagatcgtgattgatgctgtgaagccctactgcagagatggagaggacatctggaaggccagccgcttccgcatcatcatcaccacctgcagcagcagcggcctcttctaccagattggagtgcgggtgggccacttcacccacgtgtttgtggatgaggccggccaggccagcgagccagaatgtctcatccccctgggcctgatgtctgacatcagcggccagatcgtgctggccggggaccccatgcagctgggccctgtgatcaagagccggctggccatggcctacggcctgaatgtgtccttcctggagcggctgatgagcaggcctgcctaccagagagatgaaaatgccttcggggcctgtggggcccacaaccccctgctggtgaccaagctggtgaagaactaccgcagccatgaggccctgctgatgctgcccagccgcctcttctaccaccgggagctggaggtgtgtgccgaccccaccgtggtgaccagcctgctgggctgggagaagctgcccaagaagggcttccccctcatcttccatggagtgcggggcagcgaggcccgggagggcaagagccccagctggttcaacccagctgaggccgtgcaggtgctgcgctactgctgcctgctggcccacagcatcagcagccaggtgtctgccagtgacattggagtcatcaccccctacaggaagcaggtggagaagatccgcatcctgctgagaaatgtggacctgatggacatcaaggtgggctctgtggaggagttccagggccaggagtacctggtgatcatcatcagcacagtgcgcagcaatgaagatagatttgaagatgaccgctacttcctgggcttcctgagcaacagcaagcgcttcaacgtggccatcacccggcccaaggccctgctgattgtgctgggcaacccccacgtgctggtgcgggacccctgcttcggggccctgctggagtacagcatcaccaacggggtgtacatgggctgtgacctgcccccagccctgcagagcctgcagaactgtggggagggcgtggccgaccccagctaccctgtggtgcctgagagcacaggccctgagaagcaccaggagcccagctag

SEQ ID NO: 160284 - DNA, 378 bp, synthetic construct
  misc_feature 1..378: note = Description of Artificial Sequence: Synthetic coding sequence
  source 1..378: mol_type = other DNA
atgtctgacatcagcggccaggtgaccaagctggtgaagaactaccgcagccatgaggccctgctgatgctgcccagccgcctcttctaccaccgggagctggaggtgtgtgccgaccccaccgtggtgaccagcctgctgggctgggagaagctgcccaagaagggcttccccctcatcttccacggcgtgcggggcagcgaggcccgggagggcaagagccccagctggttcaacccagctgaggccgtgcaggtgctgcgctactgctgcctgctggcccacagcatcagcagccaggtgtctgccagtgacatcggggtcatcaccccctacaggaagcaggtgcggcctgcccaggcccggctggtgctgtag

SEQ ID NO: 160285 - DNA, 378 bp, synthetic construct; identical to SEQ ID NO: 160284
  misc_feature 1..378: note = Description of Artificial Sequence: Synthetic coding sequence
  source 1..378: mol_type = other DNA

SEQ ID NO: 160286 - DNA, 1017 bp, synthetic construct
  misc_feature 1..1017: note = Description of Artificial Sequence: Synthetic coding sequence
  source 1..1017: mol_type = other DNA
atgttccgggtgggccacttcacccacgtgtttgtggatgaagctggccaggccagcgagcctgagtgcctgatccccctgggcctgatgtctgacatcagcggccagatcgtgctggccggggaccccatgcagctgggccctgtgatcaagagccggctggccatggcctacggcctgaatgtgtccttcctggagcggctgatgagcaggcctgcctaccagagagatgaaaatgcctttggagcctgtggggcccacaaccccctgctggtgaccaagctggtgaagaactaccgcagccatgaggccctgctgatgctgcccagccgcctcttctaccaccgggagctggaggtgtgtgccgaccccaccgtggtgaccagcctgctgggctgggagaagctgcccaagaagggcttccccctcatcttccacggcgtgcggggcagcgaggcccgggagggcaagagccccagctggttcaacccagctgaggccgtgcaggtgctgcgctactgctgcctgctggcccacagcatcagcagccaggtgtctgccagtgacatcggggtcatcaccccctacaggaagcaggtggagaagatccgcatcctgctgagaaatgtggacctgatggacatcaaggtgggctctgtggaggagttccagggccaggagtacctggtgatcatcatcagcacagtgcgcagcaatgaagatagatttgaagatgaccgctacttcctgggcttcctgagcaacagcaagcgcttcaacgtggccatcacccggcccaaggccctgctgattgtgctgggcaacccccacgtgctggtgcgggacccctgctttggagccctgctggagtacagcatcaccaatggagtgtacatgggctgtgacctgcccccagccctgcagagcctgcagaactgtggggagggcgtggccgaccccagctaccctgtggtgcctgagagcactggacctgagaagcaccaggagcccagctag

SEQ ID NO: 160287 - DNA, 3498 bp, synthetic construct
  misc_feature 1..3498: note = Description of Artificial Sequence: Synthetic coding sequence
  source 1..3498: mol_type = other DNA
atgctgagcctggccgccaagctggtggccttcttctggaggacagctgacaccccccgggaggaggccggccagctggagcctgagctggccgagggggacaccaagctgaagacagtgcggggcgtggtgacccgctactgcagcgactatggcatgattgatgacatgatctacttcagcagtgatgctgtgaccagccgggtgctgctgaatgtgggccaggaggtgattgctgtggtggaggagaacaaggtgtccaatggcctgaaggccatccgggtggaggccgtgtctgacaagtgggaggatgacagcagaaatcatggcagccccagcgactgtggcccccgggtgctgattggctgtgtgaccagcctggtggagggcgccggctgcatcagccagaccacctacttcagcctggagagcgtgtgtgagggctttgagccctgcaagggggactgggtggaggccgagtaccgcatccggcccggcacctggagcagcgaggccacctctgtgaagcccctgcgctacaagagggtggacaaggtgtgcatcagcagcctgtgtggcagaaatggagtgctggaggagagcatcttcttcaccctggacagcctgaagctgcctgatggctacacccccaggagaggagatgtggtgaatgctgtggtggtggagagcagccagagctgctacgtgtggagggccctgtgcatgaccctggtgaagagaagagatgctgcccctgtgcatgaggccacccacttctacggcaccatcctgctgaagaacaagggggacatcgaggtgacccaggtgacccacttcggcaccctgaaggagggccgcagcaagaccatggtgatctggattgaaaataaaggagacatcccccagaacctggtgtcctgcaagctggccggctgggacaagagcaagcagttccgcttccagatgctggacaaggaccagatgtgccctgtggtgtcctttgtgtctgtgcctgagaaggagaacagcagtgatgagaacatcaacagcctgaacagccacaccaagaacaagaccagccagatgtctgagagcagcctggtgaacaacagaggcatcagccctggggactgcacctgcaagggagaaaatggagagaaggacaacatcctgagcaggaagcagatgacagagcctgagcccggcggcctggtgcccccaggcggcaagaccttcatcgtggtgatctgtgatggcaagaaccctggccgctgcaaggagctgctgctgctgtgcttcagtgacttcctgattggccgctacctggaggtgaatgtcatcagcggggaggagagcctgattgctgcccgggagcccttctcctggaagaagctgaagagcagccaggccctgaccagcgccaagaccaccgtggtggtgacagcccagaagaggaacagccggcggcagctgcccagcttcctgccccagtaccccatcccagaccggctgaggaaatgtgtggagcagaagattgacatcctgaccttccagcccctgctggccgagctgctgaacatgagcaactacaaggagaagttcagcaccctgctgtggctggaggagatctatgcagagatggagctgaaggagtacaacatgagcggcatcatcctgcggagaaatggagacctgctggtgctggaggtgcccggcctggccgagggccggcccagcctgtatgctggggacaagctgatcctgaagacccaggagtacaacggccacgccatcgagtacatctcctatgtgacagagatccacgaggaggatgtgaccctgaagatcaaccctgagtttgagcaggcctacaactttgagcccatggatgtggagttcacctacaacagaaccaccagccgccgctgccactttgccctggagcacgtgatccacctgggcgtgaaggtgctcttccctgaggagatcatcctgcagagcccccaggtgactggaaactggaaccacgcccaggacaccaagagcagcggccagagcaccagcaagaagaacaggaagaccatgacagaccaggccgagcacggcacagaggagcggcgggtgggggacaaggacctgcctgtgctggcccccttcaccgctgagatgtctgactgggtggatgagatccagacccccaaggccaggaagatggagttcttcaaccctgtgctgaatgaaaaccagaagctggccgtgaagaggatcctgagcggggactgccggcccctgccctacatcctgtttggacctcctggcaccgggaagacagtgaccatcattgaagctgtgctgcaggtgcactttgccctgcctgacagccgcatcctggtgtgtgcccccagcaacagcgctgctgacctggtgtgcctgcggctgcacgagagcaaggtgctgcagcctgccaccatggtgcgggtgaatgccacctgccgctttgaggagatcgtgattgatgctgtgaagccctactgcagagatggagaggacatctggaaggccagccgcttccgcatcatcatcaccacctgcagcagcagcggcctcttctaccagattggagtgcgggtgggccacttcacccacgtgtttgtggatgaggccggccaggccagcgagccagaatgtctcatccccctgggcctgatgtctgacatcagcggccagatcgtgctggccggggaccccatgcagctgggccctgtgatcaagagccggctggccatggcctacggcctgaatgtgtccttcctggagcggctgatgagcaggcctgcctaccagagagatgaaaatgccttcggggcctgtggggcccacaaccccctgctggtgaccaagctggtgaagaactaccgcagccatgaggccctgctgatgctgcccagccgcctcttctaccaccgggagctggaggtgtgtgccgaccccaccgtggtgaccagcctgctgggctgggagaagctgcccaagaagggcttccccctcatcttccatggagtgcggggcagcgaggcccgggagggcaagagccccagctggttcaacccagctgaggccgtgcaggtgctgcgctactgctgcctgctggcccacagcatcagcagccaggtgtctgccagtgacattggagtcatcaccccctacaggaagcaggtggagaagatccgcatcctgctgagaaatgtggacctgatggacatcaaggtgggctctgtggaggagttccagggccaggagtacctggtgatcatcatcagcacagacccctgcttcggggccctgctggagtacagcatcaccaacggggtgtacatgggctgtgacctgcccccagccctgcagagcctgcagaactgtggggagggcgtggccgaccccagctaccctgtggtgcctgagagcacaggccctgagaagcaccaggagcccagctag

SEQ ID NO: 160288 - DNA, 636 bp, synthetic construct
  misc_feature 1..636: note = Description of Artificial Sequence: Synthetic coding sequence
  source 1..636: mol_type = other DNA
atgtccttcctgcctgtgcgcagcgtcatcggcggcggggacaccaagctgaagacagtgcggggcgtggtgacccgctactgcagcgactatggcatgattgatgacatgatctacttcagcagtgatgctgtgaccagccgggtgctgctgaatgtgggccaggaggtgattgctgtggtggaggagaacaaggtgtccaatggcctgaaggccatccgggtggaggccgtgtctgacaagtgggaggatgacagcagaaatcatggcagccccagcgactgtggcccccgggtgctgattggctgtgtgaccagcctggtggagggcgccggctgcatcagccagaccacctacttcagcctggagagcgtgtgtgagggctttgagccctgcaagggggactgggtggaggccgagtaccgcatccggcccggcacctggagcagcgaggccacctctgtgaagcccctgcgctacaagagggtggacaaggtggcctgccgcctggtggcccccctgtgtgccagcggccggcctgccatccggggcaacctgcacggccctggcttcagctgcatgtgctggaagccaggcaagatcaagctgtgccacggccagcgggagaagaagtag

SEQ ID NO: 160289 - DNA, 3498 bp, synthetic construct
  misc_feature 1..3498: note = Description of Artificial Sequence: Synthetic coding sequence
  source 1..3498: mol_type = other DNA
atgtccttcctgcctgtgcgcagcgtcatcggcggcggggacaccaagctgaagacagtgcggggcgtggtgacccgctactgcagcgactatggcatgattgatgacatgatctacttcagcagtgatgctgtgaccagccgggtgctgctgaatgtgggccaggaggtgattgctgtggtggaggagaacaaggtgtccaatggcctgaaggccatccgggtggaggccgtgtctgacaagtgggaggatgacagcagaaatcatggcagccccagcgactgtggcccccgggtgctgattggctgtgtgaccagcctggtggagggcgccggctgcatcagccagaccacctacttcagcctggagagcgtgtgtgagggctttgagccctgcaagggggactgggtggaggccgagtaccgcatccggcccggcacctggagcagcgaggccacctctgtgaagcccctgcgctacaagagggtggacaaggtgtgcatcagcagcctgtgtggcagaaatggagtgctggaggagagcatcttcttcaccctggacagcctgaagctgcctgatggctacacccccaggagaggagatgtggtgaatgctgtggtggtggagagcagccagagctgctacgtgtggagggccctgtgcatgaccctggtgaagagaagagatgctgcccctgtgcatgaggccacccacttctacggcaccatcctgctgaagaacaagggggacatcgaggtgacccaggtgacccacttcggcaccctgaaggagggccgcagcaagaccatggtgatctggattgaaaataaaggagacatcccccagaacctggtgtcctgcaagctggccggctgggacaagagcaagcagttccgcttccagatgctggacaaggaccagatgtgccctgtggtgtcctttgtgtctgtgcctgagaaggagaacagcagtgatgagaacatcaacagcctgaacagccacaccaagaacaagaccagccagatgtctgagagcagcctggtgaacaacagaggcatcagccctggggactgcacctgcaagggagaaaatggagagaaggacaacatcctgagcaggaagcagatgacagagcctgagcccggcggcctggtgcccccaggcggcaagaccttcatcgtggtgatctgtgatggcaagaaccctggccgctgcaaggagctgctgctgctgtgcttcagtgacttcctgattggccgctacctggaggtgaatgtcatcagcggggaggagagcctgattgctgcccgggagcccttctcctggaagaagctgaagagcagccaggccctgaccagcgccaagaccaccgtggtggtgacagcccagaagaggaacagccggcggcagctgcccagcttcctgccccagtaccccatcccagaccggctgaggaaatgtgtggagcagaagattgacatcctgaccttccagcccctgctggccgagctgctgaacatgagcaactacaaggagaagttcagcaccctgctgtggctggaggagatctatgcagagatggagctgaaggagtacaacatgagcggcatcatcctgcggagaaatggagacctgctggtgctggaggtgcccggcctggccgagggccggcccagcctgtatgctggggacaagctgatcctgaagacccaggagtacaacggccacgccatcgagtacatctcctatgtgacagagatccacgaggaggatgtgaccctgaagatcaaccctgagtttgagcaggcctacaactttgagcccatggatgtggagttcacctacaacagaaccaccagccgccgctgccactttgccctggagcacgtgatccacctgggcgtgaaggtgctcttccctgaggagatcatcctgcagagcccccaggtgactggaaactggaaccacgcccaggacaccaagagcagcggccagagcaccagcaagaagaacaggaagaccatgacagaccaggccgagcacggcacagaggagcggcgggtgggggacaaggacctgcctgtgctggcccccttcaccgctgagatgtctgactgggtggatgagatccagacccccaaggccaggaagatggagttcttcaaccctgtgctgaatgaaaaccagaagctggccgtgaagaggatcctgagcggggactgccggcccctgccctacatcctgtttggacctcctggcaccgggaagacagtgaccatcattgaagctgtgctgcaggtgcactttgccctgcctgacagccgcatcctggtgtgtgcccccagcaacagcgctgctgacctggtgtgcctgcggctgcacgagagcaaggtgctgcagcctgccaccatggtgcgggtgaatgccacctgccgctttgaggagatcgtgattgatgctgtgaagccctactgcagagatggagaggacatctggaaggccagccgcttccgcatcatcatcaccacctgcagcagcagcggcctcttctaccagattggagtgcgggtgggccacttcacccacgtgtttgtggatgaggccggccaggccagcgagccagaatgtctcatccccctgggcctgatgtctgacatcagcggccagatcgtgctggccggggaccccatgcagctgggccctgtgatcaagagccggctggccatggcctacggcctgaatgtgtccttcctggagcggctgatgagcaggcctgcctaccagagagatgaaaatgccttcggggcctgtggggcccacaaccccctgctggtgaccaagctggtgaagaactaccgcagccatgaggccctgctgatgctgcccagccgcctcttctaccaccgggagctggaggtgtgtgccgaccccaccgtggtgaccagcctgctgggctgggagaagctgcccaagaagggcttccccctcatcttccatggagtgcggggcagcgaggcccgggagggcaagagccccagctggttcaacccagctgaggccgtgcaggtgctgcgctactgctgcctgctggcccacagcatcagcagccaggtgtctgccagtgacattggagtcatcaccccctacaggaagcaggtggagaagatccgcatcctgctgagaaatgtggacctgatggacatcaaggtgggctctgtggaggagttccagggccaggagtacctggtgatcatcatcagcacagtgcgcagcaatgaagatagatttgaagatgaccgctacttcctgggcttcctgagcaacagcaagcgcttcaacgtggccatcacccggcccaaggccctgctgattgtgctgggcaacccccacgtgctggtgcggctgtggaggggcggcggccggcccctgctgcccagcggggcccgcatccacaggacccgggaggccagcggggcccagctgatctgcagcggctag

SEQ ID NO: 160290 - DNA, 3636 bp, synthetic construct; identical to SEQ ID NO: 160283
  misc_feature 1..3636: note = Description of Artificial Sequence: Synthetic coding sequence
  source 1..3636: mol_type = other DNA

SEQ ID NO: 160291 - DNA, 483 bp, synthetic construct
  misc_feature 1..483: note = Description of Artificial Sequence: Synthetic coding sequence
  source 1..483: mol_type = other DNA
atggctgctgagaggaagacccggctgagcaagaacctgctgaggatgaagttcatgcagaggggcctggacagcgagaccaagaagcagctggaggaggaggagaagaagatcatcagcgaggagcactggtacctggacctgcctgagctgaaggagaaggagagcttcatcatcgaggagcagagcttcctgctgtgtgaggacctgctgtatggccgcatgtccttccggggcttcaaccctgaggtggagaagctgatgctgcagatgaatgccaagcacaaggccgaggaggtggaggatgagaccgtggagctggatgtgtctgatgaggagatggcccggcgctatgagaccctggtgggcaccatcggcaagaagtttgccaggaagagggaccacgccaactatgaggaggatgaaaatggagacatcacccccatcaaggccaagaagatgttcctgaagccccaggactag

SEQ ID NO: 160292 - DNA, 627 bp, synthetic construct
  misc_feature 1..627: note = Description of Artificial Sequence: Synthetic coding sequence
  source 1..627: mol_type = other DNA
atgaaggcctgcaagaggggcaacagcgacatcgtgcggctggtgattgaatgtggggctgactgcaacatcctgagcaagcaccagaacagcgccctgcactttgccaagcagagcaacaacgtgctggtgtatgacctgctgaagaaccacctggagaccctgagccgggtggccgaggagaccatcaaggactactttgaggcccggctggccctgctggagcccgtcttccccatcgcctgccaccggctgtgtgagggccctgacttcagcacagacttcaactacaagccaccccagaacatccctgagggcagcggcatcctgctcttcatcttccacgccaacttcctgggcaaggaggtgattgcccggctgtgtggcccctgcagcgtgcaggccgtggtgctgaatgacaagttccagctgcctgtgttcctgaccggcagccgctctgtggtgcaggccggcgtgcagtggaggggcctgcagctgactggagtgctgaccagccaggcccaggccatcctgcccccccagccccccaactacctgggcctgaagatgaccgtcatcctcttcacccacagcgccctgctgcaggtgcccatcaacagcagctag

SEQ ID NO: 160293 - DNA, 2583 bp, synthetic construct
  misc_feature 1..2583: note = Description of Artificial Sequence: Synthetic coding sequence
  source 1..2583: mol_type = other DNA
atggagcaggtggccgagggcgcccgggtgacagctgtgcctgtgtctgctgctgacagcacagaggagctggccgaggtggaggagggcgtgggcgtggtgggggaggacaatgatgctgctgcccggggagctgaggccttcggggacagtgaagaagatggagaagatgtgtttgaggtggagaagatcctggacatgaagacagaaggaggcaaggtgctgtacaaggtgcgctggaagggctacaccagtgatgatgacacctgggagcctgagatccacctggaggactgcaaggaggtgctgctggagttcaggaagaagattgctgagaacaaggccaaggctgtgaggaaggacatccagaggctgagcctgaacaatgacatctttgaggccaacagcgacagcgaccagcagagcgagaccaaggaggacaccagccccaagaagaagaagaagaagctgcggcagcgggaggagaagagcccagatgacctgaagaagaagaaggccaaggccggcaagctgaaggacaagagcaagccagacctggagagcagcctggagagcctggtgtttgacctgcggaccaagaagaggatcagcgaggccaaggaggagctgaaggagagcaagaagcccaagaaggatgaggtgaaggagaccaaggagctgaagaaggtgaagaagggggagatccgggacctgaagaccaagacccgggaggaccccaaggagaacaggaagaccaagaaggagaagtttgtggagagccaggtggagagcgagagctctgtgctgaatgacagccccttcccagaagatgattctgagggcctgcacagcgacagccgggaggagaagcagaacaccaagagcgcccgggagcgggccggccaggacatgggcctggagcacggctttgagaagcccctggacagcgccatgtctgctgaggaggacacagatgtgcggggccgcaggaagaagaagacccccaggaaggccgaggacaccagagaaaataggaagctggagaacaagaatgccttcctggagaagaagacagtgcccaagaagcagaggaaccaggacaggagcaagtctgctgctgagctggagaagctgatgcctgtgtctgcccagacccccaagggccgccgcctgagcggggaggagcggggcctgtggagcacagattctgctgaggaggacaaggagaccaagagaaatgaaagcaaggagaagtaccagaagagacatgacagcgacaaggaggagaagggcaggaaggagcccaagggcctgaagaccctgaaggagatcagaaatgcctttgacctcttcaagctgaccccagaggagaagaatgatgtgtctgagaacaacaggaagcgggaggagatccccctggacttcaagaccattgatgaccacaagaccaaggagaacaagcagagcctgaaggagaggaggaacaccagagatgaaacagacacctgggcctacatcgctgctgagggggaccaggaggtgctggacagcgtgtgccaggctgatgaaaattctgatggccggcagcagatcctgagcctgggcatggacctgcagctggagtggatgaagctggaggacttccagaagcacctggatggcaaggatgaaaattttgctgccacagatgccatccccagcaatgtgctgagagatgctgtgaagaatggagactacatcaccgtgaaggtggccctgaacagcaatgaggagtacaacctggaccaggaggacagcagcggcatgaccctggtgatgctggccgccgccggcggccaggatgacctgctgcggctgctgatcaccaagggggccaaggtgaatggccggcagaagaatggcaccacagccctgattcatgctgctgagaagaacttcctgaccaccgtggccatcctgctggaggccggggcctttgtgaatgtgcagcagagcaatggagaaacagccctgatgaaggcctgcaagaggggcaacagcgacatcgtgcggctggtgattgaatgtggggctgactgcaacatcctgagcaagcaccagaacagcgccctgcactttgccaagcagagcaacaacgtgctggtgtatgacctgctgaagaaccacctggagaccctgagccgggtggccgaggagaccatcaaggactactttgaggcccggctggccctgctggagcctgtgttccccatcgcctgccaccggctgtgtgagggccctgacttcagcacagacttcaactacaagccaccccagaacatccctgagggcagcggcatcctgctcttcatcttccacgccaacttcctgggcaaggaggtgattgcccggctgtgtggcccctgcagcgtgcaggccgtggtgctgaatgacaagttccagctgcccgtcttcctggacagccactttgtgtacagcttcagccctgtggccggccccaacaagctgttcatccggctgacagaggcccccagcgccaaggtgaagctgctgattggagcctacagagtgcagctgcagtag

SEQ ID NO: 160294 - DNA, 2604 bp, synthetic construct
  misc_feature 1..2604: note = Description of Artificial Sequence: Synthetic coding sequence
  source 1..2604: mol_type = other DNA
atggagcaggtggccgagggcgcccgggtgacagctgtgcctgtgtctgctgctgacagcacagaggagctggccgaggtggaggagggcgtgggcgtggtgggggaggacaatgatgctgctgcccggggagctgaggccttcggggacagtgaagaagatggagaagatgtgtttgaggtggagaagatcctggacatgaagacagaaggaggcaaggtgctgtacaaggtgcgctggaagggctacaccagtgatgatgacacctgggagcctgagatccacctggaggactgcaaggaggtgctgctggagttcaggaagaagattgctgagaacaaggccaaggctgtgaggaaggacatccagaggctgagcctgaacaatgacatctttgaggccaacagcgacagcgaccagcagagcgagaccaaggaggacaccagccccaagaagaagaagaagaagctgcggcagcgggaggagaagagcccagatgacctgaagaagaagaaggccaaggccggcaagctgaaggacaagagcaagccagacctggagagcagcctggagagcctggtgtttgacctgcggaccaagaagaggatcagcgaggccaaggaggagctgaaggagagcaagaagcccaagaaggatgaggtgaaggagaccaaggagctgaagaaggtgaagaagggggagatccgggacctgaagaccaagacccgggaggaccccaaggagaacaggaagaccaagaaggagaagtttgtggagagccaggtggagagcgagagctctgtgctgaatgacagccccttcccagaagatgattctgagggcctgcacagcgacagccgggaggagaagcagaacaccaagagcgcccgggagcgggccggccaggacatgggcctggagcacggctttgagaagcccctggacagcgccatgtctgctgaggaggacacagatgtgcggggccgcaggaagaagaagacccccaggaaggccgaggacaccagagaaaataggaagctggagaacaagaatgccttcctggagaagaagacagtgcccaagaagcagaggaaccaggacaggagcaagtctgctgctgagctggagaagctgatgcctgtgtctgcccagacccccaagggccgccgcctgagcggggaggagcggggcctgtggagcacagattctgctgaggaggacaaggagaccaagagaaatgaaagcaaggagaagtaccagaagagacatgacagcgacaaggaggagaagggcaggaaggagcccaagggcctgaagaccctgaaggagatcagaaatgcctttgacctcttcaagctgaccccagaggagaagaatgatgtgtctgagaacaacaggaagcgggaggagatccccctggacttcaagaccattgatgaccacaagaccaaggagaacaagcagagcctgaaggagaggaggaacaccagagatgaaacagacacctgggcctacatcgctgctgagggggaccaggaggtgctggacagcgtgtgccaggctgatgaaaattctgatggccggcagcagatcctgagcctgggcatggacctgcagctggagtggatgaagctggaggacttccagaagcacctggatggcaaggatgaaaattttgctgccacagatgccatccccagcaatgtgctgagagatgctgtgaagaatggagactacatcaccgtgaaggtggccctgaacagcaatgaggagtacaacctggaccaggaggacagcagcggcatgaccctggtgatgctggccgccgccggcggccaggatgacctgctgcggctgctgatcaccaagggggccaaggtgaatggccggcagaagaatggcaccacagccctgattcatgctgctgagaagaacttcctgaccaccgtggccatcctgctggaggccggggcctttgtgaatgtgcagcagagcaatggagaaacagccctgatgaaggcctgcaagaggggcaacagcgacatcgtgcggctggtgattgaatgtggggctgactgcaacatcctgagcaagcaccagaacagcgccctgcactttgccaagcagagcaacaacgtgctggtgtatgacctgctgaagaaccacctggagaccctgagccgggtggccgaggagaccatcaaggactactttgaggcccggctggccctgctggagcctgtgttccccatcgcctgccaccggctgtgtgagggccctgacttcagcacagacttcaactacaagccaccccagaacatccctgagggcagcggcatcctgctcttcatcttccacgccaacttcctgggcaaggaggtgattgcccggctgtgtggcccctgcagcgtgcaggccgtggtgctgaatgacaagttccagctgcccgtcttcctgaccggcagccgctctgtggtgcaggccggcgtgcagtggaggggcctgcagctgactggagtgctgaccagccaggcccaggccatcctgcccccccagccccccaactacctgggcctgaagatgcacgccaccaccagcggctag

SEQ ID NO: 160295 - DNA, 1812 bp, synthetic construct
  misc_feature 1..1812: note = Description of Artificial Sequence: Synthetic coding sequence
  source 1..1812: mol_type = other DNA
atggagcaggtggccgagggcgcccgggtgacagctgtgcctgtgtctgctgctgacagcacagaggagctggccgaggtggaggagggcgtgggcgtggtgggggaggacaatgatgctgctgcccggggagctgaggccttcggggacagtgaagaagatggagaagatgtgtttgaggtggagaagatcctggacatgaagacagaaggaggcaaggtgctgtacaaggtgcgctggaagggctacaccagtgatgatgacacctgggagcctgagatccacctggaggactgcaaggaggtgctgctggagttcaggaagaagattgctgagaacaaggccaaggctgtgaggaaggacatccagaggctgagcctgaacaatgacatctttgaggccaacagcgacagcgaccagcagagcgagaccaaggaggacaccagccccaagaagaagaagaagaagctgcggcagcgggaggagaagagcccagatgacctgaagaagaagaaggccaaggccggcaagctgaaggacaagagcaagccagacctggagagcagcctggagagcctggtgtttgacctgcggaccaagaagaggatcagcgaggccaaggaggagctgaaggagagcaagaagcccaagaaggatgaggtgaaggagaccaaggagctgaagaaggtgaagaagggggagatccgggacctgaagaccaagacccgggaggaccccaaggagaacaggaagaccaagaaggagaagtttgtggagagccaggtggagagcgagagctctgtgctgaatgacagccccttcccagaagatgattctgagggcctgcacagcgacagccgggaggagaagcagaacaccaagagcgcccgggagcgggccggccaggacatgggcctggagcacggctttgagaagcccctggacagcgccatgtctgctgaggaggacacagatgtgcggggccgcaggaagaagaagacccccaggaaggccgaggacaccagagaaaataggaagctggagaacaagaatgccttcctggagaagaagacagtgcccaagaagcagaggaaccaggacaggagcaagtctgctgctgagctggagaagctgatgcctgtgtctgcccagacccccaagggccgccgcctgagcggggaggagcggggcctgtggagcacagattctgctgaggaggacaaggagaccaagagaaatgaaagcaaggagaagtaccagaagagacatgacagcgacaaggaggagaagggcaggaaggagcccaagggcctgaagaccctgaaggagatcagaaatgcctttgacctcttcaagctgaccccagaggagaagaatgatgtgtctgagaacaacaggaagcgggaggagatccccctggacttcaagaccattgatgaccacaagaccaaggagaacaagcagagcctgaaggagaggaggaacaccagagatgaaacagacacctgggcctacatcgctgctgagggggaccaggaggtgctggacagcgtgtgccaggctgatgaaaattctgatggccggcagcagatcctgagcctgggcatggacctgcagctggagtggatgaagctggaggacttccagaagcacctggatggcaaggatgaaaattttgctgccacagatgccatccccagcaatgtgctgagagatgctgtgaagaagaagaagaagaagaagttcctgggcacctacaccttcttcctgttcttcttctttgagaagccagacctggtgcccctcttctag

SEQ ID NO: 160296 - DNA, 3087 bp, synthetic construct
  misc_feature 1..3087: note = Description of Artificial Sequence: Synthetic coding sequence
  source 1..3087: mol_type = other DNA
atgggcttcttcagcctgagcagcgagagaaatgaatctgtcatccactacccagagagcacagagcctgagatccagcaggagatgagcaccagccagcctgactgcaatgtggacagctgcagcgtgagcagcggctacggcaccttctgcatcagcgagctgaacctgtacaagagcaaggaccccaaggagttcatggagcacattgatgtgcccaagggccagtatgtggccccagctgtgcctgctgagagcctggtggatggagtgaagaatgaaaacttctacatccagaccccagaagaatgtcatgtgtccctgaaggaggatgtgtccatcagccctggagaatttgagcacaacttcctgggggagaacaaggtgtctgaggtgtacagcggcaagaccaacagcaatgccatcacctcctgggcccagaagctgaagcagaaccagcccaagagggcccacgtggaggatggcggcagccgcagcaagcagggcaatgagcagagcaagaagacccccatcgagaagagtgactttgctgctgccacccacccccgggccttctacctgagcaagccagatgagaccccaaatgcctggatgtctgacagcggcaccggcctgacctactggaagctggaggagaaggacatgcaccacagcctgcctgagaccctggagaagaccttcatcagcctgagcagcacagatgtgagccccaaccagagcaacaccagcaatgagatgaagctgcccagcctgaaggacatctactacaagaagcagcgggagaacaagcagctgcctgagaggaacctgaccagcgccagcaaccccaaccaccccccagaggtgctgaccctggaccccaccctgcacatgaagcccaagcagcagatcagcggcatccagccccacggcctgcccaatgccctggatgaccgcatctccttctccccagacagcgtgctggagcccagcatgagcagccccagcgacatcgacagcttcagccaggccagcaatgtgaccagccagctgcccggcttccccaagtaccccagccacaccaaggccagccctgtggacagctggaagaaccagaccttccagaatgaaagcaggaccagcagcaccttccccagcgtgtacaccatcaccagcaatgacatctctgtgaacacagtggatgaagaaaatacagtgatggtggccagcgcctctgtgtcccagagccagctgcctggaacagccaacagcgtgcctgagtgcatcagcctgaccagcctggaggaccctgtgatcctgagcaagatccggcagaacctgaaggagaagcacgcccggcacatcgctgacctgcgggcctactatgagagcgagatcaacagcctgaagcagaagctggaggccaaggagatctctggagtggaggactggaagatcaccaaccagatcctggtggacagatgtggccagctggacagcgccctgcacgaggccaccagccgggtgaggaccctggagaacaagaacaacctgctggagattgaggtgaatgacctgcgggagcgcttctctgctgccagcagcgccagcaagatcctgcaggagcgcatcgaggagatgaggaccagcagcaaggagaaggacaacaccatcatccggctgaagagccggctgcaggacctggaggaggcctttgaaaatgcctacaagctgagtgatgacaaggaggcccagctgaagcaggagaacaagatgttccaggacctgctgggggagtatgagagcctgggcaaggagcaccggcgggtgaaggatgccctgaacaccacagagaacaagctgctggatgcctacacccagatcagtgacctgaagaggatgatcagcaagctggaggcccaggtgaagcaggtggagcacgagaacatgctgagcctgcggcacaacagccgcatccacgtgcggcccagccgggccaacaccctggccaccagtgatgtgtccaggaggaagtggctgatccctggagctgagtacagcatcttcaccggccagcccctggacacccaggacagcaatgtggacaaccagctggaggagacctgcagcctgggccacaggagccccctggagaaggacagcagccctggcagcagcagcaccagcctgctgatcaagaagcagcgggagaccagtgacacccccatcatgagggccctgaaggagctggatgagggcaagatcttcaagaactggggcacccagacagagaaggaggacaccagcaacatcaacccccggcagacagagacctctgtgaatgccagccgcagccctgagaagtgtgcccagcagaggcagaagaggctgaacagcgccagccagaggagcagcagcctgccccccagcaacaggaagagcagcacccccaccaagcgggagatcatgctgacccctgtgacagtggcctacagccccaagaggagccccaaggagaacctgagccctggcttcagccacctgctgagcaagaatgaaagcagccccatccgctttgacatcctgctggatgacctggacacagtgcctgtgtccaccctgcagaggaccaaccccaggaagcagctgcagttcctgcccctggatgattctgaggagaagacctacagcgagaaggccacagacaaccacgtgaaccacagcagctgcccagagcctgtgcccaacggggtgaagaaggtgtctgtgaggacagcctgggagaagaacaagtctgtgtcctatgagcagtgcaagcctgtgtctgtgaccccccagggcaatgactttgagtacacagccaagatccgcaccctggccgagacagagcgcttctttgatgagctgaccaaggagaaggaccagatcgaggccgccctgagcaggatgcccagccctgggggccgcatcaccctgcagacccggctgaaccagaccccccagatctgtgaggagagcagccacaagtgtgcctttgctggccactacgtgccctgccacctgtatgactaccgcttccagggctag

SEQ ID NO: 160297 - DNA, 3096 bp, synthetic construct
  misc_feature 1..3096: note = Description of Artificial Sequence: Synthetic coding sequence
  source 1..3096: mol_type = other DNA
atgggcttcttcagcctgagcagcgagagaaatgaatctgtcatccactacccagagagcacagagcctgagatccagcaggagatgagcaccagccagcctgactgcaatgtggacagctgcagcgtgagcagcggctacggcaccttctgcatcagcgagctgaacctgtacaagagcaaggaccccaaggagttcatggagcacattgatgtgcccaagggccagtatgtggccccagctgtgcctgctgagagcctggtggatggagtgaagaatgaaaacttctacatccagaccccagaagaatgtcatgtgtccctgaaggaggatgtgtccatcagccctggagaatttgagcacaacttcctgggggagaacaaggtgtctgaggtgtacagcggcaagaccaacagcaatgccatcacctcctgggcccagaagctgaagcagaaccagcccaagagggcccacgtggaggatggcggcagccgcagcaagcagggcaatgagcagagcaagaagacccccatcgagaagagtgactttgctgctgccacccacccccgggccttctacctgagcaagccagatgagaccccaaatgcctggatgtctgacagcggcaccggcctgacctactggaagctggaggagaaggacatgcaccacagcctgcctgagaccctggagaagaccttcatcagcctgagcagcacagatgtgagccccaaccagagcaacaccagcaatgagatgaagctgcccagcctgaaggacatctactacaagaagcagcgggagaacaagcagctgcctgagaggaacctgaccagcgccagcaaccccaaccaccccccagaggtgctgaccctggaccccaccctgcacatgaagcccaagcagcagatcagcggcatccagccccacggcctgcccaatgccctggatgaccgcatctccttctccccagacagcgtgctggagcccagcatgagcagccccagcgacatcgacagcttcagccaggccagcaatgtgaccagccagctgcccggcttccccaagtaccccagccacaccaaggccagccctgtggacagctggaagaaccagaccttccagaatgaaagcaggaccagcagcaccttccccagcgtgtacaccatcaccagcaatgacatctctgtgaacacagtggatgaagaaaatacagtgatggtggccagcgcctctgtgtcccagagccagctgcctggaacagccaacagcgtgcctgagtgcatcagcctgaccagcctggaggaccctgtgatcctgagcaagatccggcagaacctgaaggagaagcacgcccggcacatcgctgacctgcgggcctactatgagagcgagatcaacagcctgaagcagaagctggaggccaaggagatctctggagtggaggactggaagatcaccaaccagatcctggtggacagatgtggccagctggacagcgccctgcacgaggccaccagccgggtgaggaccctggagaacaagaacaacctgctggagattgaggtgaatgacctgcgggagcgcttctctgctgccagcagcgccagcaagatcctgcaggagcgcatcgaggagatgaggaccagcagcaaggagaaggacaacaccatcatccggctgaagagccggctgcaggacctggaggaggcctttgaaaatgcctacaagctgagtgatgacaaggaggcccagctgaagcaggagaacaagatgttccaggacctgctgggggagtatgagagcctgggcaaggagcaccggcgggtgaaggatgccctgaacaccacagagaacaagctgctggatgcctacacccagatcagtgacctgaagaggatgatcagcaagctggaggcccaggtgaagcaggtggagcacgagaacatgctgagcctgcggcacaacagccgcatccacgtgcggcccagccgggccaacaccctggccaccagtgatgtgtccaggaggaagtggctgatccctggagctgagtacagcatcttcaccggccagcccctggacacccaggacagcaatgtggacaaccagctggaggagacctgcagcctgggccacaggagccccctggagaaggacagcagccctggcagcagcagcaccagcctgctgatcaagaagcagcgggagaccagtgacacccccatcatgagggccctgaaggagctggatgagggcaagatcttcaagaactggggcacccagacagagaaggaggacaccagcaacatcaacccccggcagacagagacctctgtgaatgccagccgcagccctgagaagtgtgcccagcagaggcagaagaggctgaacagcgccagccagaggagcagcagcctgccccccagcaacaggaagagcagcacccccaccaagcgggagatcatgctgacccctgtgacagtggcctacagccccaagaggagccccaaggagaacctgagccctggcttcagccacctgctgagcaagaatgaaagcagccccatccgctttgacatcctgctggatgacctggacacagtgcctgtgtccaccctgcagaggaccaaccccaggaagcagctgcagttcctgcccctggatgattctgaggagaagacctacagcgagaaggccacagacaaccacgtgaaccacagcagctgcccagagcctgtgcccaacggggtgaagaaggtgtctgtgaggacagcctgggagaagaacaagtctgtgtcctatgagcagtgcaagcctgtgtctgtgaccccccagggcaatgactttgagtacacagccaagatccgcaccctggccgagacagagcgcttctttgatgagctgaccaaggagaaggaccagatcgaggccgccctgagcaggatgcccagccctgggggccgcatcaccctgcagacccggctgaaccaggaggccctggaggaccggctggagcgcatcaaccgggagctgggctctgtgaggatgaccctgaagaagttccacgtgctgcggaccagcgccaacctgtag

SEQ ID NO: 160298 - DNA, 1167 bp, synthetic construct
  misc_feature 1..1167: note = Description of Artificial Sequence: Synthetic coding sequence
  source 1..1167: mol_type = other DNA
atggagcccagccctgctgctgggggcctggagaccacccggctggtgagcccccgggaccggggcggggccggcggcagcctgcggctgaagagcctcttcacagagcccagcgagcccctgcctgaggagagcaagcctgtggagatgcccttccaccactgccaccgggaccccctgcccccacctggcctgaccccagagcggctgcacgcccggcggcagctgtatgctgcctgtgctgtgtgctttgtgttcatggccggggaggtggtgggcggctacctggcccacagcctggccatcatgacagatgctgcccacctgctggctgatgtgggctccatgatgggcagcctcttcagcctgtggctgagcaccaggcctgccaccaggaccatgaccttcggctggcacaggtctgagaccctgggcgccctggcctctgtggtgtccctgtggatggtgacaggcatcctgctgtacctggcctttgtgcggctgctgcacagcgactaccacattgaaggaggagccatgctgctgacagccagcattgctgtgtgtgccaacctgctgatggcctttgtgctgcaccaggccggccccccccacagccacggcagcagaggagcagaatatgcccccctggaggagggccctgaggagcccctgcccctgggcaacacctctgtgcgggccgcctttgtgcacgtgctgggggacctgctgcagagctttggagtgctggccgccagcatcctgatctacttcaagccccagtacaaggctgctgaccccatcagcaccttcctgttcagcatctgtgccctgggcagcacagcccccaccctgagagatgtgctgcgcatcctgatggagggcaccccaagaaatgtgggctttgagcctgtgcgggacaccctgctgtctgtgcctggggtgcgggccacccatgagctgcacctgtgggccctgaccctgacctaccacgtggccagcgcccacctggccatcgacagcacagctgaccctgaggccgtgctggccgaggccagcagccggctgtacagccgcttcggcttcagcagctgcaccctgcaggtggagcagtaccagcctgagatggcccagtgcctgcgctgccaggagcccccccaggcctag

SEQ ID NO: 160299 - DNA, 363 bp, synthetic construct
  misc_feature 1..363: note = Description of Artificial Sequence: Synthetic coding sequence
  source 1..363: mol_type = other DNA
atgtgccacctgtatgagggccctgtggtgggcggctggtacaaggtgctggaccgcttcatccctggcaccaccaaggtggatgccctgaagaagatgctgctggaccagggcggctttgccccctgcttcctgggctgcttcctgcccctggtgggcgccctgaatggcctgagcgcccaggacaactgggccaagctgcagagggactacccagatgccctgatcaccaactactacctgtggccagctgtgcagctggccaacttctacctggtgcccctgcactaccgcctggccgtggtgcagtgtgtggccgtcatctggaacagctacctgtcctggaaggcccaccggctgtag

SEQ ID NO: 160300 - DNA, 531 bp, synthetic construct
  misc_feature 1..531: note = Description of Artificial Sequence: Synthetic coding sequence
  source 1..531: mol_type = other DNA
atggccctgtggagggcctaccagagggccctggccgcccacccctggaaggtgcaggtgctgacagctggcagcctgatgggcctgggggacatcatcagccagcagctggtggagcggcggggcctgcaggagcaccagaggggccgcaccctgaccatggtgtccctgggctgcggctttgtgggccctgtggtgggcggctggtacaaggtgctggaccgcttcatccctggcaccaccaaggtggatgccctgaagaagatgctgctggaccagggcggctttgccccctgcttcctgggctgcttcctgcccctggtgggcgccctgaatggcctgagcgcccaggacaactgggccaagctgcagagggactacccagatgccctgatcaccaactactacctgtggccagctgtgcagctggccaacttctacctggtgcccctgcactaccgcctggccgtggtgcagtgtgtggccgtcatctggaacagctacctgtcctggaaggcccaccggctgtag

SEQ ID NO: 160301 - DNA, 513 bp, synthetic construct
  misc_feature 1..513: note = Description of Artificial Sequence: Synthetic coding sequence
  source 1..513: mol_type = other DNA
atggccctgtggagggcctaccagagggccctggccgcccacccctggaaggtgcaggtgctgacagctggcagcctgatgggcctgggggacatcatcagccagcagctggtggagcggcggggcctgcaggagcaccagaggggccgcaccctgaccatggtgtccctgggctgcggctttgtgggccctgtggtgggcggctggtacaaggtgctggaccgcttcatccctggcaccaccaaggtggatgccctgaagaagatgctgctggaccagggcggctttgccccctgcttcctgggctgcttcctgcccctggtgggcgccctgaatggcctgagcgcccaggacaactgggccaagctgcagagggactacccagatgccctgatcaccaactactacgtgggccgctgccccatgtgctgctgctacctggagctgctgcctgtgctggagggcaccagcgccctgagcctgccccacagcatcgtgtccaccctgcagtag

SEQ ID NO: 160302 - DNA, 342 bp, synthetic construct
  misc_feature 1..342: note = Description of Artificial Sequence: Synthetic coding sequence
  source 1..342: mol_type = other DNA
atggccctgtggagggcctaccagagggccctggccgcccacccctggaaggtgcaggtgctgacagctggcagcctgatgggcctgggggacatcatcagccagcagctggtggagcggcggggcctgcaggagcaccagaggggccgcaccctgaccatggtgtccctgggctgcggctttgtggactacccagatgccctgatcaccaactactacctgtggccagctgtgcagctggccaacttctacctggtgcccctgcactaccgcctggccgtggtgcagtgtgtggccgtcatctggaacagctacctgtcctggaaggcccaccggctgtag

SEQ ID NO: 160303 - DNA, 576 bp, synthetic construct
  misc_feature 1..576: note = Description of Artificial Sequence: Synthetic coding sequence
  source 1..576: mol_type = other DNA
atggccctgtggagggcctaccagagggccctggccgcccacccctggaaggtgcaggtgctgacagctgcccacccccggcgctgcccagacaacacctgtgtgccctgcatcggcagcctgatgggcctgggggacatcatcagccagcagctggtggagcggcggggcctgcaggagcaccagaggggccgcaccctgaccatggtgtccctgggctgcggctttgtgggccctgtggtgggcggctggtacaaggtgctggaccgcttcatccctggcaccaccaaggtggatgccctgaagaagatgctgctggaccagggcggctttgccccctgcttcctgggctgcttcctgcccctggtgggcgccctgaatggcctgagcgcccaggacaactgggccaagctgcagagggactacccagatgccctgatcaccaactactacctgtggccagctgtgcagctggccaacttctacctggtgcccctgcactaccgcctggccgtggtgcagtgtgtggccgtcatctggaacagctacctgtcctggaaggcccaccggctgtag

SEQ ID NO: 160304 - DNA, 348 bp, synthetic construct
  misc_feature 1..348: note = Description of Artificial Sequence: Synthetic coding sequence
  source 1..348: mol_type = other DNA
atgggcctgggggacatcatcagccagcagctggtggagcggcggggcctgcaggagcaccagaggggccgcaccctgaccatggtgtccctgggctgcggctttgtgggccctgtggtgggcggctggtacaaggtgctggaccgcttcatccctggcaccaccaaggtggatgccctgaagaagatgctgctggaccagggcggctttgccccctgcttcctgggctgcttcctgcccctggtgggcgccctgaatggcctgagcgcccaggacaactgggccaagctgcagagggactacccagatgccctgatcaccaactactacctgtggccagctgtgtag

SEQ ID NO: 160305 - DNA, 366 bp, synthetic construct
  misc_feature 1..366: note = Description of Artificial Sequence: Synthetic coding sequence
  source 1..366: mol_type = other DNA
tgaagcctgatgggcctgggggacatcatcagccagcagctggtggagcggcggggcctgcaggagcaccagaggggccgcaccctgaccatggtgtccctgggctgcggctttgtgggccctgtggtgggcggctggtacaaggtgctggaccgcttcatccctggcaccaccaaggtggatgccctgaagaagatgctgctggaccaggactacccagatgccctgatcaccaactactacctgtggccagctgtgcagctggccaacttctacctggtgcccctgcactaccgcctggccgtggtgcagtgtgtggccgtcatctggaacagctacctgtcctggaaggcccaccggctgtag

SEQ ID NO: 160306 - DNA, 204 bp, synthetic construct
  misc_feature 1..204: note = Description of Artificial Sequence: Synthetic coding sequence
  source 1..204: mol_type = other DNA
tgagacagccagggcaagaagacaggcttcaccggcatcaagaagggggactacccagatgccctgatcaccaactactacctgtggccagctgtgcagctggccaacttctacctggtgcccctgcactaccgcctggccgtggtgcagtgtgtggccgtcatctggaacagctacctgtcctggaaggcccaccggctgtag

SEQ ID NO: 160307 - DNA, 912 bp, synthetic construct
  misc_feature 1..912: note = Description of Artificial Sequence: Synthetic coding sequence
  source 1..912: mol_type = other DNA
atggccccagctgctgacatgaccagcctgcccctgggcgtgaaggtggaggacagcgccttcggcaagccagctgggggcggggccggccaggcccccagcgctgctgctgccacagctgctgccatgggcgcagatgaggagggcgccaagcccaaggtgagccccagcctgctgcccttctctgtggaggccctgatggctgaccacaggaagccaggggccaaggagagcgccctggcccccagcgagggcgtgcaggccgccggcggcagcgcccagcccctgggcgtgcccccaggcagcctgggcgccccagatgcccccagcagcccccggcccctgggccacttctctgtgggcggcctgctgaagctgcctgaagatgccctggtgaaggccgagagccctgagaagccagagaggaccccctggatgcagagcccccgcttcagccccccaccagcccggcggctgagccccccagcctgcaccctgaggaagcacaagaccaacaggaagcccaggacccccttcaccacagcccagctgctggccctggagaggaagttccggcagaagcagtacctgagcattgctgagagagctgagttcagcagcagcctgagcctgacagagacccaggtgaagatctggttccagaacagaagagccaaggccaagaggctgcaggaggccgagctggagaagctgaagatggccgccaagcccatgctgcccccagctgccttcggcctgtccttccccctgggcggccctgctgctgtggccgctgctgctggggccagcctgtatggagccagcggccccttccagagagctgccctgcctgtggcccctgtgggcctgtacacagcccacgtgggctacagcatgtaccacctgacctag

SEQ ID NO: 160308 - DNA, 804 bp, synthetic construct
  misc_feature 1..804: note = Description of Artificial Sequence: Synthetic coding sequence
  source 1..804: mol_type = other DNA
atggccagccccagcaaaggaaatgacctcttctccccagatgaggagggccctgctgtggtggccggccctggccctggccctgggggcgctgagggcgctgctgaggagcggcgggtgaaggtgagcagcctgcccttctctgtggaggccctgatgtctgacaagaagccacccaaggaggccagccccctgcctgctgagagcgccagcgctggggccaccctgcggcccctgctgctgagcggccacggggcccgggaggcccacagccctggccccctggtgaagccctttgaaacagcctctgtgaagtcagaaaattctgaagatggagctgcctggatgcaggagcccggccgctacagccccccacccaggcacatgagccccaccacctgcaccctgaggaagcacaagaccaacaggaagcccaggacccccttcaccaccagccagctgctggccctggagaggaagttccggcagaagcagtacctgagcattgctgagagagctgagttcagcagcagcctgaacctgacagagacccaggtgaagatctggttccagaacagaagagccaaggccaagaggctgcaggaggccgagctggagaagctgaagatggccgccaagcccatgctgcccagcagcttcagcctgcccttccccatcagcagccccctgcaggccgccagcatctacggggccagctaccccttccacaggcctgtgctgcccatcccccctgtgggcctgtatgccacccctgtgggctacggcatgtaccacctgtcctag

SEQ ID NO: 160309 - DNA, 981 bp, synthetic construct
  misc_feature 1..981: note = Description of Artificial Sequence: Synthetic coding sequence
  source 1..981: mol_type = other DNA
atgaacaccagccctggcaccgtgggcagtgaccccgtcatcctggccacagctggctatgaccacacagtgcgcttctggcaggcccacagcggcatctgcaccaggacagtgcagcaccaggacagccaggtgaatgccctggaggtgaccccagaccgctccatgattgctgctgctggctaccagcacatccgcatgtatgacctgaacagcaacaaccccaaccccatcatctcctatgatggagtgaacaagaacatcgcctctgtgggcttccatgaagatggccgctggatgtacacaggaggagaggactgcacagcccgcatctgggacctgcggagcaggaacctgcagtgccagaggatcttccaggtgaatgcccccatcaactgtgtgtgcctgcaccccaaccaggccgagctgattgtgggggaccagagcggggccatccacatctgggacctgaagacagaccacaatgagcagctgatccctgagcctgaggtgtccatcaccagcgcccacatcgaccctgatgccagctacatggctgctgtgaacagcactggaaactgctacgtgtggaacctgaccggcggcattggagatgaggtgacccagctgatccccaagaccaagatcccagcccacaccaggtatgccctgcagtgccgcttctccccagacagcaccctgctggccacctgcagcgctgaccagacctgcaagatctggaggaccagcaacttcagcctgatgacagagctgagcatcaagagcggcaaccctggagagagcagccggggctggatgtggggctgtgccttcagcggggacagccagtacatcgtgacagccagcagtgacaacctggcccggctgtggtgtgtggagactggagagatcaagcgggagtatggaggccaccagaaggctgtggtgtgcctggccttcaatgattctgtgctgggctag

SEQ ID NO: 160310 - DNA, 981 bp, synthetic construct; identical to SEQ ID NO: 160309
  misc_feature 1..981: note = Description of Artificial Sequence: Synthetic coding sequence
  source 1..981: mol_type = other DNA

SEQ ID NO: 160311 - DNA, 984 bp, synthetic construct
  misc_feature 1..984: note = Description of Artificial Sequence: Synthetic coding sequence
  source 1..984: mol_type = other DNA
atgaacaccagccctggcaccgtgggcagtgaccccgtcatcctggccacagctggctatgaccacacagtgcgcttctggcaggcccacagcggcatctgcaccaggacagtgcagcaccaggacagccaggtgaatgccctggaggtgaccccagaccgctccatgattgctgctgctggctaccagcacatccgcatgtatgacctgaacagcaacaaccccaaccccatcatctcctatgatggagtgaacaagaacatcgcctctgtgggcttccatgaagatggccgctggatgtacacaggaggagaggactgcacagcccgcatctgggacctgcggagcaggaacctgcagtgccagaggatcttccaggtgaatgcccccatcaactgtgtgtgcctgcaccccaaccaggccgagctgattgtgggggaccagagcggggccatccacatctgggacctgaagacagaccacaatgagcagctgatccctgagcctgaggtgtccatcaccagcgcccacatcgaccctgatgccagctacatggctgctgtgaacagcactggaaactgctacgtgtggaacctgaccggcggcattggagatgaggtgacccagctgatccccaagaccaagatcccagcccacaccaggtatgccctgcagtgccgcttctccccagacagcaccctgctggccacctgcagcgctgaccagacctgcaagatctggaggaccagcaacttcagcctgatgacagagctgagcatcaagagcggcaaccctggagagagcagccggggctggatgtggggctgtgccttcagcggggacagccagtacatcgtgactggagagccccggcccggcctgccccacccctggcccccagccctggccagccgggccagccccccccggctgcagctgcccctgtgctggggccgcctgctgggcctgcacctgcggagctag

SEQ ID NO: 160312 - DNA, 654 bp, synthetic construct
  misc_feature 1..654: note = Description of Artificial Sequence: Synthetic coding sequence
  source 1..654: mol_type = other DNA
atggagcacgccccctggagccctggggccagcagccgggcccgggccggccacaccatgaacaccagccctggcaccgtgggcagtgaccctgtgatcctggccacagctggctatgaccacacagtgcgcttctggcaggcccacagcggcatctgcaccaggacagtgcagcaccaggacagccaggtgaatgccctggaggtgaccccagaccgctccatgattgctgctgctggctaccagcacatccgcatgtatgacctgaacagcaacaaccccaaccccatcatctcctatgatggagtgaacaagaacatcgcctctgtgggcttccatgaagatggccgctggatgtacacaggaggagaggactgcacagcccgcatctgggacctgcggagcaggaacctgcagtgccagaggatcttccaggtgaatgcccccatcaactgtgtgtgcctgcaccccaaccaggccgagctgattgtgggggaccagagcggggccatccacatctgggacctgaagacagaccacaatgagcagctgatccctgagcctgaggtgtccatcaccagcgcccacattgatcctgatgccagctacatggctgctgtgaacagcacagcccccaggcacctgctgggctag

SEQ ID NO: 160313 - DNA, 981 bp, synthetic construct; identical to SEQ ID NO: 160309
  misc_feature 1..981: note = Description of Artificial Sequence: Synthetic coding sequence
  source 1..981: mol_type = other DNA

SEQ ID NO: 160314 - DNA, 981 bp, synthetic construct; identical to SEQ ID NO: 160309
  misc_feature 1..981: note = Description of Artificial Sequence: Synthetic coding sequence
  source 1..981: mol_type = other DNA

SEQ ID NO: 160315 - DNA, 1473 bp, synthetic construct
  misc_feature 1..1473: note = Description of Artificial Sequence: Synthetic coding sequence
  source 1..1473: mol_type = other DNA
atggcccagagagctgtgtggctgatcagccatgagcccggcacccccctgtgtggcaccgtgcgcttcagccgccgctaccccaccgtggagaagagggcccgggtcttcaacggggccagctatgtgcctgtgcctgaagatggccccttcctgaaggccctgctgtttgagctgcggctgctggatgatgacaaggactttgtggagagccgggacagctgcagccgcatcaacaagaccagcatctacggcctgctgattggaggagaggagctgtggcctgtggtggccttcctgaagaatgacatgatctatgcctgtgtgcccctggtggagcagaccctgagcccccggcccccactcatctctgtgtctggagtgtcccagggctttgagttcctgtttggcatccaggacttcctgtacagcggccagaagaatgacagcgagctgaacaccaagctgagccagctgcctgacctgctgctgcaggcctgccccttcggcaccctgctggatgccaacctgcagaacagcctggacaacaccaactttgcctctgtgacccagccccagaagcagcctgcctggaagacaggcacctacaagggcaagccccaggtgtccatcagcatcacagagaaggtgaagtccatgcagtatgacaagcagggcattgctgacacctggcaggtggtgggcaccgtgacctgcaagtgtgacctggagggcatcatgcccaacgtgaccatcagcctgagcctgcccaccaacggcagccccctgcaggacatcctggtgcacccctgtgtgaccagcctggacagcgccatcctgaccagcagcagcattgatgccatggatgattctgccttcagcggcccctacaagttccccttcaccccacccctggagagcttcaacctgtgcttctacaccagccaggtgcctgtgccccccatcctgggcttctaccagatgaaggaggaggaggtgcagctgcgcatcaccatcaacctgaagctgcacgagagcgtgaagaacaactttgagttctgtgaggcccacatccccttctacaacagaggccccatcacccacctggagtacaagaccagctttggccagctggaggtgttccgggagaagagcctgctgatctggatcatcggccagaagttccccaagtccatggagatcagcctgagcggcaccgtgacctttggagccaagagccatgagaagcagccctttgaccccatctgcaccggggagacagcctacctgaagctgcacttccgcatcctggactacaccctgaccggctgctacgccgaccagcacagcgtgcaggtgtttgccagcggcaagcccaagatcagcgcccacaggaagctgatcagcagtgactactacatctggaacagcaaggccccagcccctgtgacctacggcagcctgctgctgtag

SEQ ID NO: 160316 - DNA, 16437 bp, synthetic construct
  misc_feature 1..16437: note = Description of Artificial Sequence: Synthetic coding sequence
  source 1..16437: mol_type = other DNA
atgctggtgatctggatcctgaccctggccctgcggctgtgtgcctctgtgaccaccgtgaccccagagggcagcgctgtgcacaaggccatcagccagcagggcaccctgtggacaggagaggtgctggagaagcagacagtggagcagggcaagagcaccctgcggcggcagaagaaccacttccacaggtctgctggggagctgcgctgcagaaatgccctgaaggatgaaggagccagcgctggctggagcgtgatgtttgctggggagagcgtggtggtgctggtgcacctgtggatgaccggggcccgggtgaagaacctgggcctggtggagtttgccagccctggagatgatggagatggccgggcagagggcttcagcctgggcctgcccctgtctgagcaggcccgggctgctggggcccgggagaaggagcggcaggagaccgtcatcaaccacagcaccttcagcggcttcagccagatcaccggcagcacagtgaacaccagcattggaggcaacaccaccagcgccagcacccccagcagcagtgaccccttcaccaccttcagtgactatggagtgtctgtgaccttcatcaccggcagcacagccaccaagcacttcctggacagcagcaccaacagcggccacagcgaggagagcacagtgagccacagcggccctggggccaccggcaccaccctcttccccagccacagcgccacctctgtgtttgtgggggagcccaagaccagccccatcaccagcgcctccatggagaccacagccctgcccggcagcaccaccacagctggcctgtctgagaagagcaccaccttctacagcagccccaggagcccagacaggaccctgagccctgcccggaccaccagcagcggcgtgtctgagaagagcaccaccagccacagcaggcctggccccacccacaccatcgccttcccagacagcaccaccatgcctggggtgtcccaggagagcacagccagccacagcatccctggcagcacagacaccaccctgagccctggcaccaccacccccagcagcctgggccctgagagcaccaccttccacagcagccctggctacaccaagaccacccggctgcctgacaacaccaccaccagcggcctgctggaggccagcacccctgtgcacagcagcacaggcagcccccacaccaccctgagccccagcagcagcaccacccatgaaggagagcccaccaccttccagagctggcccagcagcaaggacaccagccctgcccccagcggcaccaccagcgcctttgtgaagctgagcaccacctaccacagcagccccagcagcacccccaccacccacttcagcgccagcagcaccaccctgggccacagcgaggagagcacccctgtgcacagcagccctgtggccacagccaccaccccacctccagcccggagcgccaccagcggccacgtggaggagagcacagcctaccacaggagccctggcagcacccagaccatgcacttccctgagagcagcaccaccagcggccacagcgaggagagcgccaccttccacggcagcaccacccacaccaagagcagcacccccagcaccacagctgccctggcccacaccagctaccacagcagcctgggcagcacagagaccacccacttccgggacagcagcaccatcagcggccgctctgaggagagcaaggccagccacagcagcccagatgccatggccaccaccgtgctgcctgctggcagcacccccagcgtgctggtgggggacagcacccccagccccatcagcagcggctccatggagaccacagccctgcccggcagcaccaccaagccaggcctgtctgagaagagcaccaccttctacagcagccccaggagcccagacaccacccacctgcctgcctccatgaccagcagcggcgtgtctgaggagagcaccaccagccacagcaggcctggcagcacccacaccacagccttccctggcagcaccaccatgcctggcctgagccaggagagcacagccagccacagcagccctggccccacagacaccaccctgagccctggcagcaccacagccagcagcctgggccctgagtacaccaccttccacagcaggcctggcagcacagagaccaccctgctgcctgacaacaccacagccagcggcctgctggaggcctccatgcctgtgcacagcagcaccaggagcccccacaccaccctgagccctgctggcagcaccacccggcagggcgagagcaccaccttccacagctggcccagcagcaaggacaccaggcctgccccacccaccaccaccagcgcctttgtggagcccagcaccaccagccacggcagccccagcagcatccccaccacccacatcagcgcccggagcaccaccagcggcctggtggaggagagcaccacctaccacagcagccctggcagcacccagaccatgcacttccctgagagtgacaccaccagcggccgcggggaggagagcaccaccagccacagcagcaccacccacaccatcagcagcgcccccagcaccaccagcgccctggtggaggagcccaccagctaccacagcagccctggcagcacagccaccacccacttcccagacagcagcaccaccagcggccgctctgaggagagcacagccagccacagcagccaggatgccaccggcaccatcgtgctgcctgcccggagcaccacctctgtgctgctgggggagagcaccaccagccccatcagcagcggctccatggagaccacagccctgcccggcagcaccaccaccccaggcctgtctgagaggagcaccaccttccacagcagccccaggagccctgccaccaccctgagccctgccagcaccaccagcagcggcgtgtctgaggagagcaccaccagccgcagcaggcctggcagcacccacaccacagccttcccagacagcaccaccaccccaggcctgagccgccacagcaccaccagccacagcagccctggcagcacagacaccaccctgctgcctgccagcaccaccaccagcggccccagccaggagagcaccaccagccacagcagcagcggcagcacagacacagccctgagccctggcagcaccacagccctgagctttggccaggagagcaccaccttccacagcaaccctggcagcacccacaccaccctcttcccagacagcaccaccagcagcggcatcgtggaggccagcaccagggtgcacagcagcacaggcagccccaggaccaccctgagccctgccagcagcaccagccctggcctgcagggcgagagcacagccttccagacccacccagccagcacccacaccacccccagcccccccagcacagccacagcccctgtggaggagagcaccacctaccacaggagccctggcagcacccccaccacccacttccctgccagcagcaccaccagcggccacagcgagaagagcaccatcttccacagcagcccagatgccagcggcaccacccccagcagcgcccacagcaccaccagcggccgcggggagagcaccaccagccgcatcagccctggcagcacagagatcaccaccctgcccggcagcaccaccaccccaggcctgtctgaggccagcaccaccttctacagcagccccaggagccccaccaccaccctgagccctgcctccatgaccagcctgggcgtgggggaggagagcaccaccagccgcagccagcccggcagcacccacagcacagtgtccccagccagcaccaccaccccaggcctgtctgaggagagcaccaccgtgtacagcagcagccggggcagcacagagaccaccgtcttcccccacagcaccaccacctctgtgcatggagaggagcccaccaccttccacagcaggcctgccagcacccacaccaccctcttcacagaggacagcaccaccagcggcctgacagaggagagcacagccttccctggcagccctgccagcacccagacaggcctgcctgccaccctgaccacagctgacctgggggaggagagcaccaccttccccagcagcagcggcagcacaggcaccaagctgagccctgcccggagcaccaccagcggcctggtgggggagagcacccccagccggctgagccccagcagcacagagaccaccaccctgcccggcagccccaccacccccagcctgtctgagaagagcaccaccttctacaccagccccaggagcccagatgccaccctgagccctgccaccaccaccagcagcggcgtgtctgaggagagcagcaccagccacagccagcccggcagcacccacaccacagccttcccagacagcaccaccaccagtgacctgagccaggagcccaccaccagccacagcagccagggcagcacagaggccaccctgagccctggcagcaccacagccagcagcctgggccagcagagcaccaccttccacagcagccctggggacacagagaccaccctgctgcctgatgacaccatcaccagcggcctggtggaggccagcacccccacccacagcagcacaggcagcctgcacaccaccctgaccccagccagcagcaccagcgctggcctgcaggaggagagcaccaccttccagagctggcccagcagcagtgacaccacccccagccccccaggcaccacagctgcccctgtggaggtgtccaccacctaccacagccggcccagcagcacccccaccacccacttcagcgccagcagcaccaccctgggccgctctgaggagagcaccaccgtgcacagcagccctggggccactggaacagccctcttccccaccaggtctgccacctctgtgctggtgggggagcccaccaccagccccatcagcagcggcagcacagagaccacagccctgcccggcagcaccaccacagctggcctgtctgagaagagcaccaccttctacagcagccccaggagcccagacaccaccctgagccctgccagcaccaccagcagtggagtgtctgaggagagcaccaccagccacagccggcccggcagcacccacaccacagccttccctggcagcaccaccatgcctggggtgtcccaggagagcacagccagccacagcagccctggcagcacagacaccaccctgagccctggcagcaccacagccagcagcctgggccctgagagcaccaccttccacagcagccctggcagcacagagaccaccctgctgcctgacaacaccacagccagcggcctgctggaggccagcacccctgtgcacagcagcacaggcagcccccacaccaccctgagccctgctggcagcaccacccggcagggcgagagcaccaccttccagagctggcccagcagcaaggacaccatgcctgccccacccaccaccaccagcgcctttgtggagctgagcaccaccagccacggcagccccagcagcacccccaccacccacttcagcgccagcagcaccaccctgggccgctctgaggagagcaccaccgtgcacagcagccctgtggccacagccaccacccccagccctgcccggagcaccaccagcggcctggtggaggagagcacagcctaccacagcagccctggcagcacccagaccatgcacttccctgagagcagcacagccagcggccgctctgaggagagcaggaccagccacagcagcaccacccacaccatcagcagcccccccagcaccaccagcgccctggtggaggagcccaccagctaccacagcagccctggcagcacagccaccacccacttcccagacagcagcaccaccagcggccgctctgaggagagcacagccagccacagcagccaggatgccaccggcaccatcgtgctgcctgcccggagcaccacctctgtgctgctgggggagagcaccaccagccccatcagcagcggctccatggagaccacagccctgcccggcagcaccaccaccccaggcctgtctgagaagagcaccaccttccacagcagccccaggagccctgccaccaccctgagccctgccagcaccaccagcagtggagtgtctgaggagagcaccaccagccacagccggcccggcagcacccacaccacagccttcccagacagcaccaccaccccaggcctgagccgccacagcaccaccagccacagcagccctggcagcacagacaccaccctgctgcctgccagcaccaccaccagcggccccagccaggagagcaccaccagccacagcagccctggcagcacagacacagccctgagccctggcagcaccacagccctgagctttggccaggagagcaccaccttccacagcagccctggcagcacccacaccaccctcttcccagacagcaccaccagcagcggcatcgtggaggccagcaccagggtgcacagcagcacaggcagccccaggaccaccctgagccctgccagcagcaccagccctggcctgcagggcgagagcacagccttccagacccacccagccagcacccacaccacccccagcccccccagcacagccacagcccctgtggaggagagcaccacctaccacaggagccctggcagcacccccaccacccacttccctgccagcagcaccaccagcggccacagcgagaagagcaccatcttccacagcagcccagatgccagcggcaccacccccagcagcgcccacagcaccaccagcggccgcggggagagcaccaccagccgcatcagccctggcagcacagagatcaccaccctgcccggcagcaccaccaccccaggcctgtctgaggccagcaccaccttctacagcagccccaggagccccaccaccaccctgagccctgcctccatgaccagcctgggcgtgggggaggagagcaccaccagccgcagccagcccggcagcacccacagcacagtgtccccagccagcaccaccaccccaggcctgtctgaggagagcaccaccgtgtacagcagcagccctggcagcacagagaccaccgtcttccccaggacccccaccacctctgtgcggggggaggagcccaccaccttccacagcaggcctgccagcacccacaccaccctcttcacagaggacagcaccaccagcggcctgacagaggagagcacagccttccctggcagccctgccagcacccagacaggcctgcctgccaccctgaccacagctgacctgggggaggagagcaccaccttccccagcagcagcggcagcacaggcaccaccctgagccctgcccggagcaccaccagcggcctggtgggggagagcacccccagccggctgagccccagcagcacagagaccaccaccctgcccggcagccccaccacccccagcctgtctgagaagagcaccaccttctacaccagccccaggagcccagatgccaccctgagccctgccaccaccaccagcagtggagtgtctgaggagagcagcaccagccacagccagcccggcagcacccacaccacagccttcccagacagcaccaccaccccaggcctgagccgccacagcaccaccagccacagcagccctggcagcacagacaccaccctgctgcctgccagcaccaccaccagcggccccagccaggagagcaccaccagccacagcagccctggcagcacagacacagccctgagccctggcagcaccacagccctgagctttggccaggagagcaccaccttccacagcagccctggcagcacccacaccaccctcttcccagacagcaccaccagcagcggcatcgtggaggccagcaccagggtgcacagcagcacaggcagccccaggaccaccctgagccctgccagcagcaccagccctggcctgcagggcgagagcaccaccttccagacccacccagccagcacccacaccacccccagcccccccagcacagccacagcccctgtggaggagagcaccacctaccacaggagccctggcagcacccccaccacccacttccctgccagcagcaccaccagcggccacagcgagaagagcaccatcttccacagcagcccagatgccagcggcaccacccccagcagcgcccacagcaccaccagcggccgcggggagagcaccaccagccgcatcagccctggcagcacagagatcaccaccctgcccggcagcaccaccaccccaggcctgtctgaggccagcaccaccttctacagcagccccaggagccccaccaccaccctgagccctgcctccatgaccagcctgggcgtgggggaggagagcaccaccagccgcagccagcccggcagcacccacagcacagtgtccccagccagcaccaccaccccaggcctgtctgaggagagcaccaccgtgtacagcagcagccctggcagcacagagaccaccgtcttccccaggagcaccaccacctctgtgcggggggaggagcccaccaccttccacagcaggcctgccagcacccacaccaccctcttcacagaggacagcaccaccagcggcctgacagaggagagcacagccttccctggcagccctgccagcacccagacaggcctgcctgccaccctgaccacagctgacctgggggaggagagcaccaccttccccagcagcagcggcagcacaggcaccaccctgagccctgcccggagcaccaccagcggcctggtgggggagagcacccccagccggctgagccccagcagcacagagaccaccaccctgcccggcagccccaccacccccagcctgtctgagaagagcaccaccttctacaccagccccaggagcccagatgccaccctgagccctgccaccaccaccagcagtggagtgtctgaggagagcagcaccagccacagccagcccggcagcacccacaccacagccttcccagacagcaccaccaccagcggcctgagccaggagcccacagccagccacagcagccagggcagcacagaggccaccctgagccctggcagcaccacagccagcagcctgggccagcagagcaccaccttccacagcagccctggggacacagagaccaccctgctgcctgatgacaccatcaccagcggcctggtggaggccagcacccccacccacagcagcacaggcagcctgcacaccaccctgaccccagccagcagcaccagcgctggcctgcaggaggagagcaccaccttccagagctggcccagcagcagtgacaccacccccagccccccaggcaccacagctgcccctgtggaggtgtccaccacctaccacagccggcccagcagcacccccaccacccacttcagcgccagcagcaccaccctgggccgctctgaggagagcaccaccgtgcacagcagccctggggccaccggcacagccctcttccccaccaggtctgccacctctgtgctggtgggggagcccaccaccagccccatcagcagcggcagcacagagaccacagccctgcccggcagcaccaccacagctggcctgtctgagaagagcaccaccttctacagcagccccaggagcccagacaccaccctgagccctgccagcaccaccagcagcggcgtgtctgaggagagcaccaccagccacagcaggcctggcagcacccacaccacagccttccctggcagcaccaccatgcctggggtgtcccaggagagcacagccagccacagcagccctggcagcacagacaccaccctgagccctggcagcaccacagccagcagcctgggccctgagagcaccaccttccacagcggccctggcagcacagagaccaccctgctgcctgacaacaccacagccagcggcctgctggaggccagcacccctgtgcacagcagcacaggcagcccccacaccaccctgagccctgctggcagcaccacccggcagggcgagagcaccaccttccagagctggcccaacagcaaggacaccaccccagccccacccaccaccaccagcgcctttgtggagctgagcaccaccagccacggcagccccagcagcacccccaccacccacttcagcgccagcagcaccaccctgggccgctctgaggagagcaccaccgtgcacagcagccctgtggccacagccaccacccccagccctgcccggagcaccaccagcggcctggtggaggagagcaccacctaccacagcagccctggcagcacccagaccatgcacttccctgagagtgacaccaccagcggccgcggggaggagagcaccaccagccacagcagcaccacccacaccatcagcagcgcccccagcaccaccagcgccctggtggaggagcccaccagctaccacagcagccctggcagcacagccaccacccacttcccagacagcagcaccaccagcggccgctctgaggagagcacagccagccacagcagccaggatgccaccggcaccatcgtgctgcctgcccggagcaccacctctgtgctgctgggggagagcaccaccagccccatcagcagcggctccatggagaccacagccctgcccggcagcaccaccaccccaggcctgtctgagaagagcaccaccttccacagcagccccaggagccctgccaccaccctgagccctgccagcaccaccagcagcggcgtgtctgaggagagcaccaccagccacagcaggcctggcagcacccacaccacagccttcccagacagcaccaccaccccaggcctgagccgccacagcaccaccagccacagcagccctggcagcacagacaccaccctgctgcctgccagcaccaccaccagcggcagcagccaggagagcaccaccagccacagcagcagcggcagcacagacacagccctgagccctggcagcaccacagccctgagctttggccaggagagcaccaccttccacagcagccctggcagcacccacaccaccctcttcccagacagcaccaccagcagcggcatcgtggaggccagcaccagggtgcacagcagcacaggcagccccaggaccaccctgagccctgccagcagcaccagccctggcctgcagggcgagagcacagccttccagacccacccagccagcacccacaccacccccagcccccccagcacagccacagcccctgtggaggagagcaccacctaccacaggagccctggcagcacccccaccacccacttccctgccagcagcaccaccagcggccacagcgagaagagcaccatcttccacagcagcccagatgccagcggcaccacccccagcagcgcccacagcaccaccagcggccgcggggagagcaccaccagccgcatcagccctggcagcacagagatcaccaccctgcccggcagcaccaccaccccaggcctgtctgaggccagcaccaccttctacagcagccccaggagccccaccaccaccctgagccctgcctccatgaccagcctgggcgtgggggaggagagcaccaccagccgcagccagcccggcagcacccacagcacagtgtccccagccagcaccaccaccccaggcctgtctgaggagagcaccaccgtgtacagcagcagccctggcagcacagagaccaccgtcttccccaggagcaccaccacctctgtgagaagagaggagcccaccaccttccacagcaggcctgccagcacccacaccaccctcttcacagaggacagcaccaccagcggcctgacagaggagagcacagccttccctggcagccctgccagcacccagacaggcctgcctgccaccctgaccacagctgacctgggggaggagagcaccaccttccccagcagcagcggcagcacaggcaccaagctgagccctgcccggagcaccaccagcggcctggtgggggagagcacccccagccggctgagccccagcagcacagagaccaccaccctgcccggcagccccaccacccccagcctgtctgagaagagcaccaccttctacaccagccccaggagcccagatgccaccctgagccctgccaccaccaccagcagcggcgtgtctgaggagagcagcaccagccacagccagcccggcagcacccacaccacagccttcccagacagcaccaccaccagcggcctgagccaggagcccaccaccagccacagcagccagggcagcacagaggccaccctgagccctggcagcaccacagccagcagcctgggccagcagagcaccaccttccacagcagccctggggacacagagaccaccctgctgcctgatgacaccatcaccagcggcctggtggaggccagcacccccacccacagcagcacaggcagcctgcacaccaccctgaccccagccagcagcaccagcacaggcctgcaggaggagagcaccaccttccagagctggcccagcagcagtgacaccacccccagcccccccagcaccacagctgtgcctgtggaggtgtccaccacctaccacagccggcccagcagcacccccaccacccacttcagcgccagcagcaccaccctgggccgctctgaggagagcaccaccgtgcacagcagccctggggccactggaacagccctcttccccaccaggtctgccacctctgtgctggtgggggagcccaccaccagccccatcagcagcggcagcacagagaccacagccctgcccggcagcaccaccacagctggcctgtctgagaagagcaccaccttctacagcagccccaggagcccagacaccaccctgagccctgccagcaccaccagcagtggagtgtctgaggagagcaccaccagccacagccggcccggctccatgcacaccacagccttccccagcagcaccaccatgcctggggtgtcccaggagagcacagccagccacagcagccctggcagcacagacaccaccctgagccctggcagcaccacagccagcagcctgggccctgagagcaccaccttccacagcagccctggcagcacagagaccaccctgctgcctgacaacaccacagccagcggcctgctggaggccagcacccctgtgcacagcagcacaggcagcccccacaccaccctgagccctgctggcagcaccacccggcagggcgagagcaccaccttccagagctggcccaacagcaaggacaccaccccagccccacccaccaccaccagcgcctttgtggagctgagcaccaccagccacggcagccccagcagcacccccaccacccacttcagcgccagcagcaccaccctgggccgctctgaggagagcaccaccgtgcacagcagccctgtggccacagccaccacccccagccctgcccggagcaccaccagcggcctggtggaggagagcaccacctaccacagcagccctggcagcacccagaccatgcacttccctgagagcaacaccaccagcggccgcggggaggagagcaccaccagccacagcagcaccacccacaccatcagcagcgcccccagcaccaccagcgccctggtggaggagcccaccagctaccacagcagccctggcagcacagccaccacccacttcccagacagcagcaccaccagcggccgctctgaggagagcacagccagccacagcagccaggatgccaccggcaccatcgtgctgcctgcccggagcaccacctctgtgctgctgggggagagcaccaccagccccatcagcagcggctccatggagaccacagccctgcccggcagcaccaccaccccaggcctgtctgagaagagcaccaccttccacagcagccccagcagcacccccaccacccacttcagcgccagcagcaccaccctgggccgctctgaggagagcaccaccgtgcacagcagccctgtggccacagccaccacccccagccctgcccggagcaccaccagcggcctggtggaggagagcacagcctaccacagcagccctggcagcacccagaccatgcacttccctgagagcagcacagccagcggccgctctgaggagagcaggaccagccacagcagcaccacccacaccatcagcagcccccccagcaccaccagcgccctggtggaggagcccaccagctaccacagcagccctggcagcatcgccaccacccacttccctgagagcagcaccaccagcggccgctctgaggagagcacagccagccacagcagcccagacaccaacggcatcacccccctgcctgcccacttcaccaccagcggcagaattgctgagagcaccaccttctacatcagccctggctccatggagaccaccctggccagcacagccaccaccccaggcctgagcgccaagagcaccatcctgtacagcagcagccgcagcccagaccagaccctgagccctgcctccatgaccagcagcagcatcagcggggagcccaccagcctgtacagccaggccgagagcacccacaccacagccttccctgccagcaccaccaccagcggcctgagccaggagagcaccaccttccacagcaagccaggcagcacagagaccaccctgagccctggcagcatcaccaccagcagctttgcccaggagttcaccaccccccacagccagcccggcagcgccctgagcacagtgtccccagccagcaccaccgtgcccggcctgtctgaggagagcaccaccttctacagcagccctggcagcacagagaccacagccttcagccacagcaacaccatgagcatccacagccagcagagcacccccttcccagacagccctggcttcacccacacagtgctgcctgccaccctgaccaccacagacatcggccaggagagcacagccttccacagcagcagtgatgccaccggcaccacccccctgcctgcccggagcacagccagtgacctggtgggggagcccaccaccttctacatcagccccagccccacctacaccaccctcttccctgccagcagcagcaccagcggcctgacagaggagagcaccaccttccacaccagccccagcttcaccagcaccatcgtgtccacagagagcctggagaccctggcccctggcctgtgccaggagggccagatctggaatggcaagcagtgtgtgtgcccccagggctacgtgggctaccagtgcctgagccccctggagagcttccctgtggagaccccagagaagctgaatgccaccctgggcatgacagtgaaggtgacctacagaaacttcacagagaagatgaatgatgccagcagccaggagtaccagaacttcagcaccctcttcaagaacaggatggatgtggtgctgaagggggacaacctgccccagtaccggggcgtgaacatccggcggctgctgaatggcagcatcgtggtgaagaatgatgtgatcctggaggccgactacaccctggagtatgaggagctgtttgagaacctggccgagatcgtgaaggccaagatcatgaatgagaccaggaccaccctgctggaccctgacagctgcaggaaggccatcctgtgctacagcgaggaggacacctttgtggacagctctgtgaccccaggctttgacttccaggagcagtgcacccagaaggctgctgagggctacacccagttctactacgtggatgtgctggatggcaagctggcctgtgtgaacaagtgcaccaagggcaccaagagccagatgaactgcaacctgggcacctgccagctgcagaggagcggcccccgctgcctgtgccccaacaccaacacccactggtactggggcgagacctgtgagttcaacatcgccaagagcctggtgtatggcatcgtgggcgctgtgatggctgtgctgctgctggccctgatcatcctgatcatcctcttcagcctgagccagaggaagaggcaccgggagcagtatgatgtgccccaggagtggaggaaggagggcaccccaggcatcttccagaagacagccatctgggaggaccagaacctgcgggagagccgcttcggcctggagaatgcctacaacaacttccggcccaccctggagaccgtggacagcggcacagagctgcacatccagaggcctgagatggtggccagcacagtgtag

SEQ ID NO: 160317 - DNA, 16008 bp, synthetic construct
  misc_feature 1..16008: note = Description of Artificial Sequence: Synthetic coding sequence
  source 1..16008: mol_type = other DNA
atgctggtgatctggatcctgaccctggccctgcggctgtgtgcctctgtgaccaccgtgaccccaggcagcacagtgaacaccagcatcggcggcaacaccaccagcgccagcacccccagcagcagtgaccccttcaccaccttcagtgactatggagtgtctgtgaccttcatcaccggcagcacagccaccaagcacttcctggacagcagcaccaacagcggccacagcgaggagagcacagtgagccacagcggccctggggccaccggcaccaccctcttccccagccacagcgccacctctgtgtttgtgggggagcccaagaccagccccatcaccagcgcctccatggagaccacagccctgcccggcagcaccaccacagctggcctgtctgagaagagcaccaccttctacagcagccccaggagcccagacaggaccctgagccctgcccggaccaccagcagtggagtgtctgagaagagcaccaccagccacagccggcccggccccacccacaccatcgccttcccagacagcaccaccatgcctggggtgtcccaggagagcacagccagccacagcatccctggcagcacagacaccaccctgagccctggcaccaccacccccagcagcctgggccctgagagcaccaccttccacagcagccctggctacaccaagaccacccggctgcctgacaacaccaccaccagcggcctgctggaggccagcacccctgtgcacagcagcacaggcagcccccacaccaccctgagccccagcagcagcaccacccatgaaggagagcccaccaccttccagagctggcccagcagcaaggacaccagccctgcccccagcggcaccaccagcgcctttgtgaagctgagcaccacctaccacagcagccccagcagcacccccaccacccacttcagcgccagcagcaccaccctgggccacagcgaggagagcacccctgtgcacagcagccctgtggccacagccaccaccccacctccagcccggagcgccaccagcggccacgtggaggagagcacagcctaccacaggagccctggcagcacccagaccatgcacttccctgagagcagcaccaccagcggccacagcgaggagagcgccaccttccacggcagcaccacccacaccaagagcagcacccccagcaccacagctgccctggcccacaccagctaccacagcagcctgggcagcacagagaccacccacttccgggacagcagcaccatcagcggccgctctgaggagagcaaggccagccacagcagcccagatgccatggccaccaccgtgctgcctgctggcagcaccccatctgtgctggtgggggacagcacccccagccccatcagcagcggctccatggagaccacagccctgcccggcagcaccaccaagccaggcctgtctgagaagagcaccaccttctacagcagccccaggagcccagacaccacccacctgcctgcctccatgaccagcagtggagtgtctgaggagagcaccaccagccacagccggcccggcagcacccacaccacagccttccctggcagcaccaccatgcctggcctgagccaggagagcacagccagccacagcagccctggccccacagacaccaccctgagccctggcagcaccacagccagcagcctgggccctgagtacaccaccttccacagccggcccggcagcacagagaccaccctgctgcctgacaacaccacagccagcggcctgctggaggcctccatgcctgtgcacagcagcaccaggagcccccacaccaccctgagccctgctggcagcaccacccggcagggcgagagcaccaccttccacagctggcccagcagcaaggacaccaggcctgccccacccaccaccaccagcgcctttgtggagcccagcaccaccagccacggcagccccagcagcatccccaccacccacatcagcgcccggagcaccaccagcggcctggtggaggagagcaccacctaccacagcagccctggcagcacccagaccatgcacttccctgagagtgacaccaccagcggccgcggggaggagagcaccaccagccacagcagcaccacccacaccatcagcagcgcccccagcaccaccagcgccctggtggaggagcccaccagctaccacagcagccctggcagcacagccaccacccacttcccagacagcagcaccaccagcggccgctctgaggagagcacagccagccacagcagccaggatgccaccggcaccatcgtgctgcctgcccggagcaccacctctgtgctgctgggggagagcaccaccagccccatcagcagcggctccatggagaccacagccctgcccggcagcaccaccaccccaggcctgtctgagaggagcaccaccttccacagcagccccaggagccctgccaccaccctgagccctgccagcaccaccagcagtggagtgtctgaggagagcaccaccagccgcagccggcccggcagcacccacaccacagccttcccagacagcaccaccaccccaggcctgagccgccacagcaccaccagccacagcagccctggcagcacagacaccaccctgctgcctgccagcaccaccaccagcggccccagccaggagagcaccaccagccacagcagcagcggcagcacagacacagccctgagccctggcagcaccacagccctgagctttggccaggagagcaccaccttccacagcaaccctggcagcacccacaccaccctcttcccagacagcaccaccagcagcggcatcgtggaggccagcaccagggtgcacagcagcacaggcagccccaggaccaccctgagccctgccagcagcaccagccctggcctgcagggcgagagcacagccttccagacccacccagccagcacccacaccacccccagcccccccagcacagccacagcccctgtggaggagagcaccacctaccacaggagccctggcagcacccccaccacccacttccctgccagcagcaccaccagcggccacagcgagaagagcaccatcttccacagcagcccagatgccagcggcaccacccccagcagcgcccacagcaccaccagcggccgcggggagagcaccaccagccgcatcagccctggcagcacagagatcaccaccctgcccggcagcaccaccaccccaggcctgtctgaggccagcaccaccttctacagcagccccaggagccccaccaccaccctgagccctgcctccatgaccagcctgggcgtgggggaggagagcaccaccagccgcagccagcccggcagcacccacagcacagtgtccccagccagcaccaccaccccaggcctgtctgaggagagcaccaccgtgtacagcagcagccggggcagcacagagaccaccgtcttcccccacagcaccaccacctctgtgcacggggaggagcccaccaccttccacagcaggcctgccagcacccacaccaccctcttcacagaggacagcaccaccagcggcctgacagaggagagcacagccttccctggcagccctgccagcacccagacaggcctgcctgccaccctgaccacagctgacctgggggaggagagcaccaccttccccagcagcagcggcagcacaggcaccaagctgagccctgcccggagcaccaccagcggcctggtgggggagagcacccccagccggctgagccccagcagcacagagaccaccaccctgcccggcagccccaccacccccagcctgtctgagaagagcaccaccttctacaccagccccaggagcccagatgccaccctgagccctgccaccaccaccagcagtggagtgtctgaggagagcagcaccagccacagccagcccggcagcacccacaccacagccttcccagacagcaccaccaccagtgacctgagccaggagcccaccaccagccacagcagccagggcagcacagaggccaccctgagccctggcagcaccacagccagcagcctgggccagcagagcaccaccttccacagcagccctggggacacagagaccaccctgctgcctgatgacaccatcaccagcggcctggtggaggccagcacccccacccacagcagcacaggcagcctgcacaccaccctgaccccagccagcagcaccagcgctggcctgcaggaggagagcaccaccttccagagctggcccagcagcagtgacaccacccccagccccccaggcaccacagctgcccctgtggaggtgtccaccacctaccacagccggcccagcagcacccccaccacccacttcagcgccagcagcaccaccctgggccgctctgaggagagcaccaccgtgcacagcagccctggggccaccggcacagccctcttccccaccaggtctgccacctctgtgctggtgggggagcccaccaccagccccatcagcagcggcagcacagagaccacagccctgcccggcagcaccaccacagctggcctgtctgagaagagcaccaccttctacagcagccccaggagcccagacaccaccctgagccctgccagcaccaccagcagcggcgtgtctgaggagagcaccaccagccacagcaggcctggcagcacccacaccacagccttccctggcagcaccaccatgcctggggtgtcccaggagagcacagccagccacagcagccctggcagcacagacaccaccctgagccctggcagcaccacagccagcagcctgggccctgagagcaccaccttccacagcagccctggcagcacagagaccaccctgctgcctgacaacaccacagccagcggcctgctggaggccagcacccctgtgcacagcagcacaggcagcccccacaccaccctgagccctgctggcagcaccacccggcagggcgagagcaccaccttccagagctggcccagcagcaaggacaccatgcctgccccacccaccaccaccagcgcctttgtggagctgagcaccaccagccacggcagccccagcagcacccccaccacccacttcagcgccagcagcaccaccctgggccgctctgaggagagcaccaccgtgcacagcagccctgtggccacagccaccacccccagccctgcccggagcaccaccagcggcctggtggaggagagcacagcctaccacagcagccctggcagcacccagaccatgcacttccctgagagcagcacagccagcggccgctctgaggagagcaggaccagccacagcagcaccacccacaccatcagcagcccccccagcaccaccagcgccctggtggaggagcccaccagctaccacagcagccctggcagcacagccaccacccacttcccagacagcagcaccaccagcggccgctctgaggagagcacagccagccacagcagccaggatgccaccggcaccatcgtgctgcctgcccggagcaccacctctgtgctgctgggggagagcaccaccagccccatcagcagcggctccatggagaccacagccctgcccggcagcaccaccaccccaggcctgtctgagaagagcaccaccttccacagcagccccaggagccctgccaccaccctgagccctgccagcaccaccagcagcggcgtgtctgaggagagcaccaccagccacagcaggcctggcagcacccacaccacagccttcccagacagcaccaccaccccaggcctgagccgccacagcaccaccagccacagcagccctggcagcacagacaccaccctgctgcctgccagcaccaccaccagcggccccagccaggagagcaccaccagccacagcagccctggcagcacagacacagccctgagccctggcagcaccacagccctgagctttggccaggagagcaccaccttccacagcagccctggcagcacccacaccaccctcttcccagacagcaccaccagcagcggcatcgtggaggccagcaccagggtgcacagcagcacaggcagccccaggaccaccctgagccctgccagcagcaccagccctggcctgcagggcgagagcacagccttccagacccacccagccagcacccacaccacccccagcccccccagcacagccacagcccctgtggaggagagcaccacctaccacaggagccctggcagcacccccaccacccacttccctgccagcagcaccaccagcggccacagcgagaagagcaccatcttccacagcagcccagatgccagcggcaccacccccagcagcgcccacagcaccaccagcggccgcggggagagcaccaccagccgcatcagccctggcagcacagagatcaccaccctgcccggcagcaccaccaccccaggcctgtctgaggccagcaccaccttctacagcagccccaggagccccaccaccaccctgagccctgcctccatgaccagcctgggcgtgggggaggagagcaccaccagccgcagccagcccggcagcacccacagcacagtgtccccagccagcaccaccaccccaggcctgtctgaggagagcaccaccgtgtacagcagcagccctggcagcacagagaccaccgtcttccccaggacccccaccacctctgtgcggggggaggagcccaccaccttccacagcaggcctgccagcacccacaccaccctcttcacagaggacagcaccaccagcggcctgacagaggagagcacagccttccctggcagccctgccagcacccagacaggcctgcctgccaccctgaccacagctgacctgggggaggagagcaccaccttccccagcagcagcggcagcacaggcaccaccctgagccctgcccggagcaccaccagcggcctggtgggggagagcacccccagccggctgagccccagcagcacagagaccaccaccctgcccggcagccccaccacccccagcctgtctgagaagagcaccaccttctacaccagccccaggagcccagatgccaccctgagccctgccaccaccaccagcagcggcgtgtctgaggagagcagcaccagccacagccagcccggcagcacccacaccacagccttcccagacagcaccaccaccccaggcctgagccgccacagcaccaccagccacagcagccctggcagcacagacaccaccctgctgcctgccagcaccaccaccagcggccccagccaggagagcaccaccagccacagcagccctggcagcacagacacagccctgagccctggcagcaccacagccctgagctttggccaggagagcaccaccttccacagcagccctggcagcacccacaccaccctcttcccagacagcaccaccagcagcggcatcgtggaggccagcaccagggtgcacagcagcacaggcagccccaggaccaccctgagccctgccagcagcaccagccctggcctgcagggcgagagcaccaccttccagacccacccagccagcacccacaccacccccagcccccccagcacagccacagcccctgtggaggagagcaccacctaccacaggagccctggcagcacccccaccacccacttccctgccagcagcaccaccagcggccacagcgagaagagcaccatcttccacagcagcccagatgccagcggcaccacccccagcagcgcccacagcaccaccagcggccgcggggagagcaccaccagccgcatcagccctggcagcacagagatcaccaccctgcccggcagcaccaccaccccaggcctgtctgaggccagcaccaccttctacagcagccccaggagccccaccaccaccctgagccctgcctccatgaccagcctgggcgtgggggaggagagcaccaccagccgcagccagcccggcagcacccacagcacagtgtccccagccagcaccaccaccccaggcctgtctgaggagagcaccaccgtgtacagcagcagccctggcagcacagagaccaccgtcttccccaggagcaccaccacctctgtgcggggggaggagcccaccaccttccacagcaggcctgccagcacccacaccaccctcttcacagaggacagcaccaccagcggcctgacagaggagagcacagccttccctggcagccctgccagcacccagacaggcctgcctgccaccctgaccacagctgacctgggggaggagagcaccaccttccccagcagcagcggcagcacaggcaccaccctgagccctgcccggagcaccaccagcggcctggtgggggagagcacccccagccggctgagccccagcagcacagagaccaccaccctgcccggcagccccaccacccccagcctgtctgagaagagcaccaccttctacaccagccccaggagcccagatgccaccctgagccctgccaccaccaccagcagcggcgtgtctgaggagagcagcaccagccacagccagcccggcagcacccacaccacagccttcccagacagcaccaccaccagcggcctgagccaggagcccacagccagccacagcagccagggcagcacagaggccaccctgagccctggcagcaccacagccagcagcctgggccagcagagcaccaccttccacagcagccctggggacacagagaccaccctgctgcctgatgacaccatcaccagcggcctggtggaggccagcacccccacccacagcagcacaggcagcctgcacaccaccctgaccccagccagcagcaccagcgctggcctgcaggaggagagcaccaccttccagagctggcccagcagcagtgacaccacccccagccccccaggcaccacagctgcccctgtggaggtgtccaccacctaccacagccggcccagcagcacccccaccacccacttcagcgccagcagcaccaccctgggccgctctgaggagagcaccaccgtgcacagcagccctggggccactggaacagccctcttccccaccaggtctgccacctctgtgctggtgggggagcccaccaccagccccatcagcagcggcagcacagagaccacagccctgcccggcagcaccaccacagctggcctgtctgagaagagcaccaccttctacagcagccccaggagcccagacaccaccctgagccctgccagcaccaccagcagtggagtgtctgaggagagcaccaccagccacagccggcccggcagcacccacaccacagccttccctggcagcaccaccatgcctggggtgtcccaggagagcacagccagccacagcagccctggcagcacagacaccaccctgagccctggcagcaccacagccagcagcctgggccctgagagcaccaccttccacagcggccctggcagcacagagaccaccctgctgcctgacaacaccacagccagcggcctgctggaggccagcacccctgtgcacagcagcacaggcagcccccacaccaccctgagccctgctggcagcaccacccggcagggcgagagcaccaccttccagagctggcccaacagcaaggacaccaccccagccccacccaccaccaccagcgcctttgtggagctgagcaccaccagccacggcagccccagcagcacccccaccacccacttcagcgccagcagcaccaccctgggccgctctgaggagagcaccaccgtgcacagcagccctgtggccacagccaccacccccagccctgcccggagcaccaccagcggcctggtggaggagagcaccacctaccacagcagccctggcagcacccagaccatgcacttccctgagagtgacaccaccagcggccgcggggaggagagcaccaccagccacagcagcaccacccacaccatcagcagcgcccccagcaccaccagcgccctggtggaggagcccaccagctaccacagcagccctggcagcacagccaccacccacttcccagacagcagcaccaccagcggccgctctgaggagagcacagccagccacagcagccaggatgccaccggcaccatcgtgctgcctgcccggagcaccacctctgtgctgctgggggagagcaccaccagccccatcagcagcggctccatggagaccacagccctgcccggcagcaccaccaccccaggcctgtctgagaagagcaccaccttccacagcagccccaggagccctgccaccaccctgagccctgccagcaccaccagcagtggagtgtctgaggagagcaccaccagccacagccggcccggcagcacccacaccacagccttcccagacagcaccaccaccccaggcctgagccgccacagcaccaccagccacagcagccctggcagcacagacaccaccctgctgcctgccagcaccaccaccagcggcagcagccaggagagcaccaccagccacagcagcagcggcagcacagacacagccctgagccctggcagcaccacagccctgagctttggccaggagagcaccaccttccacagcagccctggcagcacccacaccaccctcttcccagacagcaccaccagcagcggcatcgtggaggccagcaccagggtgcacagcagcacaggcagccccaggaccaccctgagccctgccagcagcaccagccctggcctgcagggcgagagcacagccttccagacccacccagccagcacccacaccacccccagcccccccagcacagccacagcccctgtggaggagagcaccacctaccacaggagccctggcagcacccccaccacccacttccctgccagcagcaccaccagcggccacagcgagaagagcaccatcttccacagcagcccagatgccagcggcaccacccccagcagcgcccacagcaccaccagcggccgcggggagagcaccaccagccgcatcagccctggcagcacagagatcaccaccctgcccggcagcaccaccaccccaggcctgtctgaggccagcaccaccttctacagcagccccaggagccccaccaccaccctgagccctgcctccatgaccagcctgggcgtgggggaggagagcaccaccagccgcagccagcccggcagcacccacagcacagtgtccccagccagcaccaccaccccaggcctgtctgaggagagcaccaccgtgtacagcagcagccctggcagcacagagaccaccgtcttccccaggagcaccaccacctctgtgcggcgggaggagcccaccaccttccacagcaggcctgccagcacccacaccaccctcttcacagaggacagcaccaccagcggcctgacagaggagagcacagccttccctggcagccctgccagcacccagacaggcctgcctgccaccctgaccacagctgacctgggggaggagagcaccaccttccccagcagcagcggcagcacaggcaccaagctgagccctgcccggagcaccaccagcggcctggtgggggagagcacccccagccggctgagccccagcagcacagagaccaccaccctgcccggcagccccaccacccccagcctgtctgagaagagcaccaccttctacaccagccccaggagcccagatgccaccctgagccctgccaccaccaccagcagtggagtgtctgaggagagcagcaccagccacagccagcccggcagcacccacaccacagccttcccagacagcaccaccaccagcggcctgagccaggagcccaccaccagccacagcagccagggcagcacagaggccaccctgagccctggcagcaccacagccagcagcctgggccagcagagcaccaccttccacagcagccctggggacacagagaccaccctgctgcctgatgacaccatcaccagcggcctggtggaggccagcacccccacccacagcagcacaggcagcctgcacaccaccctgaccccagccagcagcaccagcacaggcctgcaggaggagagcaccaccttccagagctggcccagcagcagtgacaccacccccagcccccccagcaccacagctgtgcctgtggaggtgtccaccacctaccacagccggcccagcagcacccccaccacccacttcagcgccagcagcaccaccctgggccgctctgaggagagcaccaccgtgcacagcagccctggggccaccggcacagccctcttccccaccaggtctgccacctctgtgctggtgggggagcccaccaccagccccatcagcagcggcagcacagagaccacagccctgcccggcagcaccaccacagctggcctgtctgagaagagcaccaccttctacagcagccccaggagcccagacaccaccctgagccctgccagcaccaccagcagcggcgtgtctgaggagagcaccaccagccacagcaggcctggctccatgcacaccacagccttccccagcagcaccaccatgcctggggtgtcccaggagagcacagccagccacagcagccctggcagcacagacaccaccctgagccctggcagcaccacagccagcagcctgggccctgagagcaccaccttccacagcagccctggcagcacagagaccaccctgctgcctgacaacaccacagccagcggcctgctggaggccagcacccctgtgcacagcagcacaggcagcccccacaccaccctgagccctgctggcagcaccacccggcagggcgagagcaccaccttccagagctggcccaacagcaaggacaccaccccagccccacccaccaccaccagcgcctttgtggagctgagcaccaccagccacggcagccccagcagcacccccaccacccacttcagcgccagcagcaccaccctgggccgctctgaggagagcaccaccgtgcacagcagccctgtggccacagccaccacccccagccctgcccggagcaccaccagcggcctggtggaggagagcaccacctaccacagcagccctggcagcacccagaccatgcacttccctgagagcaacaccaccagcggccgcggggaggagagcaccaccagccacagcagcaccacccacaccatcagcagcgcccccagcaccaccagcgccctggtggaggagcccaccagctaccacagcagccctggcagcacagccaccacccacttcccagacagcagcaccaccagcggccgctctgaggagagcacagccagccacagcagccaggatgccaccggcaccatcgtgctgcctgcccggagcaccacctctgtgctgctgggggagagcaccaccagccccatcagcagcggctccatggagaccacagccctgcccggcagcaccaccaccccaggcctgtctgagaagagcaccaccttccacagcagccccagcagcacccccaccacccacttcagcgccagcagcaccaccctgggccgctctgaggagagcaccaccgtgcacagcagccctgtggccacagccaccacccccagccctgcccggagcaccaccagcggcctggtggaggagagcacagcctaccacagcagccctggcagcacccagaccatgcacttccctgagagcagcacagccagcggccgctctgaggagagcaggaccagccacagcagcaccacccacaccatcagcagcccccccagcaccaccagcgccctggtggaggagcccaccagctaccacagcagccctggcagcatcgccaccacccacttccctgagagcagcaccaccagcggccgctctgaggagagcacagccagccacagcagcccagacaccaacggcatcacccccctgcctgcccacttcaccaccagcggcagaattgctgagagcaccaccttctacatcagccctggctccatggagaccaccctggccagcacagccaccaccccaggcctgagcgccaagagcaccatcctgtacagcagcagccgcagcccagaccagaccctgagccctgcctccatgaccagcagcagcatctctggagagcccaccagcctgtacagccaggccgagagcacccacaccacagccttccctgccagcaccaccaccagcggcctgagccaggagagcaccaccttccacagcaagccaggcagcacagagaccaccctgagccctggcagcatcaccaccagcagctttgcccaggagttcaccaccccccacagccagcccggcagcgccctgagcacagtgtccccagccagcaccaccgtgcccggcctgtctgaggagagcaccaccttctacagcagccctggcagcacagagaccacagccttcagccacagcaacaccatgagcatccacagccagcagagcacccccttcccagacagccctggcttcacccacacagtgctgcctgccaccctgaccaccacagacatcggccaggagagcacagccttccacagcagcagtgatgccaccggcaccacccccctgcctgcccggagcacagccagtgacctggtgggggagcccaccaccttctacatcagccccagccccacctacaccaccctcttccctgccagcagcagcaccagcggcctgacagaggagagcaccaccttccacaccagccccagcttcaccagcaccatcgtgtccacagagagcctggagaccctggcccctggcctgtgccaggagggccagatctggaatggcaagcagtgtgtgtgcccccagggctacgtgggctaccagtgcctgagccccctggagagcttccctgtggagaccccagagaagctgaatgccaccctgggcatgacagtgaaggtgacctacagaaacttcacagagaagatgaatgatgccagcagccaggagtaccagaacttcagcaccctcttcaagaacaggatggatgtggtgctgaagggggacaacctgccccagtacagaggagtgaacatccggcggctgctgaatggcagcatcgtggtgaagaatgatgtgatcctggaggccgactacaccctggagtatgaggagctgtttgagaacctggccgagatcgtgaaggccaagatcatgaatgagaccaggaccaccctgctggaccctgacagctgcaggaaggccatcctgtgctacagcgaggaggacacctttgtggacagctctgtgaccccaggctttgacttccaggagcagtgcacccagaaggctgctgagggctacacccagttctactacgtggatgtgctggatggcaagctggcctgtgtgaacaagtgcaccaagggcaccaagagccagatgaactgcaacctgggcacctgccagctgcagaggagcggcccccgctgcctgtgccccaacaccaacacccactggtactggggcgagacctgtgagttcaacatcgccaagagcctggtgtatggaattgtgggcgctgtgatggctgtgctgctgctggccctgatcatcctgatcatcctcttcagcctgagccagaggaagaggcaccgggagcagtatgatgtgccccaggagtggaggaaggagggcaccccaggcatcttccagaagacagccatctgggaggaccagaacctgcgggagagcagatttggcctggagaatgcctacaacaacttccggcccaccctggagaccgtggacagcggcacagagctgcacatccagaggcctgagatggtggccagcacagtgtag

SEQ ID NO: 160318 - DNA, 1536 bp, synthetic construct
  misc_feature 1..1536: note = Description of Artificial Sequence: Synthetic coding sequence
  source 1..1536: mol_type = other DNA
atgaaggccatcatccacctgaccctgctggccctgctgtctgtgaacacagccaccaaccagggcaacagcgcagatgctgtgaccaccacagaaacagccaccagcggccccaccgtggccgctgctgacaccacagagaccaacttccctgagacagccagcaccacagccaacacccccttccccacagccaccagccctgccccacccatcatcagcacccacagcagcagcaccatccccaccccagccccacccatcatcagcacccacagcagcagcaccatccccatccccacagctgctgacagcgagagcaccaccaacgtgaacagcctggccaccagtgacatcatcacagccagcagccccaatgatggcctcatcaccatggtgcccagcgagacccagagcaacaatgagatgagccccaccacagaggacaaccagagcagcggccccccaactggaacagccctgctggagaccagcaccctgaacagcacaggccccagcaacccctgccaggatgacccctgtgccgacaacagcctgtgtgtgaagctgcacaacaccagcttctgcctgtgcctggagggctactactacaacagcagcacctgcaagaagggcaaggtgtttcctgggaagatctctgtgacagtgtctgagacctttgatcctgaggagaagcacagcatggcctaccaggacctgcacagcgagatcaccagcctcttcaaggatgtgtttggcacctctgtgtatggccagaccgtcatcctgactgtgtccaccagcctgagccccaggtctgagatgagagcagatgacaagtttgtgaatgtgaccatcgtgaccatcctggccgagaccaccagtgacaatgagaagacagtgacagagaagatcaacaaggccatccgcagcagcagcagcaacttcctgaactatgacctgaccctgcgctgtgactactacggctgcaaccagacagcagatgactgcctgaatggcctggcctgtgactgcaagagtgacctgcagaggcccaacccccagagccccttctgtgtggccagcagcctgaagtgcccagatgcctgcaatgcccagcacaagcagtgcctgatcaagaagagcggcggggccccagaatgtgcctgtgtgcccggctaccaggaggatgccaatggaaactgccagaagtgtgccttcggctacagcggcctggactgcaaggacaagttccagctgatcctgaccatcgtgggcaccatcgccggcatcgtcatcctgtccatgatcatcgccctgattgtgacagcccggagcaacaacaagaccaagcacatcgaggaggagaacctgattgatgaggacttccagaacctgaagctgcggagcacaggcttcaccaacctgggcgctgagggctctgtgttccccaaggtgcgcatcacagccagccgggacagccagatgcagaacccctacagccgccacagctccatgcccaggccagactactag

SEQ ID NO: 160319 - DNA, 13482 bp, synthetic construct
  misc_feature 1..13482: note = Description of Artificial Sequence: Synthetic coding sequence
  source 1..13482: mol_type = other DNA
atgccccggcccggcaccatggccctgtgcctgctgaccctggtgctgagcctgctgcccccccaggccgctgctgagcaggacctgtctgtgaacagagctgtgtgggatggcggcggctgcatcagccagggagatgtgctgaaccggcagtgccagcagctgagccagcacgtgaggactggatctgctgccaacacagccaccggcaccaccagcaccaacgtggtggagcccaggatgtacctgagctgcagcaccaaccctgagatgaccagcattgagagctctgtgaccagtgacaccccaggagtgagcagcaccaggatgacccccacagagagcaggaccaccagcgagagcaccagtgacagcaccaccctcttccccagcagcacagaggacaccagcagccccaccaccccagagggcacagatgtgcccatgagcaccccatctgaggagagcatcagcagcaccatggcctttgtgtccacagcccccctgcccagctttgaggcctacaccagcctgacctacaaggtggacatgagcacccccctgaccaccagcacccaggccagcagcagccccaccaccccagagagcaccaccatccccaagagcaccaacagcgagggcagcacccccctgacctccatgcctgccagcaccatgaaggtggccagcagcgaggccatcaccctgctgaccacccctgtggagatcagcacccctgtgaccatcagcgcccaggccagcagcagccccaccacagctgagggccccagcctgagcaacagcgcccccagcggcggcagcacccccctgaccaggatgcccctgtctgtgatgctggtggtgagcagcgaggccagcaccctgagcaccaccccagctgccaccaacatccctgtgatcaccagcacagaggccagcagcagccccaccacagctgagggcaccagcatccccaccagcacctacacagagggcagcacccccctgaccagcaccccagccagcaccatgcctgtggccaccagcgagatgagcaccctgagcatcacccctgtggacaccagcaccctggtgaccaccagcacagagcccagcagcctgcccaccacagctgaggccacctccatgctgaccagcaccctgtctgagggcagcacccccctgaccaacatgcctgtgtccaccatcctggtggccagcagcgaggccagcaccaccagcaccatccctgtggacagcaagacctttgtgaccacagccagcgaggccagcagcagccccaccacagctgaggacaccagcatcgccaccagcacccccagcgagggcagcacccccctgacctccatgcctgtgtccaccacccctgtggccagcagcgaggccagcaacctgagcaccacccctgtggacagcaagacccaggtgaccaccagcacagaggccagcagcagccccccaacagctgaggtgaacagcatgcccaccagcaccccatctgagggcagcacccccctgacctccatgtctgtgtccaccatgcctgtggccagcagcgaggccagcaccctgagcaccacccctgtggacaccagcacccctgtgaccaccagcagcgaggccagcagcagcagcaccaccccagagggcaccagcatccccaccagcacccccagcgagggcagcacccccctgaccaacatgcctgtgtccacccggctggtggtgtcctctgaggccagcaccaccagcaccaccccagctgacagcaacacctttgtgaccaccagcagcgaggccagcagcagcagcaccacagctgagggcacctccatgcccaccagcacctacagcgagcggggcaccaccatcacctccatgtctgtgtccaccaccctggtggccagcagcgaggccagcaccctgagcaccacccctgtggacagcaacacccctgtgaccaccagcacagaggccaccagcagcagcaccacagctgagggcacctccatgcccaccagcacctacacagagggcagcacccccctgacctccatgcctgtgaacaccaccctggtggccagcagcgaggccagcaccctgagcaccacccctgtggacaccagcacccctgtgaccaccagcacagaggccagcagcagccccaccacagcagatggagcctccatgcccaccagcaccccatctgagggcagcacccccctgacctccatgcctgtgtccaagaccctgctgaccagcagcgaggccagcaccctgagcaccacccccctggacaccagcacccacatcaccaccagcacagaggccagctgcagccccaccaccacagagggcacctccatgcccatcagcacccccagcgagggcagccccctgctgaccagcatccctgtgtccatcacccctgtgaccagccctgaggccagcaccctgagcaccacccctgtggacagcaacagccctgtgaccaccagcacagaggtgagcagcagccccaccccagctgagggcacctccatgcccaccagcacctacagcgagggccgcacccccctgacctccatgcctgtgtccaccaccctggtggccaccagcgccatcagcaccctgagcaccacccctgtggacaccagcacccctgtgaccaacagcacagaggcccggagcagccccaccaccagcgagggcacctccatgcccaccagcaccccaggagagggcagcacccccctgacctccatgccagacagcaccacccctgtggtgtcctctgaggcccggaccctgagcgccacccctgtggacaccagcacccctgtgaccaccagcacagaggccaccagcagccccaccacagctgagggcaccagcatccccaccagcaccccatctgagggcaccacccccctgaccagcacccctgtgagccacaccctggtggccaacagcgaggccagcaccctgagcaccacccctgtggacagcaacacccccctgaccaccagcacagaggccagcagccccccacccacagctgagggcacctccatgcccaccagcacccccagcgagggcagcacccccctgaccaggatgcctgtgtccaccaccatggtggccagcagcgagaccagcaccctgagcaccaccccagctgacaccagcacccctgtgaccacctacagccaggccagcagcagcagcaccacagcagatggcacctccatgcccaccagcacctacagcgagggcagcacccccctgacctctgtgcctgtgtccacccggctggtggtgagcagcgaggccagcaccctgagcaccacccctgtggacaccagcatccctgtgaccaccagcacagaggccagcagcagccccaccacagctgagggcaccagcatccccaccagcccccccagcgagggcaccacccccctggcctccatgcctgtgtccaccaccctggtggtgtcctctgaggccaacaccctgagcaccacccctgtggacagcaagacccaggtggccaccagcacagaggccagcagccccccacccacagctgaggtgacctccatgcccaccagcaccccaggagagaggagcacccccctgacctccatgcctgtgcgccacacccctgtggccagcagcgaggccagcaccctgagcaccagccctgtggacaccagcacccctgtgaccaccagcgctgagaccagcagcagccccaccacagctgagggcaccagcctgcccaccagcaccaccagcgagggcagcaccctgctgaccagcatccctgtgtccaccaccctggtgaccagccctgaggccagcaccctgctgaccacccctgtggacaccaagggccctgtggtgaccagcaatgaggtgagcagcagccccaccccagctgagggcacctccatgcccaccagcacctacagcgagggccgcacccccctgaccagcatccctgtgaacaccaccctggtggccagcagcgccatcagcatcctgagcaccacccctgtggacaacagcacccctgtgaccaccagcacagaggcctgcagcagccccaccaccagcgagggcacctccatgcccaacagcaaccccagcgagggcaccacccccctgaccagcatccctgtgtccaccacccctgtggtgtcctctgaggccagcaccctgagcgccacccctgtggacaccagcaccccaggcaccaccagcgctgaggccaccagcagccccaccacagctgagggcatcagcatccccaccagcaccccatctgagggcaagacccccctgaagagcatccctgtgagcaacacccctgtggccaacagcgaggccagcaccctgagcaccacccctgtggacagcaacagccctgtggtgaccagcacagctgtgagcagcagccccaccccagctgagggcaccagcatcgccatcagcacccccagcgagggcagcacagccctgaccagcatccctgtgtccaccaccaccgtggccagcagcgagatcaacagcctgagcaccaccccagctgtgaccagcacccctgtgaccacctacagccaggccagcagcagccccaccacagcagatggcacctccatgcagaccagcacctacagcgagggcagcacccccctgaccagcctgcctgtgtccaccatgctggtggtgagcagcgaggccaacaccctgagcaccacccccatcgacagcaagacccaggtgacagccagcacagaggccagcagcagcaccacagctgagggcagctccatgaccatcagcaccccatctgagggcagccccctgctgaccagcatccctgtgtccaccacccctgtggccagccctgaggccagcaccctgagcaccacccctgtggacagcaacagccctgtgatcaccagcacagaggtgagcagcagccccaccccagctgagggcacctccatgcccaccagcacctacacagagggccgcacccccctgaccagcatcaccgtgaggaccacccctgtggccagcagcgccatcagcaccctgagcaccacccctgtggacaacagcacccctgtgaccaccagcacagaggcccggagcagccccaccaccagcgagggcacctccatgcccaacagcaccccatctgagggcaccacccccctgaccagcatccctgtgtccaccacccctgtgctgagcagcgaggccagcaccctgagcgccacccccatcgacaccagcacccctgtgaccaccagcacagaggccaccagcagccccaccacagctgagggcaccagcatccccaccagcaccctgtctgagggcatgacccccctgaccagcacccctgtgagccacaccctggtggccaacagcgaggccagcaccctgagcaccacccctgtggacagcaacagccctgtggtgaccagcacagctgtgagcagcagccccaccccagctgagggcaccagcatcgccaccagcaccccatctgagggcagcacagccctgaccagcatccctgtgtccaccaccaccgtggccagcagcgagaccaacaccctgagcaccaccccagctgtgaccagcacccctgtgaccacctacgcccaggtgagcagcagccccaccacagcagatggcagctccatgcccaccagcaccccccgggagggccggccccccctgaccagcatccctgtgtccaccaccaccgtggccagcagcgagatcaacaccctgagcaccaccctggccgacaccaggacccctgtgaccacctacagccaggccagcagcagccccaccacagcagatggcacctccatgcccaccccagcctacagcgagggcagcacccccctgacctccatgcccctgagcaccaccctggtggtgagcagcgaggccagcaccctgagcaccacccctgtggacaccagcaccccagccaccaccagcacagagggcagcagcagccccaccacagctgggggcaccagcatccagaccagcacccccagcgagaggaccacccccctggccggcatgcctgtgtccaccaccctggtggtgtcctctgagggcaacaccctgagcaccacccctgtggacagcaagacccaggtgaccaacagcacagaggccagcagcagcgccacagctgagggcagctccatgaccatcagcgcccccagcgagggcagccccctgctgaccagcatccccctgagcaccacccctgtggccagccctgaggccagcaccctgagcaccacccctgtggacagcaacagccctgtgatcaccagcacagaggtgagcagcagccccatccccacagagggcacctccatgcagaccagcacctacagcgacaggaggacccccctgacctccatgcctgtgtccaccaccgtggtggccagcagcgccatcagcaccctgagcaccacccctgtggacaccagcacccctgtgaccaacagcacagaggcccggagcagccccaccaccagcgagggcacctccatgcccaccagcacccccagcgagggcagcacccccttcacctccatgcctgtgtccaccatgcctgtggtgaccagcgaggccagcaccctgagcgccacccctgtggacaccagcacccctgtgaccaccagcacagaggccaccagcagccccaccacagctgagggcaccagcatccccaccagcaccctgtctgagggcaccacccccctgaccagcatccctgtgagccacaccctggtggccaacagcgaggtgtccaccctgagcaccacccctgtggacagcaacacccccttcaccaccagcacagaggccagcagccccccacccacagctgagggcacctccatgcccaccagcaccagcagcgagggcaacacccccctgaccaggatgcctgtgtccaccaccatggtggccagctttgagaccagcaccctgagcaccaccccagctgacaccagcacccctgtgaccacctacagccaggccggcagcagccccaccacagcagatgacacctccatgcccaccagcacctacagcgagggcagcacccccctgacctctgtgcctgtgtccaccatgcctgtggtgagcagcgaggccagcacccacagcaccacccctgtggacaccagcacccctgtgaccaccagcacagaggccagcagcagccccaccacagctgagggcaccagcatccccaccagcccccccagcgagggcaccacccccctggcctccatgcctgtgtccaccacccctgtggtgtcctctgaggccggcaccctgagcaccacccctgtggacaccagcacccccatgaccaccagcacagaggccagcagcagccccaccacagcagaagatattgtggtgcccatcagcacagccagcgagggcagcaccctgctgaccagcatccctgtgtccaccacccctgtggccagccctgaggccagcaccctgagcaccacccctgtggacagcaacagccctgtggtgaccagcacagagatcagcagcagcgccaccagcgctgagggcacctccatgcccaccagcacctacagcgagggcagcacccccctgcgctccatgcctgtgtccaccaagcccctggccagcagcgaggccagcaccctgagcaccacccctgtggacaccagcatccctgtgaccaccagcacagagaccagcagcagccccaccacagccaaggacacctccatgcccatcagcaccccatctgaggtgtccaccagcctgaccagcatcctggtgtccaccatgcctgtggccagcagcgaggccagcaccctgagcaccacccctgtggacaccaggaccctggtgaccaccagcacaggcaccagcagcagccccaccacagctgagggcagctccatgcccaccagcaccccaggagagaggagcacccccctgaccaacatcctggtgtccaccaccctgctggccaacagcgaggccagcaccctgagcaccacccctgtggacaccagcacccctgtgaccaccagcgctgaggccagcagcagccccaccacagctgagggcacctccatgaggatcagcacccccagtgatggcagcacccccctgaccagcatcctggtgtccaccctgcctgtggccagcagcgaggccagcacagtgtccaccacagctgtggacaccagcatccctgtgaccaccagcacagaggccagcagcagccccaccacagctgaggtgacctccatgcccaccagcacccccagcgagaccagcacccccctgacctccatgcctgtgaaccacacccctgtggccagcagcgaggccggcaccctgagcaccacccctgtggacaccagcacccctgtgaccaccagcaccaaggccagcagcagccccaccacagctgagggcatcgtggtgcccatcagcacagccagcgagggcagcaccctgctgaccagcatccctgtgtccaccacccctgtggccagcagcgaggccagcaccctgagcaccacccctgtggacaccagcatccctgtgaccaccagcacagagggcagcagcagccccaccacagctgagggcacctccatgcccatcagcacccccagcgaggtgtccacccccctgaccagcatcctggtgtccacagtgcctgtggccggcagcgaggccagcaccctgagcaccacccctgtggacaccaggacccctgtgaccaccagcgctgaggccagcagcagccccaccacagctgagggcacctccatgcccatcagcaccccaggagagaggaggacccccctgacctccatgtctgtgtccaccatgcctgtggccagcagcgaggccagcaccctgagcaggaccccagctgacaccagcacccctgtgaccaccagcacagaggccagcagcagccccaccacagctgagggcaccggcatccccatcagcacccccagcgagggcagcacccccctgaccagcatccctgtgtccaccacccctgtggccatccctgaggccagcaccctgagcaccacccctgtggacagcaacagccctgtggtgaccagcacagaggtgagcagcagccccaccccagctgagggcacctccatgcccatcagcacctacagcgagggcagcacccccctgactggagtgcctgtgtccaccacccctgtgaccagcagcgccatcagcaccctgagcaccacccctgtggacaccagcacccctgtgaccaccagcacagaggcccacagcagccccaccaccagcgagggcacctccatgcccaccagcacccccagcgagggcagcacccccctgacctacatgcctgtgtccaccatgctggtggtgtcctctgaggacagcaccctgagcgccacccctgtggacaccagcacccctgtgaccaccagcacagaggccaccagcagcaccacagctgagggcaccagcatccccaccagcacccccagcgagggcatgacccccctgacctctgtgcctgtgagcaacacccctgtggccagcagcgaggccagcatcctgagcaccacccctgtggacagcaacacccccctgaccaccagcacagaggccagcagcagccccccaacagctgagggcacctccatgcccaccagcaccccatctgagggcagcacccccctgacctccatgcctgtgtccaccaccaccgtggccagcagcgagaccagcaccctgagcaccaccccagctgacaccagcacccctgtgaccacctacagccaggccagcagcagcccccccatcgcagatggcacctccatgcccaccagcacctacagcgagggcagcacccccctgaccaacatgtccttcagcaccacccctgtggtgtcctctgaggccagcaccctgagcaccacccctgtggacaccagcacccctgtgaccaccagcacagaggccagcctgagccccaccacagctgagggcaccagcatccccaccagcagccccagcgagggcaccacccccctggcctccatgcctgtgtccaccacccctgtggtgagcagcgaggtgaacaccctgagcaccacccctgtggacagcaacaccctggtgaccaccagcacagaggccagcagcagccccaccatcgccgagggcaccagcctgcccaccagcaccaccagcgagggcagcacccccctgagcatcatgcccctgagcaccacccctgtggccagcagcgaggccagcaccctgagcaccacccctgtggacaccagcacccctgtgaccaccagcagccccaccaacagcagccccaccacagctgaggtgacctccatgcccaccagcacagctggggagggcagcacccccctgaccaacatgcctgtgtccaccacccctgtggccagcagcgaggccagcaccctgagcaccacccctgtggacagcaacacctttgtgaccagcagcagccaggccagcagcagccctgccaccctgcaggtgaccaccatgaggatgagcacccccagcgagggcagcagcagcctgaccaccatgctgctgagcagcacctacgtgaccagcagcgaggccagcacccccagcacccccagcgtggacaggagcacccctgtgaccaccagcacccagagcaacagcacccccaccccacctgaggtgatcaccctgcccatgagcaccccatctgaggtgtccacccccctgaccatcatgcctgtgtccaccacctctgtgaccatcagcgaggccggcacagccagcaccctgcctgtggacaccagcacccctgtgatcaccagcacccaggtgagcagcagccctgtgaccccagagggcaccaccatgcccatctggacccccagcgagggcagcacccccctgaccaccatgcctgtgtccaccaccagggtgaccagcagcgagggcagcaccctgagcacccccagcgtggtgaccagcacccctgtgaccaccagcacagaggccatcagcagcagcgccaccctggacagcaccaccatgtctgtgtccatgcccatggagatcagcaccctgggcaccaccatcctggtgtccaccacccctgtgacccgcttccctgagagcagcacccccagcatccccagcgtgtacacctccatgtccatgaccacagccagcgagggcagcagcagccccaccaccctggagggcaccaccaccatgcccatgagcaccaccagcgagaggagcaccctgctgaccaccgtgctgatcagccccatctctgtgatgagccccagcgaggccagcaccctgagcaccccacctggggacaccagcacccccctgctgaccagcaccaaggccggcagcttcagcatcccagctgaggtgaccaccatccgcatcagcatcaccagcgagaggagcacccccctgaccaccctgctggtgtccaccaccctgcccaccagcttccctggggccagcatcgccagcaccccacccctggacaccagcaccaccttcacccccagcacagacacagccagcacccccaccatccctgtggccaccaccatctctgtgtctgtcatcacagagggcagcaccccaggcaccaccatcttcatccccagcacccctgtgaccagcagcacagcagatgtgtttcctgccaccaccggggctgtgtccacccctgtgatcaccagcacagagctgaacacccccagcaccagcagcagcagcaccaccaccagcttcagcaccaccaaggagttcaccaccccagccatgaccacagctgcccccctgacctacgtgaccatgagcacagcccccagcacccccaggaccaccagccggggctgcaccaccagcgccagcaccctgagcgccaccagcaccccccacaccagcacctctgtgaccaccaggcctgtgacccccagcagcgagagcagccggcccagcaccatcaccagccacaccatcccccccaccttccccccagcccacagcagcaccccacccaccaccagcgccagcagcaccaccgtgaaccctgaggccgtgaccaccatgaccaccaggaccaagcccagcaccaggaccaccagcttccccaccgtgaccaccacagctgtgcccaccaacaccaccatcaagagcaaccccaccagcacccccaccgtgcccaggaccaccacctgctttggagatggctgccagaacacagccagccgctgcaagaatggaggcacctgggatggcctgaagtgccagtgccccaacctgtactatggagagctgtgtgaggaggtggtgagcagcattgacatcggccccccagagaccatcagcgcccagatggagctgactgtgacagtgacctctgtgaagttcacagaggagctgaagaaccacagcagccaggagttccaggagttcaagcagaccttcacagagcagatgaacatcgtgtacagcggcatcccagaatatgtgggcgtgaacatcaccaagctgcggctgggctctgtggtggtggagcatgatgtgctgctgcggaccaagtacaccccagagtacaagacagtgctggacaatgccacagaggtggtgaaggagaagatcaccaaggtgaccacccagcagatcatgatcaatgacatctgcagcgacatgatgtgcttcaacaccaccggcacccaggtgcagaacatcaccgtgacccagtatgaccctgaggaggactgcaggaagatggccaaggagtatggagactactttgtggtggagtacagagaccagaagccctactgcatcagcccctgtgagcccggcttctctgtgtccaagaactgcaacctgggcaagtgccagatgagcctgagcggcccccagtgcctgtgtgtgaccacagagacccactggtacagcggggagacctgcaaccagggcacccagaagagcctggtgtatggcctggtgggcgccggcgtggtgctgatgctgatcatcctggtggccctgctgatgctggtgttccgcagcaagcgggaggtgaagaggcagaagtaccgcctgagccagctgtacaagtggcaggaggaggacagcggccctgcccctggcaccttccagaacatcggctttgacatctgccaggatgatgacagcatccacctggagagcatctacagcaacttccagcccagcctgcggcacattgatcctgagaccaagatccgcatccagaggccccaggtgatgaccaccagcttctag

SEQ ID NO: 160320 - DNA, 843 bp, synthetic construct
  misc_feature 1..843: note = Description of Artificial Sequence: Synthetic coding sequence
  source 1..843: mol_type = other DNA
atgaccacagccctgggcagccagctgagcagcagccagaccgtcatccctggcagcagcggcaccatcagccacaccaccgtggcccctggcagctctgtgacaggcaccaccactggagccagtgatgaccaggtgacaggcagcaagacaggcaccaccggggtggccctgagcaccaccgtggcccctggcagcagcagcacagaggccaccaccagcactggagtgcacaggaccaccgtggtgggccagaagacaggagccaccacccggggcagcgccaagcagggcaccaggagcaccatcgaggccaccaccagcttccggggcaccggcaccactggaagtggcatgaacacaggcaccaccggggtggtgtctggcaacaccatcagccccagcagcttcaacacagaggccaccagcggcaccagcgagcggcccaaccctggcagcgagatcggcaccaccggcatcgtgtctggcaccaccgtggcccctggcagcagcaacacagaggccaccaccagcctgggcaatggaggcaccacagaagctggcagcaagatcgtgaccaccggcatcaccaccggcaccaccatcgtgcccggcagcttcaacaccaaggccaccaccagcacagatgtgggcgtggccactggagtgggcatggccaccggcatcaccaacatcatcagcggccgcagccagcccaccggcagcaagacaggctacacagtgactggaagtggcaccacagccctgcccggcggcttcagaacagacagccccagcttccccctcttcctgatctgcagctaccggggccacaacttctag

SEQ ID NO: 160321 - DNA, 837 bp, synthetic construct
  misc_feature 1..837: note = Description of Artificial Sequence: Synthetic coding sequence
  source 1..837: mol_type = other DNA
cccaccggcacccagacccccacccccacccccatcagcaccaccaccaccgtgacccccacccccacccccaccggcacccagacccccaccaccacccccatcaccaccaccaccaccgtgacccccacccccacccccaccggcacccagacccccaccaccgtgctgatcaccaccaccaccaccatgacccccacccccacccccaccagcaccaagagcaccaccgtgacccccatcaccaccaccaccaccgtgacagccacccccacccccaccggcacccagacccccaccatgatccccatcagcaccaccaccaccgtgacccccacccccacccccaccaccggcagcactggaccacccacccacaccagcacagcccccatcgccgagctgaccaccagcaaccccccacctgagagcagcaccccccagaccagccgcagcaccagcagccccctgacagagagcaccaccctgctgagcaccctgcccccagccatcgagatgaccagcacagccccacccagcacccccacagcccccaccaccaccagcggcggccacaccctgagccccccacccagcaccaccaccagccccccaggcacccccacccggggcaccaccaccggcagcagcagcgcccccacccccagcacagtgcagaccaccaccaccagcgcctggacccccacccccacccccctgagcacccccagcatcatccgcaccaccggcctgcggccctaccccagctctgtgctgatctgctgcgtgctgaatgacacctactatgcccctggagaggaggtgtacaatggatag

SEQ ID NO: 160322 - DNA, 5343 bp, synthetic construct
  misc_feature 1..5343: note = Description of Artificial Sequence: Synthetic coding sequence
  source 1..5343: mol_type = other DNA
atgggcctgcccctggcccggctggccgctgtgtgcctggccctgagcctggccggcggcagcgagctgcagacagagggccgcaccaggaaccacggccacaacgtgtgcagcacctggggcaacttccactacaagacctttgatggagatgtgttccgcttccctggcctgtgtgactacaactttgccagtgactgccggggcagctacaaggagtttgctgtgcacctgaagaggggccctggccaggccgaggccccagctggggtggagagcatcctgctgaccatcaaggatgacaccatctacctgaccaggcacctggccgtgctgaatggagctgtggtgtccaccccccactacagccctggcctgctgattgagaagagtgatgcctacaccaaggtgtacagcagagctggcctgaccctgatgtggaaccgggaggatgccctgatgctggagctggacaccaagttcaggaaccacacctgtggcctgtgtggggactacaacggcctgcagagctacagcgagttcctgagtgatggagtgctcttcagccccctggagtttggaaacatgcagaagatcaaccagccagatgtggtgtgtgaagatcctgaggaggaggtggccccagccagctgcagcgagcacagagcagaatgtgagcggctgctgacagctgaggcctttgctgactgccaggacctggtgcccctggagccctacctgcgggcctgccagcaggaccgctgccgctgccctggaggagacacctgtgtgtgcagcacagtggccgagttcagccggcagtgcagccacgccggcggccggcccggcaactggaggacagccaccctgtgccccaagacctgccccggcaacctggtgtacctggagagcggcagcccctgcatggacacctgcagccacctggaggtgagcagcctgtgtgaggagcacaggatggatggctgcttctgcccagagggcaccgtgtatgatgacatcggggacagcggctgtgtgcctgtgtcccagtgccactgccgcctgcacggccacctgtacaccccaggccaggagatcaccaatgactgtgagcagtgtgtgtgcaatgccggccgctgggtgtgcaaggacctgccctgccccggcacctgtgccctggagggcggcagccacatcaccacctttgatggcaagacctacaccttccacggggactgctactacgtgctggccaagggggaccacaatgacagctatgccctgctgggggagctggccccctgtggcagcacagacaagcagacctgcctgaagacagtggtgctgctggccgacaagaagaagaatgtggtggtgttcaagagtgatggctctgtgctgctgaatgagctgcaggtgaacctgccccacgtgacagccagcttctctgtgttccggcccagcagctaccacatcatggtgtccatggccatcggcgtgcggctgcaggtgcagctggcccctgtgatgcagctgtttgtgaccctggaccaggccagccagggccaggtgcagggcctgtgtggcaacttcaacggcctggagggagatgacttcaagacagccagcggcctggtggaggccactggagctggctttgccaacacctggaaggcccagagcagctgccacgacaagctggactggctggatgacccctgcagcctgaacatcgagagcgccaactatgcagagcactggtgcagcctgctgaagaagacagagacccccttcggccgctgccacagcgctgtggaccctgctgagtactacaagcgctgcaagtatgacacctgcaactgccagaacaatgaagactgcctgtgtgccgccctgagcagctatgcccgggcctgcacagccaagggcgtgatgctgtggggctggagggagcacgtgtgcaacaaggatgtgggcagctgccccaacagccaggtgttcctgtacaacctgaccacctgccagcagacctgccgcagcctgtctgaggccgacagccactgcctggagggctttgcccctgtggatggctgcggctgcccagaccacaccttcctggatgagaagggccgctgtgtgcccctggccaagtgcagctgctaccaccggggcctgtacctggaggccggagatgtggtggtgcggcaggaggagcgctgtgtgtgcagagatggccgcctgcactgccggcagatccggctgattggccagagctgcacagcccccaagatccacatggactgcagcaacctgacagccctggccaccagcaagccccgggccctgagctgccagaccctggccgccggctactaccacacagaatgtgtgtctggctgtgtgtgcccagatggcctgatggatgatggccggggcggctgtgtggtggagaaggaatgtccctgtgtgcacaacaatgacctgtacagcagcggggccaagatcaaggtggactgcaacacctgcacctgcaagaggggccgctgggtgtgcacccaggccgtgtgccacggcacctgcagcatctacggcagcggccactacatcacctttgatggcaagtactatgactttgatggccactgcagctatgtggccgtgcaggactactgcggccagaacagcagcctgggcagcttcagcatcatcacagaaaatgtgccctgtggcaccaccggggtgacctgcagcaaggccatcaagatcttcatgggccgcacagagctgaagctggaggacaagcaccgggtggtgatccagagagatgagggccaccacgtggcctacaccacccgggaggtgggccagtacctggtggtggagagcagcacaggcatcatcgtcatctgggacaagaggaccaccgtcttcatcaagctggcccccagctacaagggcaccgtgtgtggcctgtgtggcaactttgaccacaggagcaacaatgacttcaccacccgggaccacatggtggtgtcctctgagctggactttggaaacagctggaaggaggcccccacctgcccagatgtgtccaccaaccctgagccctgcagcctgaacccccacagaagatcctgggccgagaagcagtgcagcatcctgaagagctctgtgttcagcatctgccacagcaaggtggaccccaagcccttctatgaggcctgtgtgcatgacagctgcagctgtgacaccggcggggactgtgagtgcttctgcagcgctgtggccagctatgcccaggagtgcaccaaggagggcgcctgtgtgttctggaggaccccagacctgtgccccatcttctgtgactactacaacccccctcatgaatgtgagtggcactatgagccctgtggcaacagaagctttgagacctgcaggaccatcaatggcatccacagcaacatctctgtgtcctacctggagggctgctacccccgctgccccaaggaccggcccatctatgaggaggacctgaagaagtgtgtgacagctgacaagtgtggctgctacgtggaggacacccactacccacctggggcctctgtgcccacagaggagacctgcaagtcctggtgcacctgcacccagacccacacagcctaccacgtgcacacccacggcaagatcctgaaccagacccaggatggagccttctgctactgggagatctgtggccccaatggaacagtggagaagcacttcaacatctgcagcatcaccacccggcccagcaccctgaccaccttcaccaccatcaccctgcccaccacccccaccaccttcaccaccaccaccaccaccaccacccccaccagcagcacagtgctgagcaccacccccaagctgtgctgcctgtggagcgactggatcaatgaagaccaccccagcagcggcagtgatgatggagaccgggagacctttgatggagtgtgtggggccccagaagatattgagtgccgctctgtgaaggacccccacctgagcctggagcagctgggccagaaggtgcagtgtgatgtgtctgtgggcttcatctgcaagaatgaagaccagtttggaaatggccccttcggcctgtgctatgactacaagatccgggtgaactgctgctggcccatggacaagtgcatcaccacccccagcccccccaccaccacccccagccccccacccaccagcaccaccaccctgccccccaccaccacccccagcccccccaccaccaccaccaccaccccaccacccaccaccacccccagcccccccatcaccaccaccaccaccccaccacccaccaccacccccagcccccccatcagcaccaccaccaccccaccacccaccaccacccccagcccccccaccaccacccccagcccccccaccaccacccccagcccccccaccaccaccaccaccaccccaccacccaccaccacccccagcccccccaccaccacccccatcaccccaccagccagcaccaccaccctgccccccaccaccacccccagcccccccaccaccaccaccaccaccccaccacccaccaccacccccatcaccaccaccaccaccgtgacccccacccccacccccaccggcacccagacccccaccaccacccccatcaccaccaccaccaccgtgacccccacccccacccccaccggcacccagacccccaccagcacccccatcaccaccaccaccaccacccccacccccacagccatcaccaccaccaccaccgtgacccccacccccacccccaccggcacccagacccccaccaccacccccatcaccaccaccaccaccgtgacccccacccccacccccaccggcacccagagccccacccccacagccatcaccaccaccaccaccgtgacccccacccccacccccaccggcacccagacccccaccagcacccccatcaccaccaccaccaccgtgacccccacccccacccccaccggcacccagacccccacccccacccccatcagcaccaccaccaccgtgacccccacccccacccccaccggcacccagacccccaccaccacccccatcaccaccaccaccaccgtgacccccacccccacccccaccggcacccagacccccaccaccacccccacccccaccagcaccaagagcaccaccgtgacccccatcaccaccaccaccaccgtgacagccacccccacccccaccggcacccagacccccaccatgatccccatcagcaccaccaccaccgtgaccccctag

SEQ ID NO: 160323 - DNA, 1230 bp, synthetic construct
  misc_feature 1..1230: note = Description of Artificial Sequence: Synthetic coding sequence
  source 1..1230: mol_type = other DNA
gacattgaatgtagatctgtgaaggacccccacctgagcctggagcagctgggccagaaggtgcagtgtgatgtgtctgtgggcttcatctgcaagaatgaagaccagtttggaaatggccccttcggcctgtgctatgactacaagatccgggtgaactgctgctgcacccccacccggggcaccaccaccggcagcagcagcgcccccacccccagcacagtgcagaccaccaccaccagcgcctggacccccacccccacccccctgagcacccccagcatcatccgcaccaccggcctgcggccctaccccagctctgtgctgatctgctgcgtgctgaatgacacctactatgcccctggagaggaggtgtacaacggcacctacggggacacctgctactttgtgaactgcagcctgagctgcaccctggagttctacaactggagctgccccagcacccccagccccacccccacccccagcaagagcacccccacccccagcaagcccagcagcacccccagcaagcccaccccaggcaccaagcccccagaatgtcctgactttgatcctccccggcaggagaatgagacctggtggctgtgtgactgcttcatggccacctgcaagtacaacaacacagtggagatcgtgaaggtggagtgtgagcccccacccatgcccacctgcagcaatggcctgcagcctgtgcgggtggaggaccctgatggctgctgctggcactgggagtgtgactgctactgcaccggctggggagacccccactacgtgacctttgatggcctgtactacagctaccagggcaactgcacctacgtgctggtggaggagatcagccccagcgtggacaactttggagtgtacatcgacaactaccactgtgaccccaatgacaaggtgtcctgccccaggaccctcatcgtgagacatgagacccaggaggtgctgatcaagacagtgcacatgatgcccatgcaggtgcaggtgcaggtgaaccggcaggccgtggccctgccctacaagaagtatggcctggaggtgtaccagagcggcatcaactacgtggtggacatccctgagctgggcgtgctggtgtcctacaacggcctgtccttctctgtgcggctgccctaccaccgcttcggcaacaacaccaagggccagtgtggcacctgcaccaacaccaccagtgatgactgctag

SEQ ID NO: 160324 - DNA, 8454 bp, synthetic construct
  misc_feature 1..8454: note = Description of Artificial Sequence: Synthetic coding sequence
  source 1..8454: mol_type = other DNA
atgggcctgcccctggcccggctggccgctgtgtgcctggccctgagcctggccggcggcagcgagctgcagacagagggccgcaccaggaaccacggccacaacgtgtgcagcacctggggcaacttccactacaagacctttgatggagatgtgttccgcttccctggcctgtgtgactacaactttgccagtgactgccggggcagctacaaggagtttgctgtgcacctgaagaggggccctggccaggccgaggccccagctggggtggagagcatcctgctgaccatcaaggatgacaccatctacctgaccaggcacctggccgtgctgaatggagctgtggtgtccaccccccactacagccctggcctgctgattgagaagagtgatgcctacaccaaggtgtacagcagagctggcctgaccctgatgtggaaccgggaggatgccctgatgctggagctggacaccaagttcaggaaccacacctgtggcctgtgtggggactacaacggcctgcagagctacagcgagttcctgagtgatggagtgctcttcagccccctggagtttggaaacatgcagaagatcaaccagccagatgtggtgtgtgaagatcctgaggaggaggtggccccagccagctgcagcgagcacagagcagaatgtgagcggctgctgacagctgaggcctttgctgactgccaggacctggtgcccctggagccctacctgcgggcctgccagcaggaccgctgccgctgccctggaggagacacctgtgtgtgcagcacagtggccgagttcagccggcagtgcagccacgccggcggccggcccggcaactggaggacagccaccctgtgccccaagacctgccccggcaacctggtgtacctggagagcggcagcccctgcatggacacctgcagccacctggaggtgagcagcctgtgtgaggagcacaggatggatggctgcttctgcccagagggcaccgtgtatgatgacatcggggacagcggctgtgtgcctgtgtcccagtgccactgccgcctgcacggccacctgtacaccccaggccaggagatcaccaatgactgtgagcagtgtgtgtgcaatgccggccgctgggtgtgcaaggacctgccctgccccggcacctgtgccctggagggcggcagccacatcaccacctttgatggcaagacctacaccttccacggggactgctactacgtgctggccaagggggaccacaatgacagctatgccctgctgggggagctggccccctgtggcagcacagacaagcagacctgcctgaagacagtggtgctgctggccgacaagaagaagaatgtggtggtgttcaagagtgatggctctgtgctgctgaatgagctgcaggtgaacctgccccacgtgacagccagcttctctgtgttccggcccagcagctaccacatcatggtgtccatggccatcggcgtgcggctgcaggtgcagctggcccctgtgatgcagctgtttgtgaccctggaccaggccagccagggccaggtgcagggcctgtgtggcaacttcaacggcctggagggagatgacttcaagacagccagcggcctggtggaggccactggagctggctttgccaacacctggaaggcccagagcagctgccacgacaagctggactggctggatgacccctgcagcctgaacatcgagagcgccaactatgcagagcactggtgcagcctgctgaagaagacagagacccccttcggccgctgccacagcgctgtggaccctgctgagtactacaagcgctgcaagtatgacacctgcaactgccagaacaatgaagactgcctgtgtgccgccctgagcagctatgcccgggcctgcacagccaagggcgtgatgctgtggggctggagggagcacgtgtgcaacaaggatgtgggcagctgccccaacagccaggtgttcctgtacaacctgaccacctgccagcagacctgccgcagcctgtctgaggccgacagccactgcctggagggctttgcccctgtggatggctgcggctgcccagaccacaccttcctggatgagaagggccgctgtgtgcccctggccaagtgcagctgctaccaccggggcctgtacctggaggccggagatgtggtggtgcggcaggaggagcgctgtgtgtgcagagatggccgcctgcactgccggcagatccggctgattggccagagctgcacagcccccaagatccacatggactgcagcaacctgacagccctggccaccagcaagccccgggccctgagctgccagaccctggccgccggctactaccacacagaatgtgtgtctggctgtgtgtgcccagatggcctgatggatgatggccggggcggctgtgtggtggagaaggaatgtccctgtgtgcacaacaatgacctgtacagcagcggggccaagatcaaggtggactgcaacacctgcacctgcaagaggggccgctgggtgtgcacccaggccgtgtgccacggcacctgcagcatctacggcagcggccactacatcacctttgatggcaagtactatgactttgatggccactgcagctatgtggccgtgcaggactactgcggccagaacagcagcctgggcagcttcagcatcatcacagaaaatgtgccctgtggcaccaccggggtgacctgcagcaaggccatcaagatcttcatgggccgcacagagctgaagctggaggacaagcaccgggtggtgatccagagagatgagggccaccacgtggcctacaccacccgggaggtgggccagtacctggtggtggagagcagcacaggcatcatcgtcatctgggacaagaggaccaccgtcttcatcaagctggcccccagctacaagggcaccgtgtgtggcctgtgtggcaactttgaccacaggagcaacaatgacttcaccacccgggaccacatggtggtgtcctctgagctggactttggaaacagctggaaggaggcccccacctgcccagatgtgtccaccaaccctgagccctgcagcctgaacccccacagaagatcctgggccgagaagcagtgcagcatcctgaagagctctgtgttcagcatctgccacagcaaggtggaccccaagcccttctatgaggcctgtgtgcatgacagctgcagctgtgacaccggcggggactgtgagtgcttctgcagcgctgtggccagctatgcccaggagtgcaccaaggagggcgcctgtgtgttctggaggaccccagacctgtgccccatcttctgtgactactacaacccccctcatgaatgtgagtggcactatgagccctgtggcaacagaagctttgagacctgcaggaccatcaatggcatccacagcaacatctctgtgtcctacctggagggctgctacccccgctgccccaaggaccggcccatctatgaggaggacctgaagaagtgtgtgacagctgacaagtgtggctgctacgtggaggacacccactacccacctggggcctctgtgcccacagaggagacctgcaagagctgtgtgtgcaccaacagcagccaggtggtgtgcaggcctgaggagggcaagatcctgaaccagacccaggatggagccttctgctactgggagatctgtggccccaacggcaccgtggagaagcacttcaacatctgcagcatcaccacccggcccagcaccctgaccaccttcaccaccatcaccctgcccaccacccccaccaccttcaccaccaccaccaccaccaccacccccaccagcagcacagtgctgagcaccacccccaagctgtgctgcctgtggagcgactggatcaatgaagaccaccccagcagcggcagtgatgatggagaccgggagacctttgatggagtgtgtggggcccctgaggacattgaatgtagatctgtgaaggacccccacctgagcctggagcagctgggccagaaggtgcagtgtgatgtgtctgtgggcttcatctgcaagaatgaagaccagtttggaaatggccccttcggcctgtgctatgactacaagatccgggtgaactgctgctggcccatggacaagtgcatcaccacccccagcccccccaccaccacccccagccccccacccaccagcaccaccaccctgccccccaccaccacccccagcccccccaccaccaccaccaccaccccaccacccaccaccacccccagcccccccatcaccaccaccaccaccccaccacccaccaccacccccagcccccccatcagcaccaccaccaccccaccacccaccaccacccccagcccccccaccaccacccccagcccccccaccaccacccccagcccccccaccaccaccaccaccaccccaccacccaccaccacccccagcccccccaccaccacccccatcaccccaccagccagcaccaccaccctgccccccaccaccacccccagcccccccaccaccaccaccaccaccccaccacccaccaccacccccatcaccaccaccaccaccgtgacccccacccccacccccaccggcacccagacccccaccaccacccccatcaccaccaccaccaccgtgacccccacccccacccccaccggcacccagacccccaccagcacccccatcaccaccaccaccaccgtgacccccacccccacccccaccggcacccagacccccaccaccacccccatcaccaccaccaccaccgtgacccccacccccacccccaccggcacccagacccccacccccacagccatcaccaccaccaccaccgtgacccccacccccacccccaccggcacccagacccccaccaccacccccatcaccaccaccaccaccgtgacccccacccccacccccaccggcacccagagccccacccccacagccatcaccaccaccaccaccgtgacccccacccccacccccaccggcacccagacccccaccagcacccccatcaccaccaccaccaccgtgacccccacccccacccccaccggcacccagacccccacccccacccccatcagcaccaccaccaccgtgacccccacccccacccccaccggcacccagacccccaccaccacccccatcaccaccaccaccaccgtgacccccacccccacccccaccggcacccagacccccaccaccgtgctgatcaccaccaccaccaccatgacccccacccccacccccaccagcaccaagagcaccaccgtgacccccatcaccaccaccaccaccgtgacagccacccccacccccaccggcacccagacccccaccatgatccccatcagcaccaccaccaccgtgacccccacccccacccccaccaccggcagcactggaccacccacccacaccagcacagcccccatcgccgagctgaccaccagcaaccccccacctgagagcagcaccccccagaccagccgcagcaccagcagccccctgacagagagcaccaccctgctgagcaccctgcccccagccatcgagatgaccagcacagccccacccagcacccccacagcccccaccaccaccagcggcggccacaccctgagccccccacccagcaccaccaccagccccccaggcacccccacccggggcaccaccaccggcagcagcagcgcccccacccccagcacagtgcagaccaccaccaccagcgcctggacccccacccccacccccctgagcacccccagcatcatccgcaccaccggcctgcggccctaccccagctctgtgctgatctgctgcgtgctgaatgacacctactatgcccctggagaggaggtgtacaacggcacctacggggacacctgctactttgtgaactgcagcctgagctgcaccctggagttctacaactggagctgccccagcacccccagccccacccccacccccagcaagagcacccccacccccagcaagcccagcagcacccccagcaagcccaccccaggcaccaagcccccagaatgtcctgactttgatcctccccggcaggagaatgagacctggtggctgtgtgactgcttcatggccacctgcaagtacaacaacacagtggagatcgtgaaggtggagtgtgagcccccacccatgcccacctgcagcaatggcctgcagcctgtgcgggtggaggaccctgatggctgctgctggcactgggagtgtgactgctactgcaccggctggggagacccccactacgtgacctttgatggcctgtactacagctaccagggcaactgcacctacgtgctggtggaggagatcagccccagcgtggacaactttggagtgtacatcgacaactaccactgtgaccccaatgacaaggtgtcctgccccaggaccctcatcgtgagacatgagacccaggaggtgctgatcaagacagtgcacatgatgcccatgcaggtgcaggtgcaggtgaaccggcaggccgtggccctgccctacaagaagtatggcctggaggtgtaccagagcggcatcaactacgtggtggacatccctgagctgggcgtgctggtgtcctacaacggcctgtccttctctgtgcggctgccctaccaccgcttcggcaacaacaccaagggccagtgtggcacctgcaccaacaccaccagtgatgactgcatcctgcccagcggggagatcgtgagcaactgtgaggccgctgctgaccagtggctggtgaatgaccccagcaagccccactgcccccacagcagcagcaccaccaagaggcctgctgtgacagtgcctgggggcggcaagaccaccccccacaaggactgcacccccagccccctgtgccagctgatcaaggacagcctgtttgcccagtgccacgccctggtgcccccccagcactactatgatgcctgtgtgtttgacagctgcttcatgcctggcagcagcctggagtgtgccagcctgcaggcctatgctgccctgtgtgcccagcagaacatctgcctggactggaggaaccacacccatggagcctgcctggtggagtgccccagccaccgggagtaccaggcctgtggccctgctgaggagcccacctgcaagagcagcagcagccagcagaacaacacagtgctggtggagggctgcttctgcccagagggcaccatgaactatgcccctggctttgatgtgtgtgtgaagacctgtggctgtgtgggccctgacaacgtgccccgggagtttggagagcactttgaatttgactgcaagaactgtgtgtgcctggagggcggcagcggcatcatctgccagcccaagcgctgcagccagaagcctgtgacccactgtgtggaggatggcacctacctggccacagaggtgaacccagctgacacctgctgcaacatcaccgtgtgcaagtgcaacaccagcctgtgcaaggagaagcccagcgtgtgccccctgggctttgaggtgaagagcaagatggtgcccggccgctgctgccccttctactggtgtgagagcaaaggagtgtgtgtgcacggcaatgctgagtaccagcccggcagccctgtgtacagcagcaagtgccaggactgtgtgtgcacagacaaggtggacaacaacaccctgctgaatgtcatcgcctgcacccacgtgccctgcaacaccagctgcagccctggctttgagctgatggaggcccctggagagtgctgcaagaagtgtgagcagacccactgcatcatcaagaggccagacaaccagcacgtgatcctgaagccaggggacttcaagagtgaccccaagaacaactgcaccttcttcagctgtgtgaagatccacaaccagctgatcagctctgtgagcaacatcacctgccccaactttgatgccagcatctgcatccctggcagcatcaccttcatgcccaacggctgctgcaagacctgcaccccaagaaatgagaccagggtgccctgcagcacagtgcctgtgaccacagaggtgtcctatgccggctgcaccaagacagtgctgatgaaccactgcagcggcagctgtggcacctttgtgatgtacagcgccaaggcccaggccctggaccacagctgcagctgctgcaaggaggagaagaccagccagcgggaggtggtgctgagctgccccaacggcggcagcctgacccacacctacacccacatcgagagctgccagtgccaggacacagtgtgtggcctgcccaccggcaccagcagaagagcccggcgcagccccaggcacctgggcagcggctag

SEQ ID NO: 160325 - DNA, 2631 bp, synthetic construct
  misc_feature 1..2631: note = Description of Artificial Sequence: Synthetic coding sequence
  source 1..2631: mol_type = other DNA
atctacagcacagtgtccaccagcaccacagccatcaccagccacttcaccaccagcgagacagctgtgacccccacccctgtgacccccagcagcctgagcacagacatccccaccaccagcctgcggaccctgacccccagctctgtgggcaccagcaccagcctgaccaccaccacagacttccccagcatccccacagacatcagcaccctgcccaccaggacccacatcatcagcagcagccccagcatccagagcacagagaccagcagcctggtgggcaccaccagccccaccatgagcacagtgaggatgaccctgcgcatcacagagaacacccccatcagcagcttcagcaccagcatcgtggtgattcctgagacccccacccagaccccacctgtgctgaccagcgccaccggcacccagaccagccctgcccccaccaccgtgaccttcggcagcacagacagcagcaccagcaccctgcacaccctgacccccagcacagccctgagcaccatcgtgtccaccagccaggtgcccatccccagcacccacagcagcaccctgcagaccacccccagcacccccagcctgcagaccagcctgaccagcaccagcgagttcaccacagagagcttcacccggggcagcaccagcaccaatgccatcctgaccagcttcagcaccatcatctggagcagcacccccaccatcatcatgagcagcagccccagcagcgccagcatcacccctgtgttcagcaccaccatccacagcgtgcccagcagcccctacatcttcagcacagaaaatgtgggcagcgccagcatcaccggcttccccagcctgagcagcagcgccaccaccagcaccagcagcaccagcagcagcctgaccacagccctgacagagatcacccccttctcctacatcagcctgcccagcaccaccccctgccccggcaccatcaccatcaccatcgtgcctgccagccccacagacccctgtgtggagatggaccccagcacagaggccaccagcccccccaccacccccctgactgtgttccccttcaccacagagatggtgacctgccccaccagcatcagcatccagaccaccctgaccacctacatggacaccagctccatgatgcctgagagcgagagcagcatcagccccaatgccagcagcagcactggaactggaacagtgcccaccaacacagtgttcaccagcacccggctgcccaccagcgagacctggctgagcaacagcagcgtcatccccctgcccctgcccggggtgtccaccatccccctgaccatgaagcccagcagcagcctgcccaccatcctgcggaccagcagcaagagcacccaccccagcccccccaccaccaggaccagcgagacccctgtggccaccacccagacccccaccaccctgaccagcaggaggaccacccgcatcaccagccagatgaccacccagagcaccctgaccaccacagctggcacctgtgacaatggaggcacctgggagcagggccagtgtgcctgcctgcccggcttcagcggggaccgctgccagctgcagacccgctgccagaatggaggccagtgggatggcctgaagtgccagtgccccagcaccttctacggcagcagctgtgaatttgctgtggagcaggtggacctggatgtggtggagacagaggtgggcatggaggtgtctgtggaccagcagttctccccagacctgaatgacaacaccagccaggcctacagagacttcaacaagaccttctggaaccagatgcagaagatctttgctgacatgcagggcttcaccttcaagggcgtggagatcctgagcctgagaaatggcagcatcgtggtggactacctggtgctgctggagatgcccttcagcccccagctggagagtgaatatgagcaggtgaagaccaccctgaaggagggcctgcagaatgccagccaggatgccaacagctgccaggacagccagaccctgtgcttcaagccagacagcatcaaggtgaacaacaacagcaagacagagctgaccccagaggccatctgccggcgggccgcccccaccggctatgaggagttctacttccccctggtggaggccacccggctgcgctgtgtgaccaagtgcaccagcggcgtggacaatgccatcgactgccaccagggccagtgtgtgctggagaccagcggccctgcctgccgctgctacagcacagacacccactggttcagcggcccccgctgtgaggtggccgtgcactggagggccctggtgggcggcctgacagctggggccgccctgctggtgctgctgctgctggccctgggcgtgcgggctgtgcgcagcggctggtggggcggccagaggcggggccgctcctgggaccaggacaggaagtggtttgagacctgggatgaggaggtggtgggcaccttcagcaactggggctttgaagatgatggaacagacaaggacaccaacttccacgtggccctggagaatgtggacaccaccatgaaggtgcacatcaagaggcctgagatgaccagcagctctgtgtag

SEQ ID NO: 160326 - DNA, 927 bp, synthetic construct
  misc_feature 1..927: note = Description of Artificial Sequence: Synthetic coding sequence
  source 1..927: mol_type = other DNA
tgtgacaatggaggcacctgggagcagggccagtgtgcctgcctgcccggcttcagcggggaccgctgccagctgcagacccgctgccagaatggaggccagtgggatggcctgaagtgccagtgccccagcaccttctacggcagcagctgtgaatttgctgtggagcaggtggacctggatgtggtggagacagaggtgggcatggaggtgtctgtggaccagcagttctccccagacctgaatgacaacaccagccaggcctacagagacttcaacaagaccttctggaaccagatgcagaagatctttgctgacatgcagggcttcaccttcaagggcgtggagatcctgagcctgagaaatggcagcatcgtggtggactacctggtgctgctggagatgcccttcagcccccagctggagagtgaatatgagcaggtgaagaccaccctgaaggagggcctgcagaatgccagccaggatgccaacagctgccaggacagccagaccctgtgcttcaagccagacagcatcaaggtgaacaacaacagcaagacagagctgaccccagaggccatctgccggcgggccgcccccaccggctatgaggagttctacttccccctggtggaggccacccggctgcgctgtgtgaccaagtgcaccagcggcgtggacaatgccatcgactgccaccagggccagtgtgtgctggagaccagcggccctgcctgccgctcctgggaccaggacaggaagtggtttgagacctgggatgaggaggtggtgggcaccttcagcaactggggctttgaagatgatggaacagacaaggacaccaacttccacgtggccctggagaatgtggacaccaccatgaaggtgcacatcaagaggcctgagatgaccagcagctctgtgtag

SEQ ID NO: 160327 - DNA, 3531 bp, synthetic construct
  misc_feature 1..3531: note = Description of Artificial Sequence: Synthetic coding sequence
  source 1..3531: mol_type = other DNA
atgaagggggcccgctggaggagagtgccctgggtgtccctgagctgcctgtgcctgtgcctgctgccccacgtggtgcccggcatgaccacccccagcctgaagacagatggcggccgcaggacagccaccagccccccacccaccaccagccagaccatcatcagcaccatccccagcacagccatgcacaccaggagcacagctgcccccatccccatcctgcctgagcggggcgtgtccctcttcccctatggagctggagctggggacctggagtttgtgcggaggacagtggacttcaccagccccctcttcaagccagccaccggcttccccctgggcagcagcctgcgggacagcctgtacttcacagacaatggccagatcatcttccctgagagtgactaccagatcttctcctaccccaaccccctgcccaccggcttcaccggccgggaccctgtggccctggtggcccccttctgggatgatgctgacttcagcacaggccggggcaccaccttctaccaggagtatgagaccttctacggggagcacagcctgctggtgcagcaggccgagagctggatcaggaagatgaccaacaacggcggctacaaggcccgctgggccctgaaggtgacctgggtgaatgcccacgcctacccagcccagtggaccctgggcagcaacacctaccaggccatcctgagcacagatggcagccgctcctatgccctcttcctgtaccagagcggcggcatgcagtgggatgtggcccagaggagcggcaaccctgtgctgatgggcttcagcagtggagatggctactttgagaacagccccctgatgagccagcctgtgtgggagcgctacagaccagaccgcttcctgaacagcaacagcggcctgcagggcctgcagttctaccgcctgcaccgggaggagcggcccaactaccgcctggagtgcctgcagtggctgaagagccagccccgctggcccagctggggctggaaccaggtgtcctgcccctgctcctggcagcagggcagaagagacctgcgcttccagcctgtgtccatcggccgctggggcctgggcagccggcagctgtgcagcttcacctcctggaggggcggcgtgtgctgcagctatggcccctggggcgagttccgggagggctggcacgtgcagaggccctggcagctggcccaggagctggagccccagagctggtgctgccgctggaatgacaagccctacctgtgtgccctgtaccagcagaggcggccccacgtgggctgtgccacctaccggcccccccagcctgcctggatgtttggagacccccacatcaccaccctggatggagtgtcctacaccttcaacggcctgggggacttcctgctggtgggcgcccaggacggcaacagcagcttcctgctgcagggccgcacagcccagacaggcagcgcccaggccaccaacttcatcgcctttgctgcccagtaccgcagcagcagcctgggccctgtgacagtgcagtggctgctggagccccatgatgccatccgggtgctgctggacaaccagacagtgaccttccagcctgaccatgaagatggcggcggccaggagaccttcaatgccactggagtgctgctgagcagaaatggcagcgaggtgtctgccagctttgatggctgggccaccgtgtctgtgattgccctgagcaacatcctgcacgccagcgccagcctgcccccagagtaccagaacagaacagagggcctgctgggcgtgtggaacaacaacccagaagatgacttcaggatgcccaacggcagcaccatccccccaggcagccctgaggagatgctgttccacttcggcatgacctggcagatcaatggaacaggcctgctgggcaagagaaatgaccagctgcccagcaacttcacccctgtgttctacagccagctgcagaagaacagctcctgggccgagcacctgatcagcaactgtgatggagacagcagctgcatctatgacaccctggccctgagaaatgccagcatcggcctgcacacccgggaggtgtccaagaactatgagcaggccaatgccaccctgaaccagtacccacccagcatcaatggaggccgggtcatcgaggcctacaagggccagaccaccctcatccagtacaccagcaatgcagaagatgccaacttcaccctgcgggacagctgcacagacctggagctgtttgaaaatggcaccctgctgtggacccccaagagcctggagcccttcaccctggagatcctggcccggagcgccaagattggcctggccagcgccctgcagcccaggacagtggtgtgccactgcaatgctgagagccagtgcctgtacaaccagaccagccgggtgggcaacagcagcctggaggtggccggctgcaagtgtgatggcggcaccttcggccgctactgtgagggctctgaagatgcctgtgaggagccctgcttccccagcgtgcactgtgtgcctgggaagggctgtgaggcctgcccccccaacctgactggagatggccgccactgtgccgccctgggcagcagcttcctgtgccagaaccagagctgccctgtgaactactgctacaaccagggccactgctacatcagccagaccctgggctgccagcccatgtgcacctgccccccagccttcacagacagccgctgcttcctggccggcaacaacttcagccccaccgtgaacctggagctgcccctgcgggtcatccagctgctgctgtctgaggaggagaatgcctccatggccgaggtgaatgcctctgtggcctaccgcctgggcaccctggacatgagggccttcctgaggaacagccaggtggagagaattgacagcgctgccccagccagcggcagccccatccagcactggatggtgatcagcgagttccagtaccggccccggggccctgtgattgacttcctgaacaaccagctgctggccgctgtggtggaggccttcctgtaccacgtgccccggcgctctgaggagcccagaaatgatgtggtgttccagcccatctctggagaagatgtgagagatgtgacagccctgaatgtgtccaccctgaaggcctacttccgctgtgatggctacaagggctatgacctggtgtacagcccccagagcggcttcacctgtgtgagcccctgcagccggggctactgtgaccatggaggccagtgccagcacctgcccagcggcccccgctgcagctgtgtgtccttcagcatctacacagcctggggcgagcactgtgagcacctgtccatgaagctggatgccttcttcggcatcttcttcggggccctgggcggcctgctgctgctgggcgtgggcacctttgtggtgctgcgcttctggggctgcagcggggcccgcttctcctacttcctgaacagcgctgaggccctgccctag

SEQ ID NO: 160328 - DNA, 3378 bp, synthetic construct
  misc_feature 1..3378: note = Description of Artificial Sequence: Synthetic coding sequence
  source 1..3378: mol_type = other DNA
atgaagggggcccgctggaggagagtgccctgggtgtccctgagctgcctgtgcctgtgcctgctgccccacgtggtgcctggggtgtccctcttcccctacggggccggggccggggacctggagtttgtgagaagaacagtggacttcaccagccccctcttcaagccagccaccggcttccccctgggcagcagcctgcgggacagcctgtacttcacagacaatggccagatcatcttccctgagagtgactaccagatcttctcctaccccaaccccctgcccaccggcttcaccggccgggaccctgtggccctggtggcccccttctgggatgatgctgacttcagcacaggccggggcaccaccttctaccaggagtatgagaccttctatggagagcacagcctgctggtgcagcaggccgagagctggatcaggaagatgaccaacaatggaggctacaaggcccgctgggccctgaaggtgacctgggtgaatgcccacgcctacccagcccagtggaccctgggcagcaacacctaccaggccatcctgagcacagatggcagccgctcctatgccctcttcctgtaccagagcggcggcatgcagtgggatgtggcccagaggagcggcaaccctgtgctgatgggcttcagcagtggagatggctactttgagaacagccccctgatgagccagcctgtgtgggagcgctacagaccagaccgcttcctgaacagcaacagcggcctgcagggcctgcagttctaccgcctgcaccgggaggagcggcccaactaccgcctggagtgcctgcagtggctgaagagccagccccgctggcccagctggggctggaaccaggtgtcctgcccctgctcctggcagcagggccggcgggacctgcgcttccagcctgtgtccatcggccgctggggcctgggcagccggcagctgtgcagcttcacctcctggagaggaggagtgtgctgcagctatggcccctggggcgagttccgggagggctggcacgtgcagaggccctggcagctggcccaggagctggagccccagagctggtgctgccgctggaatgacaagccctacctgtgtgccctgtaccagcagaggcggccccacgtgggctgtgccacctacagaccaccccagcctgcctggatgtttggagacccccacatcaccaccctggatggagtgtcctacaccttcaacggcctgggggacttcctgctggtgggcgcccaggacggcaacagcagcttcctgctgcagggccgcacagcccagacaggcagcgcccaggccaccaacttcatcgcctttgctgcccagtaccgcagcagcagcctgggccctgtgacagtgcagtggctgctggagccccatgatgccatccgggtgctgctggacaaccagacagtgaccttccagcctgaccatgaagatggcggcggccaggagaccttcaatgccaccggggtgctgctgagcagaaatggaagtgaggtgtctgccagctttgatggctgggccaccgtgtctgtcatcgccctgagcaacatcctgcacgccagcgccagcctgcccccagagtaccagaacagaacagagggcctgctgggcgtgtggaacaacaacccagaagatgacttcaggatgcccaacggcagcaccatccccccaggcagccctgaggagatgctgttccacttcggcatgacctggcagatcaatggcaccggcctgctgggcaagagaaatgaccagctgcccagcaacttcacccctgtgttctacagccagctgcagaagaacagctcctgggccgagcacctgatcagcaactgtgatggagacagcagctgcatctatgacaccctggccctgagaaatgccagcatcggcctgcacacccgggaggtgtccaagaactatgagcaggccaatgccaccctgaaccagtacccacccagcatcaatggaggccgggtgattgaggcctacaagggccagaccaccctcatccagtacaccagcaatgcagaagatgccaacttcaccctgcgggacagctgcacagacctggagctgtttgaaaatggcaccctgctgtggacccccaagagcctggagcccttcaccctggagatcctggcccggagcgccaagattggcctggccagcgccctgcagcccaggacagtggtgtgccactgcaatgctgagagccagtgcctgtacaaccagaccagccgggtgggcaacagcagcctggaggtggccggctgcaagtgtgatggcggcaccttcggccgctactgtgagggctctgaagatgcctgtgaggagccctgcttccccagcgtgcactgtgtgcctgggaagggctgtgaggcctgcccccccaacctgactggagatggccgccactgtgccgccctgggcagcagcttcctgtgccagaaccagagctgccctgtgaactactgctacaaccagggccactgctacatcagccagaccctgggctgccagcccatgtgcacctgccccccagccttcacagacagccgctgcttcctggccggcaacaacttcagccccaccgtgaacctggagctgcccctgcgggtcatccagctgctgctgtctgaggaggagaatgcctccatggccgaggtgaatgcctctgtggcctaccgcctgggcaccctggacatgagggccttcctgaggaacagccaggtggagagaattgattctgctgccccagccagcggcagccccatccagcactggatggtgatcagcgagttccagtaccggccccggggccctgtgattgacttcctgaacaaccagctgctggccgctgtggtggaggccttcctgtaccacgtgcccaggagaagtgaggagcccagaaatgatgtggtgttccagcccatcagcggggaggatgtgagagatgtgacagccctgaatgtgtccaccctgaaggcctacttccgctgtgatggctacaagggctatgacctggtgtacagcccccagagcggcttcacctgtgtgagcccctgcagccggggctactgtgaccacggcggccagtgccagcacctgcccagcggcccccgctgcagctgtgtgtccttcagcatctacacagcctggggcgagcactgtgagcacctgtccatgaagctggatgccttcttcggcatcttctttggagccctgggcggcctgctgctgctgggcgtgggcacctttgtggtgctgcgcttctggggctgcagcggggcccgcttctcctacttcctgaacagcgctgaggccctgccctag

SEQ ID NO: 160329 - DNA, 5739 bp, synthetic construct
  misc_feature 1..5739: note = Description of Artificial Sequence: Synthetic coding sequence
  source 1..5739: mol_type = other DNA
cctggcaccacagaggacaccctcatcaccggcagcaagacagctgcccctgtgaccagcacaggcagcaccacagccaccctggagggccagagcacagctgccagcagcaggaccagcaaccaggacatcagcgccagcagccagaaccaccagaccaagagcacagagaccaccagcaaggcccagacagacaccctgacccagatgatgaccagcaccctcttcagcagccccagcgtgcacaacgtgatggagacagcccccccagatgagatgaccaccagcttccccagctctgtgaccaacaccctgatgatgaccagcaagaccatcaccatgaccaccagcacagacagcaccctgggcaacacagaggagaccagcacagctggaacagagagcagcacccctgtgaccagcgctgtgtccatcacagctggccaggagggccagagcaggaccacctcctggaggaccagcatccaggacaccagcgccagcagccagaaccactggaccaggagcacccagaccacccgggagagccagaccagcaccctgacccacaggaccaccagcacccccagcttcagccccagcgtgcacaacgtgacaggcaccgtgtcccagaagaccagccccagcggggagacagccaccagcagcctgtgcagcgtgaccaacacctccatgatgaccagcgagaagatcaccgtgaccaccagcacaggcagcaccctgggcaaccctggagagaccagctctgtgcctgtgacaggcagcctgatgcctgtgaccagcgctgccctggtgacctttgatcctgagggccagagccctgccaccttcagcaggaccagcacccaggacaccacagccttcagcaagaaccaccagacccagagcgtggagaccaccagggtgtcccagatcaacaccctgaacaccctgacccctgtgaccaccagcacagtgctgagcagccccagcggcttcaaccccagcggcaccgtgtcccaggagaccttccccagcggggagaccaccaccagcagccccagctctgtgagcaacaccttcctggtgaccagcaaggtgttcaggatgcccaccagccgggacagcaccctgggcaacacagaggagaccagcctgtctgtgtctggcaccatcagcgccatcaccagcaaggtgtccaccatctggtggagcgacaccctgagcacagccctgagccccagcagcctgccccccaagatcagcacagccttccacacccagcagagcgagggcgctgagaccaccggccggccccatgagaggagcagcttcagccctggggtgtcccaggagatcttcaccctgcacgagaccaccacctggcccagcagcttcagcagcaagggccacaccacctggagccagacagagctgcccagcaccagcactggagctgccacccggctggtgacaggcaaccccagcactggaacagctggcaccatcccccgggtgcccagcaaggtgtctgccatcggggagcccggggagcccaccacctacagcagccacagcaccaccctgcccaagaccactggagctggggcccagacccagtggacccaggagaccggcaccaccggggaggccctgctgagcagccccagctacagcgtgacccagatgatcaagacagccaccagccccagcagcagccccatgctggacagacacaccagccagcagatcaccacagcccccagcaccaaccacagcaccatccacagcaccagcaccagcccccaggagagccctgctgtgtcccagaggggccacacccaggccccccagaccacccaggagagccagaccaccaggtctgtgagccccatgacagacaccaagacagtgaccaccccaggcagcagcttcaccgccagcggccacagccccagcgagatcgtgccccaggatgcccccaccatctctgctgccaccacctttgccccagcccccactggagatggccacaccacccaggcccccaccacagccctgcaggccgcccccagcagccatgatgccaccctgggccccagcggcggcaccagcctgagcaagacaggagccctgaccctggccaacagcgtggtgtccacccctgggggccctgagggccagtggaccagcgccagcgccagcaccagcccagacacagctgctgccatgacccacacccaccaggccgagagcacagaggccagcggccagacccagaccagcgagcccgccagcagcggcagcaggaccaccagcgctggaacagccacccccagcagcagcggggccagcggcaccacccccagcggcagcgagggcatcagcaccagcggggagaccacccgcttcagcagcaaccccagccgggacagccacaccacccagagcaccacagagctgctgagcgccagcgccagccacggggccatccctgtgtccacaggcatggccagcagcatcgtgcccggcaccttccaccccaccctgtctgaggccagcacagctggccggcccaccggccagagcagccccaccagccccagcgccagcccccaggagacagctgccatcagcaggatggcccagacccagaggaccaggaccagccggggcagtgacaccatcagcctggccagccaggccacagacaccttcagcacagtgccccccaccccacccagcatcaccagcacaggcctgaccagcccccagacagagacccacaccctgagccccagcggcagcggcaagaccttcaccacagccctgatcagcaatgccacccccctgcctgtgacctacgccagcagcgccagcactggacatgccacccccctggccgtgtcctctgccaccagcgccagcacagtgtccagtgacagccccctgaagatggagaccccaggcatgaccacccccagcctgaagacagatggcggccgcaggacagccaccagccccccacccaccaccagccagaccatcatcagcaccatccccagcacagccatgcacaccaggagcacagctgcccccatccccatcctgcctgagcggggcgtgtccctcttcccctatggagctggagctggggacctggagtttgtgcggaggacagtggacttcaccagccccctcttcaagccagccaccggcttccccctgggcagcagcctgcgggacagcctgtacttcacagacaatggccagatcatcttccctgagagtgactaccagatcttctcctaccccaaccccctgcccaccggcttcaccggccgggaccctgtggccctggtggcccccttctgggatgatgctgacttcagcacaggccggggcaccaccttctaccaggagtatgagaccttctacggggagcacagcctgctggtgcagcaggccgagagctggatcaggaagatgaccaacaacggcggctacaaggcccgctgggccctgaaggtgacctgggtgaatgcccacgcctacccagcccagtggaccctgggcagcaacacctaccaggccatcctgagcacagatggcagccgctcctatgccctcttcctgtaccagagcggcggcatgcagtgggatgtggcccagaggagcggcaaccctgtgctgatgggcttcagcagtggagatggctactttgagaacagccccctgatgagccagcctgtgtgggagcgctacagaccagaccgcttcctgaacagcaacagcggcctgcagggcctgcagttctaccgcctgcaccgggaggagcggcccaactaccgcctggagtgcctgcagtggctgaagagccagccccgctggcccagctggggctggaaccaggtgtcctgcccctgctcctggcagcagggcagaagagacctgcgcttccagcctgccagcctgcccccagagtaccagaacagaacagagggcctgctgggcgtgtggaacaacaacccagaagatgacttcaggatgcccaacggcagcaccatccccccaggcagccctgaggagatgctgttccacttcggcatgacctggcagatcaatggaacaggcctgctgggcaagagaaatgaccagctgcccagcaacttcacccctgtgttctacagccagctgcagaagaacagctcctgggccgagcacctgatcagcaactgtgatggagacagcagctgcatctatgacaccctggccctgagaaatgccagcatcggcctgcacacccgggaggtgtccaagaactatgagcaggccaatgccaccctgaaccagtacccacccagcatcaatggaggccgggtcatcgaggcctacaagggccagaccaccctcatccagtacaccagcaatgcagaagatgccaacttcaccctgcgggacagctgcacagacctggagctgtttgaaaatggcaccctgctgtggacccccaagagcctggagcccttcaccctggagatcctggcccggagcgccaagattggcctggccagcgccctgcagcccaggacagtggtgtgccactgcaatgctgagagccagtgcctgtacaaccagaccagccgggtgggcaacagcagcctggaggtggccggctgcaagtgtgatggcggcaccttcggccgctactgtgagggctctgaagatgcctgtgaggagccctgcttccccagcgtgcactgtgtgcctgggaagggctgtgaggcctgcccccccaacctgactggagatggccgccactgtgccgccctgggcagcagcttcctgtgccagaaccagagctgccctgtgaactactgctacaaccagggccactgctacatcagccagaccctgggctgccagcccatgtgcacctgccccccagccttcacagacagccgctgcttcctggccggcaacaacttcagccccaccgtgaacctggagctgcccctgcgggtcatccagctgctgctgtctgaggaggagaatgcctccatggccgaggtgaatgcctctgtggcctaccgcctgggcaccctggacatgagggccttcctgaggaacagccaggtggagagaattgacagcgctgccccagccagcggcagccccatccagcactggatggtgatcagcgagttccagtaccggccccggggccctgtgattgacttcctgaacaaccagctgctggccgctgtggtggaggccttcctgtaccacgtgccccggcgctctgaggagcccagaaatgatgtggtgttccagcccatctctggagaagatgtgagagatgtgacagccctgaatgtgtccaccctgaaggcctacttccgctgtgatggctacaagggctatgacctggtgtacagcccccagagcggcttcacctgtgtgagcccctgcagccggggctactgtgaccatggaggccagtgccagcacctgcccagcggcccccgctgcagctgtgtgtccttcagcatctacacagcctggggcgagcactgtgagcacctgtccatgaagctggatgccttcttcggcatcttcttcggggccctgggcggcctgctgctgctgggcgtgggcacctttgtggtgctgcgcttctggggctgcagcggggcccgcttctcctacttcctgaacagcgctgaggccctgccctag

SEQ ID NO: 160330 - DNA, 16239 bp, synthetic construct
  misc_feature 1..16239: note = Description of Artificial Sequence: Synthetic coding sequence
  source 1..16239: mol_type = other DNA
atgaagggggcccgctggaggagagtgccctgggtgtccctgagctgcctgtgcctgtgcctgctgccccacgtggtgcccggcaccacagaggacaccctcatcaccggcagcaagacagctgcccctgtgaccagcacaggcagcaccacagccaccctggagggccagagcacagctgccagcagcaggaccagcaaccaggacatcagcgccagcagccagaaccaccagaccaagagcacagagaccaccagcaaggcccagacagacaccctgacccagatgatgaccagcaccctcttcagcagccccagcgtgcacaacgtgatggagacagcccccccagatgagatgaccaccagcttccccagctctgtgaccaacaccctgatgatgaccagcaagaccatcaccatgaccaccagcacagacagcaccctgggcaacacagaggagaccagcacagctggaacagagagcagcacccctgtgaccagcgctgtgtccatcacagctggccaggagggccagagcaggaccacctcctggaggaccagcatccaggacaccagcgccagcagccagaaccactggaccaggagcacccagaccacccgggagagccagaccagcaccctgacccacaggaccaccagcacccccagcttcagccccagcgtgcacaacgtgacaggcaccgtgtcccagaagaccagccccagcggggagacagccaccagcagcctgtgcagcgtgaccaacacctccatgatgaccagcgagaagatcaccgtgaccaccagcacaggcagcaccctgggcaaccctggagagaccagctctgtgcctgtgacaggcagcctgatgcctgtgaccagcgctgccctggtgacctttgatcctgagggccagagccctgccaccttcagcaggaccagcacccaggacaccacagccttcagcaagaaccaccagacccagagcgtggagaccaccagggtgtcccagatcaacaccctgaacaccctgacccctgtgaccaccagcacagtgctgagcagccccagcggcttcaaccccagcggcaccgtgtcccaggagaccttccccagcggggagaccaccaccagcagccccagctctgtgagcaacaccttcctggtgaccagcaaggtgttcaggatgcccaccagccgggacagcaccctgggcaacacagaggagaccagcctgtctgtgtctggcaccatcagcgccatcaccagcaaggtgtccaccatctggtggagcgacaccctgagcacagccctgagccccagcagcctgccccccaagatcagcacagccttccacacccagcagagcgagggcgctgagaccaccggccggccccatgagaggagcagcttcagccctggggtgtcccaggagatcttcaccctgcacgagaccaccacctggcccagcagcttcagcagcaagggccacaccacctggagccagacagagctgcccagcaccagcactggagctgccacccggctggtgacaggcaaccccagcactggaacagctggcaccatcccccgggtgcccagcaaggtgtctgccatcggggagcccggggagcccaccacctacagcagccacagcaccaccctgcccaagaccactggagctggggcccagacccagtggacccaggagaccggcaccaccggggaggccctgctgagcagccccagctacagcgtgacccagatgatcaagacagccaccagccccagcagcagccccatgctggacagacacaccagccagcagatcaccacagcccccagcaccaaccacagcaccatccacagcaccagcaccagcccccaggagagccctgctgtgtcccagaggggccacacccaggccccccagaccacccaggagagccagaccaccaggtctgtgagccccatgacagacaccaagacagtgaccaccccaggcagcagcttcaccgccagcggccacagccccagcgagatcgtgccccaggatgcccccaccatctctgctgccaccacctttgccccagcccccactggagatggccacaccacccaggcccccaccacagccctgcaggccgcccccagcagccatgatgccaccctgggccccagcggcggcaccagcctgagcaagacaggagccctgaccctggccaacagcgtggtgtccacccctgggggccctgagggccagtggaccagcgccagcgccagcaccagcccagacacagctgctgccatgacccacacccaccaggccgagagcacagaggccagcggccagacccagaccagcgagcccgccagcagcggcagcaggaccaccagcgctggaacagccacccccagcagcagcggggccagcggcaccacccccagcggcagcgagggcatcagcaccagcggggagaccacccgcttcagcagcaaccccagccgggacagccacaccacccagagcaccacagagctgctgagcgccagcgccagccacggggccatccctgtgtccacaggcatggccagcagcatcgtgcccggcaccttccaccccaccctgtctgaggccagcacagctggccggcccaccggccagagcagccccaccagccccagcgccagcccccaggagacagctgccatcagcaggatggcccagacccagaggaccaggaccagccggggcagtgacaccatcagcctggccagccaggccacagacaccttcagcacagtgccccccaccccacccagcatcaccagcacaggcctgaccagcccccagacagagacccacaccctgagccccagcggcagcggcaagaccttcaccacagccctgatcagcaatgccacccccctgcctgtgacctacgccagcagcgccagcacaggccacaccacccccctgcacgtgacagatgccagctctgtgtccactggacatgccacccccctgcctgtgaccagccccagctctgtgtccacaggccacaccacccccctgcctgtgacagacaccagcagcgagagcactggacatgtgacccccctgcctgtgaccagcttcagcagcgccagcactggagacagcacccccctgcctgtgacagacaccagcagcgccagcactggacatgtgacccccctgcctgtgaccagcctgagcagcgccagcactggagacaccacccccctgcctgtgacagacaccagcagcgccagcactggacatgccaccagcctgcctgtgacagacaccagctctgtgtccacaggccacaccacccccctgcctgtgacagacaccagcagcgccagcactggacatgccaccagcctgcctgtgacagacaccagctctgtgtccacaggccacaccacccccctgcacgtgacagatgccagcagcgccagcacaggccaggccacccccctgcctgtgaccagcctgagctctgtgtccactggagacaccacccccctgcctgtgaccagccccagcagcgccagcactggacatgccacccccctgctggtgacagacaccagcagcgccagcactggacatgccacccccctgcctgtgacagatgccagctctgtgtccacagaccacgccaccagcctgcctgtgaccatccccagcgctgccagcacaggccacaccacccccctgcctgtgacagacaccagcagcgccagcacaggccaggccaccagcctgctggtgacagacaccagctctgtgtccactggagacaccacccccctgcctgtgaccagcaccagcagcgccagcactggacatgtgacccccctgcacgtgaccagccccagcagcgccagcactggacatgccacccccctgcctgtgaccagcctgagcagcgccagcactggagacaccatgcccctgcctgtgaccagccccagcagcgccagcactggagacaccacccccctgcctgtgacagatgccagctctgtgtccacaggccacaccacccccctgcacgtgacagatgccagcagcgccagcacaggccaggccacccccctgcctgtgaccagcctgagctctgtgtccactggagacaccacccccctgcctgtgaccagccccagcagcgccagcactggacatgccacccccctgctggtgacagacaccagcagcgccagcactggacatgccacccccctgcctgtgacagatgccagctctgtgtccacagaccacgccaccagcctgcctgtgaccatccccagcgctgccagcacaggccacaccacccccctgcctgtgacagacaccagcagcgccagcacaggccaggccaccagcctgctggtgacagacaccagctctgtgtccactggagacaccacccccctgcctgtgaccagcaccagcagcgccagcactggacatgtgacccccctgcacgtgaccagccccagcagcgccagcactggacatgccacccccctgcctgtgaccagcctgagcagcgccagcactggagacaccatgcccctgcctgtgaccagccccagcagcgccagcactggagacaccacccccctgcctgtgacagatgccagctctgtgtccacaggccacaccacccccctgcctgtgaccagccccagcagcgccagcacaggccacaccacccccctgcctgtgacagacaccagcagcgccagcaaaggagacaccacccccctgcctgtgaccagccccagcagcgccagcacaggccacaccacccccctgcctgtgacagacaccagcagcgccagcactggagacaccacccccctgcctgtgaccaatgccagcagcctgagcactggacatgccacccccctgcacgtgaccagccccagcagcgccagcactggacatgccacccccctgcctgtgaccagcaccagcagcgccagcactggacatgccacccccctgcctgtgacaggcctgagcagcgccaccacagatgacaccacccggctgcctgtgacagatgtgagcagcgccagcacaggccaggccacccccctgcctgtgaccagcctgagctctgtgtccactggagacaccacccccctgcctgtgaccagccccagcagcgccagcactggacatgccagccccctgctggtgacagatgccagcagcgccagcacaggccaggccacccccctgcctgtgacagacaccagctctgtgtccacagcccacgccacccccctgcctgtgacaggcctgagcagcgccagcacagatgacaccacccggctgcctgtgacagatgtgagcagcgccagcacaggccaggccatccccctgcctgtgaccagccccagcagcgccagcactggagacaccacccccctgcctgtgacagatgccagcagcgccagcactggagacaccaccagcctgcctgtgaccatccccagcagcgccagcagcggccacaccaccagcctgcctgtgacagatgccagctctgtgtccactggacatgccaccagcctgctggtgacagatgccagctctgtgtccactggagacaccacccccctgcctgtgacagacaccaacagcgccagcactggagacaccacccccctgcacgtgacagatgccagctctgtgtccactggacatgccaccagcctgcctgtgaccagcctgagcagcgccagcactggagacaccacccccctgcctgtgaccagccccagcagcgccagcagcggccacaccacccccctgcctgtgacagatgccagctctgtgcccactggacatgccaccagcctgcctgtgacagatgccagctctgtgtccactggacatgccacccccctgcctgtgacagatgccagctctgtgtccactggacatgccacccccctgcctgtgacagacaccagctctgtgtccacaggccaggccacccccctgcctgtgaccagcctgagcagcgccagcactggagacaccacccccctgcctgtgacagacaccagcagcgccagcacaggccaggacacccccctgcctgtgaccagcctgagctctgtgtccactggagacaccacccccctgcctgtgaccaaccccagcagcgccagcactggacatgccacccccctgctggtgacagatgccagcagcatcagcactggacatgccaccagcctgctggtgacagatgccagctctgtgtccactggacatgccacagccctgcatgacacagatgccagcagcctgagcactggagacaccacccccctgcctgtgaccagccccagcagcaccagcactggagacaccacccccctgcctgtgacagagaccagctctgtgtccactggacatgccaccagcctgcctgtgacagacaccagcagcgccagcactggacatgccaccagcctgcctgtgacagacaccagcagcgccagcactggacatgccacccccctgcctgtgacagacaccagcagcgccagcacaggccaggccacccccctgcctgtgaccagccccagcagcgccagcactggacatgccatccccctgctggtgacagacaccagcagcgccagcacaggccaggccacccccctgcctgtgaccagcctgagcagcgccagcactggagacaccacccccctgcctgtgacagatgccagctctgtgtccactggacatgccaccagcctgcctgtgaccagcctgagctctgtgtccactggagacaccacccccctgcctgtgaccagccccagcagcgccagcactggacatgccacccccctgcacgtgacagatgccagcagcgccagcactggacatgccacccccctgcctgtgaccagcctgagcagcgccagcactggagacaccacccccctgcctgtgaccagccccagcagcgccagcactggacatgccacccccctgcacgtgacagatgccagctctgtgtccactggagacaccacccccctgcctgtgaccagcagcagcagcgccagcagcggccacaccacccccctgcctgtgacagatgccagcagcgccagcactggagacaccacccccctgcctgtgacagacaccagcagcgccagcactggacatgccacccacctgcctgtgacaggcctgagcagcgccagcactggagacaccacccggctgcctgtgaccaacgtgagcagcgccagcactggacatgccacccccctgcctgtgaccagcaccagcagcgccagcactggagacaccacccccctgcccggcacagacaccagctctgtgtccacaggccacaccacccccctgctggtgacagatgccagctctgtgtccactggagacaccacccggctgcctgtgaccagccccagcagcgccagcacaggccacaccacccccctgcctgtgacagacacccccagcgccagcactggagacaccacccccctgcctgtgaccaatgccagcagcctgagcaccaggcatgccaccagcctgcacgtgaccagccccagcagcgccagcactggacatgccaccagcctgcctgtgacagacaccagcgctgccagcactggacatgccacccccctgcctgtgaccagcaccagcagcgccagcactggagacaccacccccctgcctgtgacagacacctacagcgccagcacaggccaggccacccccctgcctgtgaccagcctgagctctgtgtccactggagacaccacccccctgcctgtgaccagccccagcagcgccagcactggacatgccacccccctgctggtgacagatgccagcagcgccagcacaggccaggccacccccctgcctgtgaccagcctgagctctgtgtccactggagacaccacccccctgcctgtgaccagccccagcagcgccagcactggacatgccaccagcctgcctgtgacagacaccagcagcgccagcactggagacaccaccagcctgcctgtgacagacaccagcagcgcctacacaggagacaccaccagcctgcctgtgacagacaccagcagcagcagcactggagacaccacccccctgctggtgacagagaccagctctgtgtccactggagacaccacccccctgcctgtgacagacaccagcagcgccagcactggacatgccacccccctgcctgtgaccaacaccagctctgtgtccactggacatgccacccccctgcacgtgaccagccccagcagcgccagcacaggccacaccacccccctgcctgtgacagatgccagctctgtgtccactggacatgccaccagcctgcctgtgacagatgccagcagcgtcttcaccggccacgccaccagcctgcctgtgaccatccccagcagcgccagcagcggccacaccacccccctgcctgtgacagatgccagctctgtgtccactggacatgccaccagcctgcctgtgacagatgccagctctgtgtccactggacatgccacccccctgcctgtgacagatgccagctctgtgtccactggacatgccacccccctgcccctgaccagcctgagctctgtgtccactggagacaccacccccctgcctgtgacagacaccagcagcgccagcacaggccaggccacccccctgcctgtgaccagcctgagctctgtgtccactggagacaccacccccctgcctgtgacagacaccagcagcgccagcactggacatgccaccagcctgcctgtgacagacaccagcagcgccagcactggacatgccacccccctgcctgacacagacaccagcagcgccagcactggacatgccaccctgctgcctgtgacagacaccagcagcgccagcattggacatgccaccagcctgcctgtgacagacaccagcagcatcagcactggacatgccacccccctgcacgtgaccagccccagcagcgccagcactggacatgccacccccctgcctgtgacagacaccagcagcgccagcactggacatgccaaccccctgcacgtgaccagccccagcagcgccagcactggacatgccacccccctgcctgtgacagacaccagcagcgccagcactggacatgccacccccctgcctgtgaccagcctgagctctgtgtccactggagacaccacccccctgcctgtgaccagccccagcagcgccagcacaggccacaccacccccctgcctgtgacagacaccagcagcgccagcacaggccaggccacagccctgcctgtgaccagcaccagcagcgccagcactggagacaccacccccctgcctgtgacagacaccagcagcgccagcacaggccaggccacccccctgcctgtgaccagcctgagctctgtgtccactggagacaccacccccctgcctgtgaccagccccagcagcgccagcactggacatgccacccccctgctggtgacagatgccagcagcgccagcacaggccaggccacccccctgcctgtgaccagcctgagctctgtgtccactggagacaccacccccctgcctgtgaccagccccagcagcgccagcactggacatgccaccagcctgcctgtgacagacaccagcagcgccagcactggagacaccaccagcctgcctgtgacagacaccagcagcgcctacacaggagacaccaccagcctgcctgtgacagacaccagcagcagcagcactggagacaccacccccctgctggtgacagagaccagctctgtgtccactggacatgccacccccctgctggtgacagatgccagcagcgccagcactggacatgccacccccctgcacgtgaccagccccagcagcgccagcactggagacaccacccctgtgcctgtgacagacaccagctctgtgtccactggacatgccacccccctgcctgtgacaggcctgagcagcgccagcactggagacaccacccggctgcctgtgacagacatcagcagcgccagcacaggccaggccacccccctgcctgtgaccaacaccagctctgtgtccactggagacaccatgcccctgcctgtgaccagccccagcagcgccagcactggacatgccacccccctgcctgtgaccagcaccagcagcgccagcactggacatgccacccctgtgcctgtgaccagcaccagcagcgccagcacaggccacaccacccccctgcctgtgacagacaccagcagcgccagcactggagacaccacccccctgcctgtgaccagccccagcagcgccagcacaggccacaccacccccctgcacgtgaccatccccagcagcgccagcactggagacaccagcaccctgcctgtgactggagccagcagcgccagcactggacatgccacccccctgcctgtgacagacaccagctctgtgtccactggacatgccacccccctgcctgtgaccagcctgagctctgtgtccactggagacaccacccccctgcctgtgacagatgccagcagcgccagcacaggccaggccacccccctgcctgtgaccagcctgagctctgtgtccactggagacaccacccccctgctggtgacagatgccagctctgtgtccactggacatgccacccccctgcctgtgacagacaccagcagcgccagcactggagacaccacccggctgcctgtgacagacaccagcagcgccagcacaggccaggccacccccctgcctgtgaccagcctgagctctgtgtccactggagacaccacccccctgctggtgacagatgccagctctgtgtccactggacatgccacccccctgcctgtgacagacaccagcagcgccagcactggagacaccacccggctgcctgtgacagacaccagcagcgccagcacaggccaggccacccccctgcctgtgaccatccccagcagcagcagcagcggccacaccacccccctgcctgtgaccagcaccagctctgtgtccactggacatgtgacccccctgcacgtgaccagccccagcagcgccagcactggacatgtgacccccctgcctgtgaccagcaccagcagcgccagcactggacatgccacccccctgctggtgacagatgccagctctgtgtccactggacatgccacccccctgcctgtgacagatgccagcagcgccagcactggagacaccacccccctgcctgtgacagacaccagcagcgccagcacaggccaggccacccccctgcctgtgaccagcctgagctctgtgtccactggagacaccacccccctgcctgtgacagatgccagcagcgccagcactggacatgccacccccctgcctgtgaccatccccagctctgtgtccactggagacaccatgcccctgcctgtgaccagccccagcagcgccagcactggacatgccacccccctgcctgtgacaggcctgagcagcgccagcactggagacaccacccccctgcctgtgacagacaccagcagcgccagcaccaggcatgccacccccctgcctgtgacagacaccagcagcgccagcacagatgacaccacccggctgcctgtgacagatgtgagcagcgccagcactggacatgccacccccctgcctgtgaccagcaccagcagcgccagcactggagacaccacccccctgcctgtgacagacaccagctctgtgtccactggacatgccaccagcctgcctgtgaccagccgcagcagcgccagcactggacatgccacccccctgcctgtgacagacaccagctctgtgtccactggacatgccacccccctgcctgtgaccagcaccagctctgtgtccactggacatgccacccccctgcctgtgaccagccccagcagcgccagcactggacatgccacccctgtgcctgtgaccagcaccagcagcgccagcactggagacaccacccccctgcctgtgaccaatgccagcagcctgagcactggacatgccacccccctgcacgtgaccagccccagcagcgccagcagaggagacaccagcaccctgcctgtgacagatgccagcagcgccagcactggacatgccacccccctgcccctgaccagcctgagctctgtgtccactggagacaccacccccctgcctgtgacagacaccagcagcgccagcacaggccaggccacccccctgcctgtgaccagcctgagctctgtgtccactggagacaccacccccctgcctgtgaccatccccagcagcgccagcagcggccacaccaccagcctgcctgtgacagatgccagctctgtgtccactggacatggcacccccctgcctgtgaccagcaccagcagcgccagcactggagacaccacccccctgcctgtgacagacaccagcagcgccagcactggacatgccacccccctgcctgtgacagacaccagcagcgccagcactggacatgccacccccctgcctgtgaccagcctgagctctgtgtccactggacatgccacccccctggccgtgtcctctgccaccagcgccagcacagtgtccagtgacagccccctgaagatggagaccccaggcatgaccacccccagcctgaagacagatggcggccgcaggacagccaccagccccccacccaccaccagccagaccatcatcagcaccatccccagcacagccatgcacaccaggagcacagctgcccccatccccatcctgcctgagcggggcgtgtccctcttcccctatggagctggagctggggacctggagtttgtgcggaggacagtggacttcaccagccccctcttcaagccagccaccggcttccccctgggcagcagcctgcgggacagcctgtacttcacagacaatggccagatcatcttccctgagagtgactaccagatcttctcctaccccaaccccctgcccaccggcttcaccggccgggaccctgtggccctggtggcccccttctgggatgatgctgacttcagcacaggccggggcaccaccttctaccaggagtatgagaccttctacggggagcacagcctgctggtgcagcaggccgagagctggatcaggaagatgaccaacaacggcggctacaaggcccgctgggccctgaaggtgacctgggtgaatgcccacgcctacccagcccagtggaccctgggcagcaacacctaccaggccatcctgagcacagatggcagccgctcctatgccctcttcctgtaccagagcggcggcatgcagtgggatgtggcccagaggagcggcaaccctgtgctgatgggcttcagcagtggagatggctactttgagaacagccccctgatgagccagcctgtgtgggagcgctacagaccagaccgcttcctgaacagcaacagcggcctgcagggcctgcagttctaccgcctgcaccgggaggagcggcccaactaccgcctggagtgcctgcagtggctgaagagccagccccgctggcccagctggggctggaaccaggtgtcctgcccctgctcctggcagcagggcagaagagacctgcgcttccagcctgtgtccatcggccgctggggcctgggcagccggcagctgtgcagcttcacctcctggaggggcggcgtgtgctgcagctatggcccctggggcgagttccgggagggctggcacgtgcagaggccctggcagctggcccaggagctggagccccagagctggtgctgccgctggaatgacaagccctacctgtgtgccctgtaccagcagaggcggccccacgtgggctgtgccacctaccggcccccccagcctgcctggatgtttggagacccccacatcaccaccctggatggagtgtcctacaccttcaacggcctgggggacttcctgctggtgggcgcccaggacggcaacagcagcttcctgctgcagggccgcacagcccagacaggcagcgcccaggccaccaacttcatcgcctttgctgcccagtaccgcagcagcagcctgggccctgtgacagtgcagtggctgctggagccccatgatgccatccgggtgctgctggacaaccagacagtgaccttccagcctgaccatgaagatggcggcggccaggagaccttcaatgccactggagtgctgctgagcagaaatggcagcgaggtgtctgccagctttgatggctgggccaccgtgtctgtgattgccctgagcaacatcctgcacgccagcgccagcctgcccccagagtaccagaacagaacagagggcctgctgggcgtgtggaacaacaacccagaagatgacttcaggatgcccaacggcagcaccatccccccaggcagccctgaggagatgctgttccacttcggcatgacctggcagatcaatggaacaggcctgctgggcaagagaaatgaccagctgcccagcaacttcacccctgtgttctacagccagctgcagaagaacagctcctgggccgagcacctgatcagcaactgtgatggagacagcagctgcatctatgacaccctggccctgagaaatgccagcatcggcctgcacacccgggaggtgtccaagaactatgagcaggccaatgccaccctgaaccagtacccacccagcatcaatggaggccgggtcatcgaggcctacaagggccagaccaccctcatccagtacaccagcaatgcagaagatgccaacttcaccctgcgggacagctgcacagacctggagctgtttgaaaatggcaccctgctgtggacccccaagagcctggagcccttcaccctggagatcctggcccggagcgccaagattggcctggccagcgccctgcagcccaggacagtggtgtgccactgcaatgctgagagccagtgcctgtacaaccagaccagccgggtgggcaacagcagcctggaggtggccggctgcaagtgtgatggcggcaccttcggccgctactgtgagggctctgaagatgcctgtgaggagccctgcttccccagcgtgcactgtgtgcctgggaagggctgtgaggcctgcccccccaacctgactggagatggccgccactgtgccgccctgggcagcagcttcctgtgccagaaccagagctgccctgtgaactactgctacaaccagggccactgctacatcagccagaccctgggctgccagcccatgtgcacctgccccccagccttcacagacagccgctgcttcctggccggcaacaacttcagccccaccgtgaacctggagctgcccctgcgggtcatccagctgctgctgtctgaggaggagaatgcctccatggccgaggtgaatgcctctgtggcctaccgcctgggcaccctggacatgagggccttcctgaggaacagccaggtggagagaattgacagcgctgccccagccagcggcagccccatccagcactggatggtgatcagcgagttccagtaccggccccggggccctgtgattgacttcctgaacaaccagctgctggccgctgtggtggaggccttcctgtaccacgtgccccggcgctctgaggagcccagaaatgatgtggtgttccagcccatctctggagaagatgtgagagatgtgacagccctgaatgtgtccaccctgaaggcctacttccgctgtgatggctacaagggctatgacctggtgtacagcccccagagcggcttcacctgtgtgagcccctgcagccggggctactgtgaccatggaggccagtgccagcacctgcccagcggcccccgctgcagctgtgtgtccttcagcatctacacagcctggggcgagcactgtgagcacctgtccatgaagctggatgccttcttcggcatcttcttcggggccctgggcggcctgctgctgctgggcgtgggcacctttgtggtgctgcgcttctggggctgcagcggggcccgcttctcctacttcctgaacagcgctgaggccctgccctag

SEQ ID NO: 160331 - DNA, 16083 bp, synthetic construct
  misc_feature 1..16083: note = Description of Artificial Sequence: Synthetic coding sequence
  source 1..16083: mol_type = other DNA
atgaagggggcccgctggaggagagtgccctgggtgtccctgagctgcctgtgcctgtgcctgctgccccacgtggtgcccggcaccacagaggacaccctcatcaccggcagcaagacagctgcccctgtgaccagcacaggcagcaccacagccaccctggagggccagagcacagctgccagcagcaggaccagcaaccaggacatcagcgccagcagccagaaccaccagaccaagagcacagagaccaccagcaaggcccagacagacaccctgacccagatgatgaccagcaccctcttcagcagccccagcgtgcacaacgtgatggagacagcccccccagatgagatgaccaccagcttccccagctctgtgaccaacaccctgatgatgaccagcaagaccatcaccatgaccaccagcacagacagcaccctgggcaacacagaggagaccagcacagctggaacagagagcagcacccctgtgaccagcgctgtgtccatcacagctggccaggagggccagagcaggaccacctcctggaggaccagcatccaggacaccagcgccagcagccagaaccactggaccaggagcacccagaccacccgggagagccagaccagcaccctgacccacaggaccaccagcacccccagcttcagccccagcgtgcacaacgtgacaggcaccgtgtcccagaagaccagccccagcggggagacagccaccagcagcctgtgcagcgtgaccaacacctccatgatgaccagcgagaagatcaccgtgaccaccagcacaggcagcaccctgggcaaccctggagagaccagctctgtgcctgtgacaggcagcctgatgcctgtgaccagcgctgccctggtgacctttgatcctgagggccagagccctgccaccttcagcaggaccagcacccaggacaccacagccttcagcaagaaccaccagacccagagcgtggagaccaccagggtgtcccagatcaacaccctgaacaccctgacccctgtgaccaccagcacagtgctgagcagccccagcggcttcaaccccagcggcaccgtgtcccaggagaccttccccagcggggagaccaccaccagcagccccagctctgtgagcaacaccttcctggtgaccagcaaggtgttcaggatgcccaccagccgggacagcaccctgggcaacacagaggagaccagcctgtctgtgtctggcaccatcagcgccatcaccagcaaggtgtccaccatctggtggagcgacaccctgagcacagccctgagccccagcagcctgccccccaagatcagcacagccttccacacccagcagagcgagggcgctgagaccaccggccggccccatgagaggagcagcttcagccctggggtgtcccaggagatcttcaccctgcacgagaccaccacctggcccagcagcttcagcagcaagggccacaccacctggagccagacagagctgcccagcaccagcactggagctgccacccggctggtgacaggcaaccccagcactggaacagctggcaccatcccccgggtgcccagcaaggtgtctgccatcggggagcccggggagcccaccacctacagcagccacagcaccaccctgcccaagaccactggagctggggcccagacccagtggacccaggagaccggcaccaccggggaggccctgctgagcagccccagctacagcgtgacccagatgatcaagacagccaccagccccagcagcagccccatgctggacagacacaccagccagcagatcaccacagcccccagcaccaaccacagcaccatccacagcaccagcaccagcccccaggagagccctgctgtgtcccagaggggccacacccaggccccccagaccacccaggagagccagaccaccaggtctgtgagccccatgacagacaccaagacagtgaccaccccaggcagcagcttcaccgccagcggccacagccccagcgagatcgtgccccaggatgcccccaccatctctgctgccaccacctttgccccagcccccactggagatggccacaccacccaggcccccaccacagccctgcaggccgcccccagcagccatgatgccaccctgggccccagcggcggcaccagcctgagcaagacaggagccctgaccctggccaacagcgtggtgtccacccctgggggccctgagggccagtggaccagcgccagcgccagcaccagcccagacacagctgctgccatgacccacacccaccaggccgagagcacagaggccagcggccagacccagaccagcgagcccgccagcagcggcagcaggaccaccagcgctggaacagccacccccagcagcagcggggccagcggcaccacccccagcggcagcgagggcatcagcaccagcggggagaccacccgcttcagcagcaaccccagccgggacagccacaccacccagagcaccacagagctgctgagcgccagcgccagccacggggccatccctgtgtccacaggcatggccagcagcatcgtgcccggcaccttccaccccaccctgtctgaggccagcacagctggccggcccaccggccagagcagccccaccagccccagcgccagcccccaggagacagctgccatcagcaggatggcccagacccagaggaccaggaccagccggggcagtgacaccatcagcctggccagccaggccacagacaccttcagcacagtgccccccaccccacccagcatcaccagcacaggcctgaccagcccccagacagagacccacaccctgagccccagcggcagcggcaagaccttcaccacagccctgatcagcaatgccacccccctgcctgtgacctacgccagcagcgccagcacaggccacaccacccccctgcacgtgacagatgccagctctgtgtccactggacatgccacccccctgcctgtgaccagccccagctctgtgtccacaggccacaccacccccctgcctgtgacagacaccagcagcgagagcactggacatgtgacccccctgcctgtgaccagcttcagcagcgccagcactggagacagcacccccctgcctgtgacagacaccagcagcgccagcactggacatgtgacccccctgcctgtgaccagcctgagcagcgccagcactggagacaccacccccctgcctgtgacagacaccagcagcgccagcactggacatgccaccagcctgcctgtgacagacaccagctctgtgtccacaggccacaccacccccctgcctgtgacagacaccagcagcgccagcactggacatgccaccagcctgcctgtgacagacaccagctctgtgtccacaggccacaccacccccctgcacgtgacagatgccagcagcgccagcacaggccaggccacccccctgcctgtgaccagcctgagctctgtgtccactggagacaccacccccctgcctgtgaccagccccagcagcgccagcactggacatgccacccccctgctggtgacagacaccagcagcgccagcactggacatgccacccccctgcctgtgacagatgccagctctgtgtccacagaccacgccaccagcctgcctgtgaccatccccagcgctgccagcacaggccacaccacccccctgcctgtgacagacaccagcagcgccagcacaggccaggccaccagcctgctggtgacagacaccagctctgtgtccactggagacaccacccccctgcctgtgaccagcaccagcagcgccagcactggacatgtgacccccctgcacgtgaccagccccagcagcgccagcactggacatgccacccccctgcctgtgaccagcctgagcagcgccagcactggagacaccatgcccctgcctgtgaccagccccagcagcgccagcactggagacaccacccccctgcctgtgacagatgccagctctgtgtccacaggccacaccacccccctgcacgtgacagatgccagcagcgccagcacaggccaggccacccccctgcctgtgaccagcctgagctctgtgtccactggagacaccacccccctgcctgtgaccagccccagcagcgccagcactggacatgccacccccctgctggtgacagacaccagcagcgccagcactggacatgccacccccctgcctgtgacagatgccagctctgtgtccacagaccacgccaccagcctgcctgtgaccatccccagcgctgccagcacaggccacaccacccccctgcctgtgacagacaccagcagcgccagcacaggccaggccaccagcctgctggtgacagacaccagctctgtgtccactggagacaccacccccctgcctgtgaccagcaccagcagcgccagcactggacatgtgacccccctgcacgtgaccagccccagcagcgccagcactggacatgccacccccctgcctgtgaccagcctgagcagcgccagcactggagacaccatgcccctgcctgtgaccagccccagcagcgccagcactggagacaccacccccctgcctgtgacagatgccagctctgtgtccacaggccacaccacccccctgcctgtgaccagccccagcagcgccagcacaggccacaccacccccctgcctgtgacagacaccagcagcgccagcaaaggagacaccacccccctgcctgtgaccagccccagcagcgccagcacaggccacaccacccccctgcctgtgacagacaccagcagcgccagcactggagacaccacccccctgcctgtgaccaatgccagcagcctgagcactggacatgccacccccctgcacgtgaccagccccagcagcgccagcactggacatgccacccccctgcctgtgaccagcaccagcagcgccagcactggacatgccacccccctgcctgtgacaggcctgagcagcgccaccacagatgacaccacccggctgcctgtgacagatgtgagcagcgccagcacaggccaggccacccccctgcctgtgaccagcctgagctctgtgtccactggagacaccacccccctgcctgtgaccagccccagcagcgccagcactggacatgccagccccctgctggtgacagatgccagcagcgccagcacaggccaggccacccccctgcctgtgacagacaccagctctgtgtccacagcccacgccacccccctgcctgtgacaggcctgagcagcgccagcacagatgacaccacccggctgcctgtgacagatgtgagcagcgccagcacaggccaggccatccccctgcctgtgaccagccccagcagcgccagcactggagacaccacccccctgcctgtgacagatgccagcagcgccagcactggagacaccaccagcctgcctgtgaccatccccagcagcgccagcagcggccacaccaccagcctgcctgtgacagatgccagctctgtgtccactggacatgccaccagcctgctggtgacagatgccagctctgtgtccactggagacaccacccccctgcctgtgacagacaccaacagcgccagcactggagacaccacccccctgcacgtgacagatgccagctctgtgtccactggacatgccaccagcctgcctgtgaccagcctgagcagcgccagcactggagacaccacccccctgcctgtgaccagccccagcagcgccagcagcggccacaccacccccctgcctgtgacagatgccagctctgtgcccactggacatgccaccagcctgcctgtgacagatgccagctctgtgtccactggacatgccacccccctgcctgtgacagatgccagctctgtgtccactggacatgccacccccctgcctgtgacagacaccagctctgtgtccacaggccaggccacccccctgcctgtgaccagcctgagcagcgccagcactggagacaccacccccctgcctgtgacagacaccagcagcgccagcacaggccaggacacccccctgcctgtgaccagcctgagctctgtgtccactggagacaccacccccctgcctgtgaccaaccccagcagcgccagcactggacatgccacccccctgctggtgacagatgccagcagcatcagcactggacatgccaccagcctgctggtgacagatgccagctctgtgtccactggacatgccacagccctgcatgacacagatgccagcagcctgagcactggagacaccacccccctgcctgtgaccagccccagcagcaccagcactggagacaccacccccctgcctgtgacagagaccagctctgtgtccactggacatgccaccagcctgcctgtgacagacaccagcagcgccagcactggacatgccaccagcctgcctgtgacagacaccagcagcgccagcactggacatgccacccccctgcctgtgacagacaccagcagcgccagcacaggccaggccacccccctgcctgtgaccagccccagcagcgccagcactggacatgccatccccctgctggtgacagacaccagcagcgccagcacaggccaggccacccccctgcctgtgaccagcctgagcagcgccagcactggagacaccacccccctgcctgtgacagatgccagctctgtgtccactggacatgccaccagcctgcctgtgaccagcctgagctctgtgtccactggagacaccacccccctgcctgtgaccagccccagcagcgccagcactggacatgccacccccctgcacgtgacagatgccagcagcgccagcactggacatgccacccccctgcctgtgaccagcctgagcagcgccagcactggagacaccacccccctgcctgtgaccagccccagcagcgccagcactggacatgccacccccctgcacgtgacagatgccagctctgtgtccactggagacaccacccccctgcctgtgaccagcagcagcagcgccagcagcggccacaccacccccctgcctgtgacagatgccagcagcgccagcactggagacaccacccccctgcctgtgacagacaccagcagcgccagcactggacatgccacccacctgcctgtgacaggcctgagcagcgccagcactggagacaccacccggctgcctgtgaccaacgtgagcagcgccagcactggacatgccacccccctgcctgtgaccagcaccagcagcgccagcactggagacaccacccccctgcccggcacagacaccagctctgtgtccacaggccacaccacccccctgctggtgacagatgccagctctgtgtccactggagacaccacccggctgcctgtgaccagccccagcagcgccagcacaggccacaccacccccctgcctgtgacagacacccccagcgccagcactggagacaccacccccctgcctgtgaccaatgccagcagcctgagcaccaggcatgccaccagcctgcacgtgaccagccccagcagcgccagcactggacatgccaccagcctgcctgtgacagacaccagcgctgccagcactggacatgccacccccctgcctgtgaccagcaccagcagcgccagcactggagacaccacccccctgcctgtgacagacacctacagcgccagcacaggccaggccacccccctgcctgtgaccagcctgagctctgtgtccactggagacaccacccccctgcctgtgaccagccccagcagcgccagcactggacatgccacccccctgctggtgacagatgccagcagcgccagcacaggccaggccacccccctgcctgtgaccagcctgagctctgtgtccactggagacaccacccccctgcctgtgaccagccccagcagcgccagcactggacatgccaccagcctgcctgtgacagacaccagcagcgccagcactggagacaccaccagcctgcctgtgacagacaccagcagcgcctacacaggagacaccaccagcctgcctgtgacagacaccagcagcagcagcactggagacaccacccccctgctggtgacagagaccagctctgtgtccactggagacaccacccccctgcctgtgacagacaccagcagcgccagcactggacatgccacccccctgcctgtgaccaacaccagctctgtgtccactggacatgccacccccctgcacgtgaccagccccagcagcgccagcacaggccacaccacccccctgcctgtgacagatgccagctctgtgtccactggacatgccaccagcctgcctgtgacagatgccagcagcgtcttcaccggccacgccaccagcctgcctgtgaccatccccagcagcgccagcagcggccacaccacccccctgcctgtgacagatgccagctctgtgtccactggacatgccaccagcctgcctgtgacagatgccagctctgtgtccactggacatgccacccccctgcctgtgacagatgccagctctgtgtccactggacatgccacccccctgcccctgaccagcctgagctctgtgtccactggagacaccacccccctgcctgtgacagacaccagcagcgccagcacaggccaggccacccccctgcctgtgaccagcctgagctctgtgtccactggagacaccacccccctgcctgtgacagacaccagcagcgccagcactggacatgccaccagcctgcctgtgacagacaccagcagcgccagcactggacatgccacccccctgcctgacacagacaccagcagcgccagcactggacatgccaccctgctgcctgtgacagacaccagcagcgccagcattggacatgccaccagcctgcctgtgacagacaccagcagcatcagcactggacatgccacccccctgcacgtgaccagccccagcagcgccagcactggacatgccacccccctgcctgtgacagacaccagcagcgccagcactggacatgccaaccccctgcacgtgaccagccccagcagcgccagcactggacatgccacccccctgcctgtgacagacaccagcagcgccagcactggacatgccacccccctgcctgtgaccagcctgagctctgtgtccactggagacaccacccccctgcctgtgaccagccccagcagcgccagcacaggccacaccacccccctgcctgtgacagacaccagcagcgccagcacaggccaggccacagccctgcctgtgaccagcaccagcagcgccagcactggagacaccacccccctgcctgtgacagacaccagcagcgccagcacaggccaggccacccccctgcctgtgaccagcctgagctctgtgtccactggagacaccacccccctgcctgtgaccagccccagcagcgccagcactggacatgccacccccctgctggtgacagatgccagcagcgccagcacaggccaggccacccccctgcctgtgaccagcctgagctctgtgtccactggagacaccacccccctgcctgtgaccagccccagcagcgccagcactggacatgccaccagcctgcctgtgacagacaccagcagcgccagcactggagacaccaccagcctgcctgtgacagacaccagcagcgcctacacaggagacaccaccagcctgcctgtgacagacaccagcagcagcagcactggagacaccacccccctgctggtgacagagaccagctctgtgtccactggacatgccacccccctgctggtgacagatgccagcagcgccagcactggacatgccacccccctgcacgtgaccagccccagcagcgccagcactggagacaccacccctgtgcctgtgacagacaccagctctgtgtccactggacatgccacccccctgcctgtgacaggcctgagcagcgccagcactggagacaccacccggctgcctgtgacagacatcagcagcgccagcacaggccaggccacccccctgcctgtgaccaacaccagctctgtgtccactggagacaccatgcccctgcctgtgaccagccccagcagcgccagcactggacatgccacccccctgcctgtgaccagcaccagcagcgccagcactggacatgccacccctgtgcctgtgaccagcaccagcagcgccagcacaggccacaccacccccctgcctgtgacagacaccagcagcgccagcactggagacaccacccccctgcctgtgaccagccccagcagcgccagcacaggccacaccacccccctgcacgtgaccatccccagcagcgccagcactggagacaccagcaccctgcctgtgactggagccagcagcgccagcactggacatgccacccccctgcctgtgacagacaccagctctgtgtccactggacatgccacccccctgcctgtgaccagcctgagctctgtgtccactggagacaccacccccctgcctgtgacagatgccagcagcgccagcacaggccaggccacccccctgcctgtgaccagcctgagctctgtgtccactggagacaccacccccctgctggtgacagatgccagctctgtgtccactggacatgccacccccctgcctgtgacagacaccagcagcgccagcactggagacaccacccggctgcctgtgacagacaccagcagcgccagcacaggccaggccacccccctgcctgtgaccagcctgagctctgtgtccactggagacaccacccccctgctggtgacagatgccagctctgtgtccactggacatgccacccccctgcctgtgacagacaccagcagcgccagcactggagacaccacccggctgcctgtgacagacaccagcagcgccagcacaggccaggccacccccctgcctgtgaccatccccagcagcagcagcagcggccacaccacccccctgcctgtgaccagcaccagctctgtgtccactggacatgtgacccccctgcacgtgaccagccccagcagcgccagcactggacatgtgacccccctgcctgtgaccagcaccagcagcgccagcactggacatgccacccccctgctggtgacagatgccagctctgtgtccactggacatgccacccccctgcctgtgacagatgccagcagcgccagcactggagacaccacccccctgcctgtgacagacaccagcagcgccagcacaggccaggccacccccctgcctgtgaccagcctgagctctgtgtccactggagacaccacccccctgcctgtgacagatgccagcagcgccagcactggacatgccacccccctgcctgtgaccatccccagctctgtgtccactggagacaccatgcccctgcctgtgaccagccccagcagcgccagcactggacatgccacccccctgcctgtgacaggcctgagcagcgccagcactggagacaccacccccctgcctgtgacagacaccagcagcgccagcaccaggcatgccacccccctgcctgtgacagacaccagcagcgccagcacagatgacaccacccggctgcctgtgacagatgtgagcagcgccagcactggacatgccacccccctgcctgtgaccagcaccagcagcgccagcactggagacaccacccccctgcctgtgacagacaccagctctgtgtccactggacatgccaccagcctgcctgtgaccagccgcagcagcgccagcactggacatgccacccccctgcctgtgacagacaccagctctgtgtccactggacatgccacccccctgcctgtgaccagcaccagctctgtgtccactggacatgccacccccctgcctgtgaccagccccagcagcgccagcactggacatgccacccctgtgcctgtgaccagcaccagcagcgccagcactggagacaccacccccctgcctgtgaccaatgccagcagcctgagcactggacatgccacccccctgcacgtgaccagccccagcagcgccagcagaggagacaccagcaccctgcctgtgacagatgccagcagcgccagcactggacatgccacccccctgcccctgaccagcctgagctctgtgtccactggagacaccacccccctgcctgtgacagacaccagcagcgccagcacaggccaggccacccccctgcctgtgaccagcctgagctctgtgtccactggagacaccacccccctgcctgtgaccatccccagcagcgccagcagcggccacaccaccagcctgcctgtgacagatgccagctctgtgtccactggacatggcacccccctgcctgtgaccagcaccagcagcgccagcactggagacaccacccccctgcctgtgacagacaccagcagcgccagcactggacatgccacccccctgcctgtgacagacaccagcagcgccagcactggacatgccacccccctgcctgtgaccagcctgagctctgtgtccactggacatgccacccccctggccgtgtcctctgccaccagcgccagcacagtgtccagtgacagccccctgaagatggagaccccaggcatgaccacccccagcctgaagacagatggcggccgcaggacagccaccagccccccacccaccaccagccagaccatcatcagcaccatccccagcacagccatgcacaccaggagcacagctgcccccatccccatcctgcctgagcggggcgtgtccctcttcccctatggagctggagctggggacctggagtttgtgcggaggacagtggacttcaccagccccctcttcaagccagccaccggcttccccctgggcagcagcctgcgggacagcctgtacttcacagacaatggccagatcatcttccctgagagtgactaccagatcttctcctaccccaaccccctgcccaccggcttcaccggccgggaccctgtggccctggtggcccccttctgggatgatgctgacttcagcacaggccggggcaccaccttctaccagagcaacacctaccaggccatcctgagcacagatggcagccgctcctatgccctcttcctgtaccagagcggcggcatgcagtgggatgtggcccagaggagcggcaaccctgtgctgatgggcttcagcagtggagatggctactttgagaacagccccctgatgagccagcctgtgtgggagcgctacagaccagaccgcttcctgaacagcaacagcggcctgcagggcctgcagttctaccgcctgcaccgggaggagcggcccaactaccgcctggagtgcctgcagtggctgaagagccagccccgctggcccagctggggctggaaccaggtgtcctgcccctgctcctggcagcagggcagaagagacctgcgcttccagcctgtgtccatcggccgctggggcctgggcagccggcagctgtgcagcttcacctcctggaggggcggcgtgtgctgcagctatggcccctggggcgagttccgggagggctggcacgtgcagaggccctggcagctggcccaggagctggagccccagagctggtgctgccgctggaatgacaagccctacctgtgtgccctgtaccagcagaggcggccccacgtgggctgtgccacctaccggcccccccagcctgcctggatgtttggagacccccacatcaccaccctggatggagtgtcctacaccttcaacggcctgggggacttcctgctggtgggcgcccaggacggcaacagcagcttcctgctgcagggccgcacagcccagacaggcagcgcccaggccaccaacttcatcgcctttgctgcccagtaccgcagcagcagcctgggccctgtgacagtgcagtggctgctggagccccatgatgccatccgggtgctgctggacaaccagacagtgaccttccagcctgaccatgaagatggcggcggccaggagaccttcaatgccactggagtgctgctgagcagaaatggcagcgaggtgtctgccagctttgatggctgggccaccgtgtctgtgattgccctgagcaacatcctgcacgccagcgccagcctgcccccagagtaccagaacagaacagagggcctgctgggcgtgtggaacaacaacccagaagatgacttcaggatgcccaacggcagcaccatccccccaggcagccctgaggagatgctgttccacttcggcatgacctggcagatcaatggaacaggcctgctgggcaagagaaatgaccagctgcccagcaacttcacccctgtgttctacagccagctgcagaagaacagctcctgggccgagcacctgatcagcaactgtgatggagacagcagctgcatctatgacaccctggccctgagaaatgccagcatcggcctgcacacccgggaggtgtccaagaactatgagcaggccaatgccaccctgaaccagtacccacccagcatcaatggaggccgggtcatcgaggcctacaagggccagaccaccctcatccagtacaccagcaatgcagaagatgccaacttcaccctgcgggacagctgcacagacctggagctgtttgaaaatggcaccctgctgtggacccccaagagcctggagcccttcaccctggagatcctggcccggagcgccaagattggcctggccagcgccctgcagcccaggacagtggtgtgccactgcaatgctgagagccagtgcctgtacaaccagaccagccgggtgggcaacagcagcctggaggtggccggctgcaagtgtgatggcggcaccttcggccgctactgtgagggctctgaagatgcctgtgaggagccctgcttccccagcgtgcactgtgtgcctgggaagggctgtgaggcctgcccccccaacctgactggagatggccgccactgtgccgccctgggcagcagcttcctgtgccagaaccagagctgccctgtgaactactgctacaaccagggccactgctacatcagccagaccctgggctgccagcccatgtgcacctgccccccagccttcacagacagccgctgcttcctggccggcaacaacttcagccccaccgtgaacctggagctgcccctgcgggtcatccagctgctgctgtctgaggaggagaatgcctccatggccgaggtgaatgcctctgtggcctaccgcctgggcaccctggacatgagggccttcctgaggaacagccaggtggagagaattgacagcgctgccccagccagcggcagccccatccagcactggatggtgatcagcgagttccagtaccggccccggggccctgtgattgacttcctgaacaaccagctgctggccgctgtggtggaggccttcctgtaccacgtgccccggcgctctgaggagcccagaaatgatgtggtgttccagcccatctctggagaagatgtgagagatgtgacagccctgaatgtgtccaccctgaaggcctacttccgctgtgatggctacaagggctatgacctggtgtacagcccccagagcggcttcacctgtgtgagcccctgcagccggggctactgtgaccatggaggccagtgccagcacctgcccagcggcccccgctgcagctgtgtgtccttcagcatctacacagcctggggcgagcactgtgagcacctgtccatgaagctggatgccttcttcggcatcttcttcggggccctgggcggcctgctgctgctgggcgtgggcacctttgtggtgctgcgcttctggggctgcagcggggcccgcttctcctacttcctgaacagcgctgaggccctgccctag

SEQ ID NO: 160332 - DNA, 1863 bp, synthetic construct
  misc_feature 1..1863: note = Description of Artificial Sequence: Synthetic coding sequence
  source 1..1863: mol_type = other DNA
atgtctgtgggccgcaggaagctggccctgctgtgggccctggccctggccctggcctgcaccaggcacacaggccacgcccaggacggcagcagcgagagcagctacaagcaccacccagccctgagccccatcgcccggggccccagcggcgtgcccctgcggggggccaccgtcttccccagcctgcggaccatccctgtggtgcgggccagcaacccagcccacaacggccgggtgtgcagcacctggggcagcttccactacaagacctttgatggagatgtgttccgcttccctggcctgtgcaactacgtgttcagcgagcactgtggggccgcctatgaggacttcaacccagccaccccccagcccggggtgtctggcccccacgccgagcagggcccccatgaaggaggctggaggggccaccctgctgaccagggcctgcggcccggccagaggcctcctggccctgctgccctgcagcctgtgtggggcccccacagcagagctgctgccaccccccgctggaggcctggctgggccctgagcagctgtggcaccaccatgacagcctgctgctggctggacaccaagtatgccaacaagctgtgggccctgtggggcctgcagagagatgcccggggccagagggcccccctgccccagcaccaggccgacacccacggcatccgggagcccgcccgctggaccacccccaggagctctgtgaggaccctgagcctgaacccccggggcacagcccccctggccctgggcatctgtgaggagctgctgcacggccagctgttcagcggctgtgtggccctggtggatgtgggcagctacctggaggcctgccggcaggacctgtgcttctgtgaggacacagacctgctgagctgtgtgtgccacaccctggccgagtacagccggcagtgcacccacgccggcggcctgccccaggactggaggggccctgacttctgcccccagaagtgccccaacaacatgcagtaccatgaatgtcgcagcccctgtgccgacacctgcagcaaccaggagcacagccgggcctgtgaggaccactgtgtggccggctgcttctgcccagagggcaccgtgctggatgacatcggccagacaggctgtgtgcctgtgtccaaatgtgcctgtgtgtacaacggggccgcctatgcccctggggccacctacagcacagactgcaccaactgcacctgcagcggcggccgctggagctgccaggaggtgccctgccccggcacctgcagcgtgctgggcggggcccacttcagcacctttgatggcaagcagtacacagtgcacggggactgcagctatgtgctgaccaagccctgtgacagcagcgccttcaccgtgctggccgagctgcggcgctgtggcctgacagacagcgagacctgcctgaagtctgtgaccctgagcctggatggagtgcagacagtggtggtgatcaaggccagcggggaggtgttcctgaaccagatctacacccagctgcccatctctgctgccaacgtgaccatcttccggcccagcaccttcttcatcatcgcccagaccagcctgggcctgcagctgaacctgcagctggtgcccaccatgcagctgttcatgcagctggcccccaagctgcggggccagacctgtggcctgtgtggcaacttcaacagcatccaggctgatgacttccgcaccctgtctggagtggtggaggccacagctgctgccttcttcaacaccttcaagacccaggccgcctgccccaacatcagaaattcctttgaggacccctgcagcctgtctgtggagaactag

SEQ ID NO: 160333 - DNA, 1872 bp, synthetic construct
  misc_feature 1..1872: note = Description of Artificial Sequence: Synthetic coding sequence
  source 1..1872: mol_type = other DNA
atgtctgtgggccgcaggaagctggccctgctgtgggccctggccctggccctggcctgcaccaggcacacaggccacgcccaggacggcagcagcgagagcagctacaagcaccacccagccctgagccccatcgcccggggccccagcggcgtgcccctgcggggggccaccgtcttccccagcctgcggaccatccctgtggtgcgggccagcaacccagcccacaacggccgggtgtgcagcacctggggcagcttccactacaagacctttgatggagatgtgttccgcttccctggcctgtgcaactacgtgttcagcgagcactgtggggccgcctatgaggacttcaacatccagctgcggcgcagccaggagagcgctgcccccaccctgagccgggtgctgatgaaggtggatggagtggtgatccagctgaccaagggctctgtgctggtgaatggccaccctgtgctgctgcccttcagccagagcggcgtgctgatccagcagagcagcagctacaccaaggtggaggcccggctgggcctggtgctgatgtggaaccatgatgacagcctgctgctggagctggacaccaagtatgccaacaagacctgtggcctgtgtggggacttcaacggcatgcctgtggtgtctgagctgctgagccacaacaccaagctgacccccatggagtttggaaacctgcagaagatggatgaccccacagagcagtgccaggaccctgtgcctgagcccccaagaaactgcagcactggatttggcatctgtgaggagctgctgcacggccagctgttcagcggctgtgtggccctggtggatgtgggcagctacctggaggcctgccggcaggacctgtgcttctgtgaggacacagacctgctgagctgtgtgtgccacaccctggccgagtacagccggcagtgcacccatgctgggggcctgccccaggactggaggggccctgacttctgcccccagaagtgccccaacaacatgcagtaccacgagtgccgcagcccctgtgccgacacctgcagcaaccaggagcacagccgggcctgtgaggaccactgtgtggccggctgcttctgcccagagggcaccgtgctggatgacatcggccagacaggctgtgtgcctgtgtccaaatgtgcctgtgtgtacaatggagctgcctatgcccctggggccacctacagcacagactgcaccaactgcacctgcagcggcggccgctggagctgccaggaggtgccctgccccggcacctgcagcgtgctgggcggggcccacttcagcacctttgatggcaagcagtacacagtgcatggagactgcagctatgtgctgaccaagccctgtgacagcagcgccttcaccgtgctggccgagctgcggcgctgtggcctgacagattctgagacctgcctgaagtctgtgaccctgagcctggatggagtgcagacagtggtggtgatcaaggccagcggggaggtgttcctgaaccagatctacacccagctgcccatctctgctgccaacgtgaccatcttccggcccagcaccttcttcatcatcgcccagaccagcctgggcctgcagctgaacctgcagctggtgcccaccatgcagctgttcatgcagctggcccccaagctgcggggccagacctgtggcctgtgtggcaacttcaacagcatccaggctgatgacttccgcaccctgagcggcgtggtggaggccacagctgctgccttcttcaacaccttcaagacccaggccgcctgccccaacatccggaacagctttgaggacccctgcagcctgtctgtggagaactag

SEQ ID NO: 160334 - DNA, 17121 bp, synthetic construct
  misc_feature 1..17121: note = Description of Artificial Sequence: Synthetic coding sequence
  source 1..17121: mol_type = other DNA
atgggcgcccccagcgcctgcaggaccctggtgctggccctggccgccatgctggtggtgccccaggccgagacccagggccctgtggagcccagctgggagaatgccggccacaccatggatggaggagcccccaccagcagccccaccaggagagtgtcctttgtgccccctgtgaccgtcttccccagcctgagccccctgaacccagcccacaacggccgggtgtgcagcacctggggagacttccactacaagacctttgatggagatgtgttccgcttccctggcctgtgcaactacgtgttcagcgagcactgcagagctgcctatgaggacttcaacgtgcagctgcggcggggcctggtgggcagcaggcctgtggtgaccagggtggtgatcaaggcccagggcctggtgctggaggccagcaatggatctgtgctgatcaatggccagcgggaggagctgccctacagcaggacaggcctgctggtggagcagagcggggactacatcaaggtgtccatccggctggtgctgaccttcctgtggaatggagaggacagcgccctgctggagctggaccccaagtatgccaaccagacctgtggcctgtgtggggacttcaacggcctgcctgccttcaatgagttctacgcccacaatgcccggctgacccccctgcagtttggaaacctgcagaagctggatggccccacagagcagtgcccagaccccctgcccctgcctgctggcaactgcacagatgaggagggcatctgccacaggaccctgctgggccctgcctttgctgaatgtcatgccctggtggacagcacagcctacctggccgcctgtgcccaggacctgtgccgctgccccacctgcccctgtgccacctttgtggagtacagccggcagtgtgcccacgccggcggccagcccaggaactggcgctgcccagagctgtgccccaggacctgccccctgaacatgcagcaccaggagtgtggcagcccctgcacagacacctgcagcaacccccagagggcccagctgtgtgaggaccactgtgtggatggctgcttctgccccccaggcagcacagtgctggatgacatcacccacagcggctgcctgcccctgggccagtgcccctgcacccacggcggccgcacctacagccctggcaccagcttcaacaccacctgcagcagctgcacctgcagcggcggcctgtggcagtgccaggacctgccctgccccggcacctgcagcgtgcagggcggggcccacatcagcacctatgatgagaagctgtatgacctgcatggagactgcagctatgtgctgagcaagaagtgtgccgacagcagcttcaccgtgctggccgagctgaggaaatgtggcctgacagacaatgaaaactgcctgaaggctgtgaccctgagcctggatggaggagacacagccatccgggtgcaggctgatggcggcgtcttcctgaacagcatctacacccagctgcccctgtctgctgccaacatcaccctcttcacccccagcagcttcttcatcgtggtgcagacaggcctgggcctgcagctgctggtgcagctggtgcccctgatgcaggtgtttgtgcggctggaccctgcccaccagggccagatgtgtggcctgtgtggcaacttcaaccagaaccaggctgatgacttcaccgccctgagcggcgtggtggaggccaccggggccgcctttgccaacacctggaaggcccaggccgcctgtgccaatgccaggaacagctttgaggacccctgcagcctgtctgtggagaatgaaaattatgcccggcactggtgcagccggctgacagaccccaacagcgccttcagccgctgccacagcatcatcaaccccaagcccttccacagcaactgcatgtttgacacctgcaactgtgagaggtctgaggactgcctgtgtgccgccctgagcagctatgtgcacgcctgtgccgccaagggcgtgcagctgagtgactggagagatggagtgtgcaccaagtacatgcagaactgccccaagagccagagatatgcctacgtggtggatgcctgccagcccacctgccggggcctgtctgaggctgatgtgacctgcagcgtgtcctttgtgcctgtggatggctgcacctgcccagctggcaccttcctgaatgatgctggggcctgtgtgcctgcccaggagtgcccctgctacgcccacggcaccgtgctggcccctggagaggtggtgcatgatgagggcgctgtgtgcagctgcaccggcggcaagctgagctgcctgggcgccagcctgcagaagagcacaggctgtgccgcccccatggtgtacctggactgcagcaacagcagcgctggcaccccaggagcagaatgtctgcggagctgccacaccctggatgtgggctgcttcagcacccactgtgtgtctggctgtgtgtgccccccaggcctggtgtctgatggcagcggcggctgcatcgccgaggaggactgcccctgtgtgcacaatgaggccacctacaagccaggagagaccatccgggtggactgcaacacctgcacctgcaggaacagacgctgggagtgcagccaccggctgtgcctgggcacctgtgtggcctatggagatggccacttcatcacctttgatggagaccgctacagctttgagggcagctgtgagtacatcctggcccaggactactgtggggacaacaccacccacggcaccttccgcatcgtgacagagaacatcccctgtggcaccaccggcaccacctgcagcaaggccatcaagctgtttgtggagagctatgagctgatcctgcaggagggcaccttcaaggctgtggcccggggccctggaggagaccccccctacaagatccgctacatgggcatcttcctggtgattgagacccacggcatggctgtgtcctgggacaggaagaccagcgtcttcatccggctgcaccaggactacaagggccgggtgtgtggcctgtgtggcaactttgatgacaatgccatcaatgactttgccaccaggagccgctctgtggtgggagatgccctggagtttggaaacagctggaagctgagccccagctgcccagatgccctggcccccaaggacccctgcacagccaaccccttcaggaagtcctgggcccagaagcagtgcagcatcctgcacggccccacctttgctgcctgccgcagccaggtggacagcaccaagtactatgaggcctgtgtgaatgatgcctgtgcctgtgacagcggcggggactgtgagtgcttctgcacagctgtggccgcctatgcccaggcctgccatgatgctggcctgtgtgtgtcctggaggaccccagacacctgccccctcttctgtgacttctacaacccccacggcggctgtgagtggcactaccagccctgtggggccccctgcctgaagacctgcaggaaccccagcggccactgcctggtggacctgcccggcctggagggctgctaccccaagtgcccccccagccagcccttcttcaatgaagaccagatgaagtgtgtggcccagtgtggctgctatgacaaggatggcaactactatgatgtgggcgcccgggtgcccacagctgagaactgccagagctgcaactgcaccccatctggcatccagtgtgcccacagcctggaggcctgcacctgcacctatgaggacaggacctacagctaccaggatgtgatctacaacaccacagatggcctgggcgcctgcctgattgccatctgtggcagcaatggcaccatcatcaggaaggctgtggcctgccccggcaccccagccaccacccccttcaccttcaccacagcctgggtgccccacagcaccaccagccctgccctgcctgtgtccacagtgtgtgtgcgggaggtgtgccgctggagctcctggtacaacggccacaggcctgagcccggcctgggcggcggggactttgagacctttgagaacctgcggcagaggggctaccaggtgtgccctgtgctggccgacatcgagtgcagagctgcccagctgcctgacatgcccctggaggagctgggccagcaggtggactgtgacaggatgaggggcctgatgtgtgccaacagccagcagagcccccccctgtgccacgactatgagctgcgggtgctgtgctgtgaatatgtgccctgtggccccagccctgcccctggcaccagcccccagcccagcctgagcgccagcacagagcctgctgtgcccacccccacccagaccacagccacagagaagaccaccctgtgggtgacccccagcatccgcagcacagctgccctgaccagccagacaggcagcagcagcggccctgtgacagtgaccccatctgcccctggcaccaccacctgccagccccgctgccagtggacagagtggtttgatgaggactaccccaagtctgagcagctgggcggagatgtggagagctatgacaagatccgggctgctgggggccacctgtgccagcagcccaaggacatcgagtgccaggccgagagcttccccaactggaccctggcccaggtgggccagaaggtgcactgtgatgtgcacttcggcctggtgtgcaggaactgggagcaggagggcgtcttcaagatgtgctacaactaccgcatccgggtgctgtgctgcagtgatgaccactgccggggccgggccaccaccccaccacccaccacagagctggagacagccaccaccaccaccacccaggccctcttcagcaccccccagcccaccagcagccctggcctgacccgggcccccccagccagcaccacagctgtgcccaccctgtctgagggcctgaccagcccccgctacaccagcaccctgggcacagccaccaccggcggccccaccaccccagctggcagcacagagcccaccgtgcctggggtggccaccagcaccctgcccaccaggtctgccctgcccggcaccaccggcagcctgggcacctggaggcccagccagccccccaccctggcccccaccaccatggccaccagccgggcccggcccactggaacagccagcacagccagcaaggagcccctgaccaccagcctggcccccaccctgaccagcgagctgagcaccagccaggccgagaccagcacccccaggacagagaccaccatgagccccctgaccaacaccaccaccagccagggcaccacccgctgccagcccaagtgtgagtggacagagtggtttgatgtggacttccccaccagcggcgtggccggcggggacatggagacctttgagaacatccgggccgccggcggcaagatgtgctgggcccccaagagcattgagtgcagagctgagaactacccagaggtgtccattgaccaggtgggccaggtgctgacctgcagcctggagaccggcctgacctgcaagaatgaagaccagacaggccgcttcaacatgtgcttcaactacaacgtgcgggtgctgtgctgtgatgactacagccactgccccagcaccccagccaccagcagcacagccacccccagcagcaccccaggcaccacctggatcctgaccaagcccaccaccacagccaccaccacagccagcacaggcagcacagccacccccaccagcaccctgaggacagcccccccacccaaggtgctgaccaccacagccaccacccccaccgtgaccagcagcaaggccacccccagcagcagccctggaacagccacagccctgcctgccctgcggagcacagccaccacccccacagccacctctgtgacccccatccccagcagcagcctgggcaccacctggacccggctgagccagaccaccacccccacagccaccatgagcacagccacccccagcagcaccccagagacagcccacaccagcacagtgctgacagccacagccaccaccactggagccaccggctctgtggccacccccagcagcaccccaggcacagcccacaccaccaaggtgcccaccaccaccaccaccggcttcaccgccacccccagcagcagccctggaacagccctgaccccacctgtgtggatcagcaccaccaccacccccaccacccggggcagcacagtgacccccagcagcatccctggcaccacccacacagccaccgtgctgaccaccaccaccaccaccgtggccaccggctccatggccacccccagcagcagcacccagaccagcggcaccccacccagcctgaccaccacagccaccaccatcacagccaccggcagcaccaccaaccccagcagcaccccaggcaccacccccatcccccctgtgctgaccaccacagccaccaccccagctgccaccagcaacacagtgacccccagcagcgccctgggcaccacccacaccccacctgtgcccaacaccatggccaccacccacggccgcagcctgccccccagcagcccccacacagtgaggacagcctggaccagcgccaccagcggcatcctgggcaccacccacatcacagagcccagcacagtgaccagccacaccctggccgccaccaccggcaccacccagcacagcaccccagccctgagcagcccccaccccagcagcaggaccacagagagcccccccagccctggcaccaccaccccaggccacaccacagccaccagcaggaccacagccacagccacccccagcaagaccaggaccagcaccctgctgcccagcagccccaccagcgcccccatcaccaccgtggtgaccatgggctgtgagccccagtgtgcctggagcgagtggctggactacagctaccccatgcctggccccagcggcggggactttgacacctacagcaacatccgggccgccggcggcgctgtgtgtgagcagcccctgggcctggagtgccgggcccaggcccagcccggggtgcccctgcgggagctgggccaggtggtggagtgcagcctggactttggcctggtgtgcaggaaccgggagcaggtgggcaagttcaagatgtgcttcaactatgagatccgggtcttctgctgcaactacggccactgccccagcaccccagccaccagcagcacagccatgcccagcagcaccccaggcaccacctggatcctgacagagctgaccaccacagccaccaccacagagagcacaggcagcacagccacccccagcagcaccccagccacagctggcacccctcatgtgtccaccacagccaccacccccaccgtgaccagcagcaaggccacccccttcagcagccctggaacagccacagccctgcctgccctgcggagcacagccaccacccccacagccaccagcttcaccgccatccccagcagcagcctgggcaccacctggacccggctgagccagaccaccacccccacagccaccatgagcacagccacccccagcagcaccccagagaccgtgcacaccagcacagtgctgaccaccacagccaccaccactggagccaccggctctgtggccacccccagcagcaccccaggcacagcccacaccaccaaggtgctgaccaccaccaccaccggcttcaccgccacccccagcagcagccctggaacagcccggaccctgcctgtgtggatcagcaccaccaccacccccaccacccggggcagcacagtgacccccagcagcatccctggcaccacccacacccccaccgtgctgaccaccaccaccaccaccgtggccaccggctccatggccacccccagcagcagcacccagaccagcggcaccccacccagcctgaccaccacagccaccaccatcacagccaccggcagcaccaccaaccccagcagcaccccaggcaccacccccatcccccctgtgctgaccaccacagccaccaccccagctgccaccagcagcacagtgacccccagcagcgccctgggcaccacccacaccccacctgtgcccaacaccacagccaccacccacggccgcagcctgagccccagcagcccccacacagtgaggacagcctggaccagcgccaccagcggcaccctgggcaccacccacatcacagagcccagcacaggcaccagccacaccccagctgccaccaccggcaccacccagcacagcaccccagccctgagcagcccccaccccagcagcaggaccacagagagcccccccagccctggcaccaccaccccaggccacacccgggccaccagcaggaccacagccacagccacccccagcaagaccaggaccagcaccctgctgcccagcagccccaccagcgcccccatcaccaccgtggtgaccatgggctgtgagccccagtgtgcctggagcgagtggctggactacagctaccccatgcctggccccagcggcggggactttgacacctacagcaacatccgggccgccggcggcgctgtgtgtgagcagcccctgggcctggagtgccgggcccaggcccagcccggggtgcccctgcgggagctgggccaggtggtggagtgcagcctggactttggcctggtgtgcaggaaccgggagcaggtgggcaagttcaagatgtgcttcaactatgagatccgggtcttctgctgcaactacggccactgccccagcaccccagccaccagcagcacagccacccccagcagcaccccaggcaccacctggatcctgacagagcagaccacagctgccaccaccacagccaccaccggcagcacagccatccccagcagcaccccaggcacagcccccccacccaaggtgctgaccagcacagccaccacccccacagccaccagcagcaaggccaccagcagcagcagccccaggacagccaccaccctgcctgtgctgaccagcacagccaccaagagcacagccaccagcttcacccccatccccagcttcaccctgggcaccaccggcaccctgcctgagcagaccaccacccccatggccaccatgagcaccatccaccccagcagcaccccagagaccacccacaccagcacagtgctgaccaccaaggccaccaccacccgggccaccagctccatgagcacccccagcagcaccccaggcaccacctggatcctgacagagctgaccacagctgccaccaccacagctgccaccggccccacagccacccccagcagcaccccaggcaccacctggatcctgacagagcccagcaccacagccaccgtgacagtgcccaccggcagcacagccacagccagcagcacccgggccacagctggcaccctgaaggtgctgaccagcacagccaccacccccaccgtcatcagcagccgggccacccccagcagcagccctggaacagccacagccctgcctgccctgcggagcacagccaccacccccacagccacctctgtgacagccatccccagcagcagcctgggcacagcctggacccggctgagccagaccaccacccccacagccaccatgagcacagccacccccagcagcaccccagagaccgtgcacaccagcacagtgctgaccaccaccaccaccaccacccgggccaccggctctgtggccacccccagcagcaccccaggcacagcccacaccaccaaggtgcccaccaccaccaccaccggcttcaccgccacccccagcagcagccctggaacagccctgaccccacctgtgtggatcagcaccaccaccacccccaccacccggggcagcacagtgacccccagcagcatccctggcaccacccacacagccaccgtgctgaccaccaccaccaccaccgtggccaccggctccatggccacccccagcagcagcacccagaccagcggcaccccacccagcctgaccaccacagccaccaccatcacagccaccggcagcaccaccaaccccagcagcaccccaggcaccacccccatcccccctgtgctgaccaccacagccaccaccccagctgccaccagcagcacagtgacccccagcagcgccctgggcaccacccacaccccacctgtgcccaacaccacagccaccacccacggccgcagcctgccccccagcagcccccacacagtgaggacagcctggaccagcgccaccagcggcatcctgggcaccacccacatcacagagcccagcacagtgaccagccacaccccagctgccaccaccagcaccacccagcacagcaccccagccctgagcagcccccaccccagcagcaggaccacagagagcccccccagccctggcaccaccaccccaggccacacccggggcaccagcaggaccacagccacagccacccccagcaagaccaggaccagcaccctgctgcccagcagccccaccagcgcccccatcaccaccgtggtgaccaccggctgtgagccccagtgtgcctggagcgagtggctggactacagctaccccatgcctggccccagcggcggggactttgacacctacagcaacatccgggccgccggcggcgctgtgtgtgagcagcccctgggcctggagtgccgggcccaggcccagcccggggtgcccctgcgggagctgggccaggtggtggagtgcagcctggactttggcctggtgtgcaggaaccgggagcaggtgggcaagttcaagatgtgcttcaactatgagatccgggtcttctgctgcaactacggccactgccccagcaccccagccaccagcagcacagccacccccagcagcaccccaggcaccacctggatcctgaccaagctgaccaccacagccaccaccacagagagcacaggcagcacagccacccccagcagcacccctggggccacagctggcaccccccacgtgtccaccacagccaccacccccaccgtgaccagcagcaaggccacccccttcagcagccctggaacagccacagccctgcctgccctgcggagcacagccaccacccccacagccaccagcttcaccgccatccccagcagcagcctgggcaccacctggacccggctgagccagaccaccacccccacagccaccatgagcacagccacccccagcagcaccccagagacagcccacaccagcacagtgctgaccaccacagccaccaccacccgggccactggatctgtggccacccccagcagcaccccaggcacagcccacaccaccaaggtgcccaccaccaccaccaccggcttcaccgtgacccccagcagcagccctggaacagcccggaccccacctgtgtggatcagcaccaccaccacccccaccaccagcggcagcacagtgacccccagctctgtgcccggcaccacccacacccccaccgtgctgaccaccaccaccaccaccgtggccaccggctccatggccacccccagcagcagcacccagaccagcggcaccccacccagcctcatcaccacagccaccaccatcacagccaccggcagcaccaccaaccccagcagcaccccaggcaccacccccatcccccctgtgctgaccaccacagccaccaccccagctgccaccagcagcacagtgacccccagcagcgccctgggcaccacccacaccccacctgtgcccaacaccacagccaccacccacggccgcagcctgagccccagcagcccccacacagtgaggacagcctggaccagcgccaccagcggcaccctgggcaccacccacatcacagagcccagcacaggcaccagccacaccccagctgccaccaccggcaccacccagcacagcaccccagccctgagcagcccccaccccagcagcaggaccacagagagcccccccagccctggcaccaccaccccaggccacaccacagccaccagcaggaccacagccacagccacccccagcaagaccaggaccagcaccctgctgcccagcagccccaccagcgcccccatcaccaccgtggtgaccaccggctgtgagccccagtgtgcctggagcgagtggctggactacagctaccccatgcctggccccagcggcggggactttgacacctacagcaacatccgggctgctggaggagctgtgtgtgagcagcccctgggcctggagtgccgggcccaggcccagcccggggtgcccctgggggagctgggccaggtggtggagtgcagcctggactttggcctggtgtgcaggaaccgggagcaggtgggcaagttcaagatgtgcttcaactatgagatccgggtcttctgctgcaactacggccactgccccagcaccccagccaccagcagcacagccatgcccagcagcaccccaggcaccacctggatcctgacagagctgaccaccacagccaccaccacagccagcacaggcagcacagccacccccagcagcaccccaggcacagcccccccacccaaggtgctgaccagccctgccaccacccccacagccaccagcagcaaggccaccagcagcagcagccccaggacagccaccaccctgcctgtgctgaccagcacagccaccaagagcacagccacctctgtgacccccatccccagcagcaccctgggcaccaccggcaccctgcctgagcagaccaccacccctgtggccaccatgagcaccatccaccccagcagcaccccagagaccacccacaccagcacagtgctgaccaccaaggccaccaccacccgggccaccagcagcaccagcacccccagcagcaccccaggcaccacctggatcctgacagagctgaccacagctgccaccaccacagctgccaccggccccacagccacccccagcagcaccccaggcaccacctggatcctgacagagctgaccaccacagccaccaccacagccagcacaggcagcacagccacccccagcagcaccccaggcaccacctggatcctgacagagcccagcaccacagccaccgtgacagtgcccaccggcagcacagccacagccagcagcacccaggccacagctggcaccccccacgtgtccaccacagccaccacccccaccgtgaccagcagcaaggccacccccagcagcagccctggaacagccacagccctgcctgccctgcggagcacagccaccacccccacagccaccagcttcaccgccatccccagcagcagcctgggcaccacctggacccggctgagccagaccaccacccccacagccaccatgagcacagccacccccagcagcaccccagagaccgtgcacaccagcacagtgctgacagccacagccaccaccaccggggccactggatctgtggccacccccagcagcaccccaggcacagcccacaccaccaaggtgcccaccaccaccaccaccggcttcaccgccacccccagcagcagccctggaacagccctgaccccacctgtgtggatcagcaccaccaccacccccaccaccaccacccccaccaccagcggcagcacagtgacccccagcagcatccctggcaccacccacacagcccgggtgctgaccaccaccaccaccaccgtggccaccggctccatggccacccccagcagcagcacccagaccagcggcaccccacccagcctgaccaccacagccaccaccatcacagccaccggcagcaccaccaaccccagcagcaccccaggcaccacccccatcacccctgtgctgaccagcacagccaccaccccagctgccaccagcagcaaggccaccagcagcagcagccccaggacagccaccaccctgcctgtgctgaccagcacagccaccaagagcacagccaccagcttcacccccatccccagcagcaccctgtggaccacctggacagtgcctgcccagaccaccacccccatgagcaccatgagcaccatccacaccagcagcaccccagagaccacccacaccagcacagtgctgaccaccacagccaccatgacccgggccaccaacagcacagccacccccagcagcaccctgggcaccacccgcatcctgacagagctgaccaccacagccaccaccacagctgccaccggcagcacagccaccctgagcagcaccccaggcaccacctggatcctgacagagcccagcaccatcgccaccgtgatggtgcccaccggcagcacagccacagccagcagcaccctgggcacagcccacacccccaaggtggtgaccaccatggccaccatgcccacagccacagccagcacagtgcccagcagcagcacagtgggcaccaccaggaccccagctgtgctgcccagcagcctgcccaccttctctgtgtccacagtgagcagctctgtgctgaccaccctgcggcccaccggcttccccagcagccacttcagcaccccctgcttctgccgggccttcggccagttcttcagccctggagaggtgatctacaacaagacagacagagctggctgccacttctatgctgtgtgcaaccagcactgtgacatcgaccgcttccagggcgcctgccccaccagccccccacctgtgtcctctgcccccctgagcagccccagccctgcccctggctgtgacaatgccatccccctgcggcaggtgaatgagacctggaccctggagaactgcaccgtggcccgctgtgtgggggacaacagagtggtgctgctggaccccaagcctgtggccaacgtgacctgtgtgaacaagcacctgcccatcaaggtgtctgaccccagccagccctgtgacttccactatgaatgtgagtgcatctgcagcatgtggggcggcagccactacagcacctttgatggcaccagctacaccttccggggcaactgcacctacgtgctgatgagggagatccacgccaggtttggaaacctgagcctgtacctggacaaccactactgcacagccagcgccacagctgctgctgcccgctgcccccgggccctgagcatccactacaagtccatggacatcgtgctgactgtgaccatggtgcacggcaaggaggagggcctcatcctgtttgaccagatccctgtgagcagcggcttcagcaagaatggagtgctggtgtctgtgctgggcaccaccaccatgagggtggacatcccagccctgggcgtgtctgtgaccttcaacggccaggtgttccaggcccggctgccctacagcctcttccacaacaacacagagggccagtgtggcacctgcaccaacaaccagagagatgactgcctgcagagagatggcaccacagctgccagctgcaaggacatggccaagacctggctggtgcctgacagcaggaaggatggctgctgggcccccaccggcaccccacccacagccagccctgctgcccctgtgagcagcacccccacccccaccccctgccccccccagcccctgtgtgacctgatgctgagccaggtgtttgctgagtgccacaacctggtgcccccaggccccttcttcaatgcctgcatcagtgaccactgccggggccgcctggaggtgccctgccagagcctggaggcctatgcagagctgtgccgggcccggggcgtgtgcagcgactggaggggggccactggaggcctgtgtgacctgacctgcccccccaccaaggtgtacaagccctgtggccccatccagcctgccacctgcaacagcaggaaccagagcccccagctggagggcatggccgagggctgcttctgcccagaggaccagatcctcttcaatgcccacatgggcatctgtgtgcaggcctgcccctgtgtgggcccagatggcttccccaagtttcctggagagcgctgggtgagcaactgccagagctgtgtgtgtgatgagggctctgtgtctgtgcagtgcaagcccctgccctgtgatgcccagggccagcccccaccctgcaacagacctggctttgtgacagtgacccggcccagggctgagaacccctgctgcccagagaccgtgtgtgtgtgcaacaccaccacctgcccccagagcctgcctgtgtgccccccaggccaggagagcatctgcacccaggaggagggggactgctgccccaccttccgctgccggccccagctgtgcagctacaacggcaccttctacggcgtgggcgccaccttccctggggccctgccctgccacatgtgcacctgcctgagcggggacacccaggaccccaccgtgcagtgccaggaggatgcctgcaacaacaccacctgcccccagggctttgagtacaagagggtggccggccagtgctgcggagaatgtgtgcagacagcctgcctgaccccagatggccagcctgtgcagctgaatgagacctgggtgaacagccacgtggacaactgcaccgtgtacctgtgtgaggccgagggcggcgtgcacctgctgaccccccagcctgccagctgcccagatgtgagcagctgccggggcagcctgaggaagacaggctgctgctacagctgtgaggaggacagctgccaggtgcgcatcaacaccaccatcctgtggcaccagggctgtgaaacagaggtgaacatcaccttctgtgagggcagctgccctggggccagcaagtacagcgctgaggcccaggccatgcagcaccagtgcacctgctgccaggagcggcgggtgcatgaggagaccgtgcccctgcactgccccaatggaagtgccatcctgcacacctacacccacgtggatgaatgtggctgcacccccttctgtgtgcctgcccccatggccccaccccacacccggggcttccctgcccaggaggccacagctgtgtag

SEQ ID NO: 160335 - DNA, 16587 bp, synthetic construct
  misc_feature 1..16587: note = Description of Artificial Sequence: Synthetic coding sequence
  source 1..16587: mol_type = other DNA
gcccccaggatgggcgcccccagcgcctgcaggaccctggtgctggccctggccgccatgctggtggtgccccaggccggcaagagcccccccctgcggcccctgagcagaaattctggagctggcctggatggaggagcccccaccagcagccccacccggcgggtgtcctttgtgccccctgtgacagtgttccccagcctgagcaggaagcagatgctgcccctgcctgctgggaagggcgtgtttgccagccccaagggcggcggccctgacctgggcgtgcagctgcccccagccctgaacccagcccacaacggccgggtgtgcagcacctggggagacttccactacaagacctttgatggagatgtgttccgcttccctggcctgtgcaactacgtgttttctgagcactgccgggccgcctatgaggacttcaacgtgcagctgcggcggggcctggtgggcagcaggcctgtggtgaccagggtggtgatcaaggcccagggcctggtgctggaggccagcaatggatctgtgctgatcaatggccagcgggaggagctgccctacagcaggacaggcctgctggtggagcagagcggggactacatcaaggtgtccatccggctggtgctgaccttcctgtggaatggagaagattctgccctgctggagctggaccccaagtatgccaaccagacctgtggcctgtgtggggacttcaacggcctgcctgccttcaatgagttctacgcccacaatgcccggctgacccccctgcagtttggaaacctgcagaagctggatggccccacagagcagtgcccagaccccctgcccctgcctgctggcaactgcacagatgaggagggcatctgccacaggaccctgctgggccctgcctttgctgagtgccacgccctggtggacagcacagcctacctggccgcctgtgcccaggacctgtgccgctgccccacctgcccctgtgccacctttgtggagtacagccggcagtgtgcccatgctgggggccagcccaggaactggcgctgcccagagctgtgccccaggacctgccccctgaacatgcagcaccaggagtgtggcagcccctgcacagacacctgcagcaacccccagagggcccagctgtgtgaggaccactgtgtggatggctgcttctgccccccaggccgcagctgcaccgtgctggatgacatcacccacagcggctgcctgcccctgggccagtgcccctgcacccatggaggccgcacctacagccctggcaccagcttcaacaccacctgcagcagctgcacctgcagcggcggcctgtggcagtgccaggacctgccctgccccggcacctgcagcgtgcagggcggggcccacatcagcacctatgatgagaagctgtatgacctgcacggggactgcagctatgtgctgagcaagaagtgtgccgacagcagcttcaccgtgctggccgagctgaggaaatgtggcctgacagacaatgaaaactgcctgaaggctgtgaccctgagcctggatggaggagacacagccatccgggtgcaggctgatggaggagtcttcctgaacagcatctacacccagctgcccctgtctgctgccaacatcaccctcttcacccccagcagcttcttcatcgtggtgcagacaggcctgggcctgcagctgctggtgcagctggtgcccctgatgcaggtgtttgtgcggctggaccctgcccaccagggccagatgtgtggcctgtgtggcaacttcaaccagaaccaggctgatgacttcaccgccctgtctggagtggtggaggccactggagctgcctttgccaacacctggaaggcccaggccgcctgtgccaatgccagaaattcctttgaggacccctgcagcctgtctgtggagaatgaaaattatgcccggcactggtgcagccggctgacagaccccaacagcgccttcagccgctgccacagcatcatcaaccccaagcccttccacagcaactgcatgtttgacacctgcaactgtgagaggtctgaggactgcctgtgtgccgccctgagcagctatgtgcacgcctgtgccgccaagggcgtgcagctgagtgactggagagatggagtgtgcaccaagtacatgcagaactgccccaagagccagagatatgcctacgtggtggatgcctgccagcccacctgccggggcctgtctgaggctgatgtgacctgcagcgtgtcctttgtgcctgtggatggctgcacctgcccagctggcaccttcctgaatgatgctggggcctgtgtgcctgcccaggagtgcccctgctacgcccatggaacagtgctggcccctggagaggtggtgcatgatgaaggagctgtgtgcagctgcacaggaggcaagctgagctgcctgggcgccagcctgcagaagagcacaggctgtgccgcccccatggtgtacctggactgcagcaacagcagcgctggcaccccaggagctgagtgcctgcggagctgccacaccctggatgtgggctgcttcagcacccactgtgtgtctggctgtgtgtgccccccaggcctggtgtctgatggcagcggcggctgcatcgccgaggaggactgcccctgtgtgcacaatgaggccacctacaagccaggagagaccatccgggtggactgcaacacctgcacctgcaggaacagacgctgggagtgcagccaccggctgtgcctgggcacctgtgtggcctatggagatggccacttcatcacctttgatggagaccgctacagctttgagggcagctgtgagtacatcctggcccaggactactgtggggacaacaccacccacggcaccttcagaattgtgacagagaacatcccctgtggcaccaccggcaccacctgcagcaaggccatcaagctgtttgtggaggtgaggacagccccagctgtgtccaccccagaccctgctgccaatgaaccagccccccgggaggcctctgtgggcttccggcagaggctgccccccctgcagagctatgagctgatcctgcaggagggcaccttcaaggctgtggcccggggccctggaggagaccccccctacaagatccgctacatgggcatcttcctggtgattgagacccacggcatggctgtgtcctgggacaggaagacctctgtgttcatccggctgcaccaggactacaagggccgggtgtgtggcctgtgtggcaactttgatgacaatgccatcaatgactttgccaccaggagccgctctgtggtgggagatgccctggagtttggaaacagctggaagctgagccccagctgcccagatgccctggcccccaaggacccctgcacagccaaccccttcaggaagtcctgggcccagaagcagtgcagcatcctgcacggccccacctttgctgcctgccgcagccaggtggacagcaccaagtactatgaggcctgtgtgaatgatgcctgtgcctgtgacagcggcggggactgtgagtgcttctgcacagctgtggccgcctatgcccaggcctgccatgatgctggcctgtgtgtgtcctggaggaccccagacacctgccccctcttctgtgacttctacaacccccatggaggctgtgagtggcactaccagccctgtggggccccctgcctgaagacctgcaggaaccccagcggccactgcctggtggacctgcccggcctggagggctgctaccccaagtgcccccccagccagcccttcttcaatgaagaccagatgaagtgtgtggcccagtgtggctgctatgacaaggatggcaactactatgatgtgggcgcccgggtgcccacagctgagaactgccagagctgcaactgcacccccagcggcatccagtgtgcccacagcctggaggcctgcacctgcacctatgaggacaggacctacagctaccaggacgtcatctacaacaccacagatggcctgggcgcctgcctgattgccatctgtggcagcaatggcaccatcatcaggaaggctgtggcctgccccggcaccccagccaccacccccttcaccttcaccacagcctgggtgccccacagcaccaccagccctgccctgcctgtgtccacagtgtgtgtgcgggaggtgtgccgctggagctcctggtacaacggccacaggcctgagcccggcctgggcggcggggactttgagacctttgagaacctgcggcagaggggctaccaggtgtgccctgtgctggccgacattgaatgtcgggccgcccagctgcctgacatgcccctggaggagctgggccagcaggtggactgtgacaggatgaggggcctgatgtgtgccaacagccagcagagcccccccctgtgccacgactatgagctgcgggtgctgtgctgtgaatatgtgccctgtggccccagccctgcccctggcaccagcccccagcccagcctgagcgccagcacagagcctgctgtgcccacccccacccagaccacagccacagagaagaccaccctgtgggtgacccccagcatccgcagcacagctgccctgaccagccagacaggcagcagcagcggccctgtgacagtgacccccagcgcccctggcaccaccacctgccagccccgctgccagtggacagagtggtttgatgaggactaccccaagtctgagcagctgggcggagatgtggagagctatgacaagatccgggccgccggcggccacctgtgccagcagcccaaggacatcgagtgccaggccgagagcttccccaactggaccctggcccaggtgggccagaaggtgcactgtgatgtgcacttcggcctggtgtgcaggaactgggagcaggagggcgtcttcaagatgtgctacaactaccgcatccgggtgctgtgctgcagtgatgaccactgccggggccgggccaccaccccaccacccaccacagagctggagacagccaccaccaccaccacccaggccctcttcagcaccccccagcccaccagcagccctggcctgacccgggcccccccagccagcaccacagctgtgcccaccctgtctgagggcctgaccagcccccgctacaccagcaccctgggcacagccaccactggaggccccaccaccccagctggcagcacagagcccaccgtgcctggggtggccaccagcaccctgcccaccaggtctgccctgcccggcaccaccggcagcctgggcacctggaggcccagccagccccccaccctggcccccaccaccatggccaccagccgggcccggcccaccggcacagccagcacagccagcaaggagcccctgaccaccagcctggcccccaccctgaccagcgagctgagcaccagccaggccgagaccagcacccccaggacagagaccaccatgagccccctgaccaacaccaccaccagccagggcaccacccgctgccagcccaagtgtgagtggacagagtggtttgatgtggacttccccaccagcggcgtggccggcggggacatggagacctttgagaacatccgggctgctgggggcaagatgtgctgggcccccaagagcattgaatgtagagctgagaactacccagaggtgtccattgaccaggtgggccaggtgctgacctgcagcctggagaccggcctgacctgcaagaatgaagaccagacaggccgcttcaacatgtgcttcaactacaacgtgcgggtgctgtgctgtgatgactacagccactgccccagcaccccagccaccagcagcacagccacccccagcagcaccccaggcaccacctggatcctgaccaagcccaccaccacagccaccaccacagccagcacaggcagcacagccacccccaccagcaccctgaggacagcccccccacccaaggtgctgaccaccacagccaccacccccaccgtgaccagcagcaaggccacccccagcagcagccctggaacagccacagccctgcctgccctgcggagcacagccaccacccccacagccacctctgtgacccccatccccagcagcagcctgggcaccacctggacccggctgagccagaccaccacccccacagccaccatgagcacagccacccccagcagcaccccagagacagcccacaccagcacagtgctgacagccacagccaccaccaccggggccactggatctgtggccacccccagcagcaccccaggcacagcccacaccaccaaggtgcccaccaccaccaccaccggcttcaccgccacccccagcagcagccctggaacagccctgaccccacctgtgtggatcagcaccaccaccacccccaccacccggggcagcacagtgacccccagcagcatccctggcaccacccacacagccaccgtgctgaccaccaccaccaccaccgtggccaccggctccatggccacccccagcagcagcacccagaccagcggcaccacccacaccccacctgtgcccaacaccatggccaccacccacggccgcagcctgccccccagcagcccccacacagtgaggacagcctggaccagcgccaccagcggcatcctgggcaccacccacatcacagagcccagcacagtgaccagccacaccctggccgccaccaccggcaccacccagcacagcaccccagccctgagcagcccccaccccagcagcaggaccacagagagcccccccagccctggcaccaccaccccaggccacaccacagccaccagcaggaccacagccacagccacccccagcaagaccaggaccagcaccctgctgcccagcagccccaccagcgcccccatcaccaccgtggtgaccatgggctgtgagccccagtgtgcctggagcgagtggctggactacagctaccccatgcctggccccagcggcggggactttgacacctacagcaacatccgggccgccggcggcgctgtgtgtgagcagcccctgggcctggagtgccgggcccaggcccagcccggggtgcccctgcgggagctgggccaggtggtggagtgcagcctggactttggcctggtgtgcaggaaccgggagcaggtgggcaagttcaagatgtgcttcaactatgagatccgggtcttctgctgcaactacggccactgccccagcaccccagccaccagcagcacagccatgcccagcagcaccccaggcaccacctggatcctgacagagctgaccaccacagccaccaccacagagagcacaggcagcacagccacccccagcagcaccccaggcaccacctggatcctgacagagcccagcaccacagccaccgtgacagtgcccaccggcagcacagccacagccagcagcacccaggccacagctggcaccccccacgtgtccaccacagccaccacccccaccgtgaccagcagcaaggccacccccttcagcagccctggaacagccacagccctgcctgccctgcggagcacagccaccacccccacagccaccagcttcaccgccatccccagcagcagcctgggcaccacctggacccggctgagccagaccaccacccccacagccaccatgagcacagccacccccagcagcaccccagagaccgtgcacaccagcacagtgctgaccaccacagccaccaccaccggggccactggatctgtggccacccccagcagcaccccaggcacagcccacaccaccaaggtgctgaccaccaccaccaccggcttcaccgccacccccagcagcagccctggaacagcccggaccctgcctgtgtggatcagcaccaccaccacccccaccacccggggcagcacagtgacccccagcagcatccctggcaccacccacacccccaccgtgctgaccaccaccaccaccaccgtggccaccggctccatggccacccccagcagcagcacccagaccagcggcaccacccacaccccacctgtgcccaacaccacagccaccacccacggccgcagcctgagccccagcagcccccacacagtgaggacagcctggaccagcgccaccagcggcaccctgggcaccacccacatcacagagcccagcacaggcaccagccacaccccagctgccaccaccggcaccacccagcacagcaccccagccctgagcagcccccaccccagcagcaggaccacagagagcccccccagccctggcaccaccaccccaggccacacccgggccaccagcaggaccacagccacagccacccccagcaagaccaggaccagcaccctgctgcccagcagccccaccagcgcccccatcaccaccgtggtgaccatgggctgtgagccccagtgtgcctggagcgagtggctggactacagctaccccatgcctggccccagcggcggggactttgacacctacagcaacatccgggccgccggcggcgctgtgtgtgagcagcccctgggcctggagtgccgggcccaggcccagcccggggtgcccctgcgggagctgggccaggtggtggagtgcagcctggactttggcctggtgtgcaggaaccgggagcaggtgggcaagttcaagatgtgcttcaactatgagatccgggtcttctgctgcaactacggccactgccccagcaccccagccaccagcagcacagccacccccagcagcaccccaggcaccacctggatcctgacagagcagaccacagctgccaccaccacagccaccaccggcagcacagccatccccagcagcaccccaggcacagcccccccacccaaggtgctgaccagcacagccaccacccccacagccaccagcagcaaggccaccagcagcagcagccccaggacagccaccaccctgcctgtgctgaccagcacagccaccaagagcacagccaccagcttcacccccatccccagcttcaccctgggcaccaccggcaccctgcctgagcagaccaccacccccatggccaccatgagcaccatccaccccagcagcaccccagagaccacccacaccagcacagtgctgaccaccaaggccaccaccacccgggccaccagctccatgagcacccccagcagcaccccaggcaccacctggatcctgacagagctgaccacagctgccaccaccacagctgccaccggccccacagccacccccagcagcaccccaggcaccacctggatcctgacagagcccagcaccacagccaccgtgacagtgcccaccggcagcacagccacagccagcagcacccgggccacagctggcaccctgaaggtgctgaccagcacagccaccacccccaccgtcatcagcagccgggccacccccagcagcagccctggaacagccacagccctgcctgccctgcggagcacagccaccacccccacagccacctctgtgacagccatccccagcagcagcctgggcacagcctggacccggctgagccagaccaccacccccacagccaccatgagcacagccacccccagcagcaccccagagaccgtgcacaccagcacagtgctgaccaccaccaccaccaccacccgggccaccggctctgtggccacccccagcagcaccccaggcacagcccacaccaccaaggtgcccaccaccaccaccaccggcttcaccgccacccccagcagcagccctggaacagccctgaccccacctgtgtggatcagcaccaccaccacccccaccacccggggcagcacagtgacccccagcagcatccctggcaccacccacacagccaccgtgctgaccaccaccaccaccaccgtggccaccggctccatggccacccccagcagcagcacccagaccagcggcaccacccacaccccacctgtgcccaacaccacagccaccacccacggccgcagcctgccccccagcagcccccacacagtgaggacagcctggaccagcgccaccagcggcatcctgggcaccacccacatcacagagcccagcacagtgaccagccacaccccagctgccaccaccagcaccacccagcacagcaccccagccctgagcagcccccaccccagcagcaggaccacagagagcccccccagccctggcaccaccaccccaggccacacccggggcaccagcaggaccacagccacagccacccccagcaagaccaggaccagcaccctgctgcccagcagccccaccagcgcccccatcaccaccgtggtgaccaccggctgtgagccccagtgtgcctggagcgagtggctggactacagctaccccatgcctggccccagcggcggggactttgacacctacagcaacatccgggctgctggaggagctgtgtgtgagcagcccctgggcctggagtgccgggcccaggcccagcccggggtgcccctgcgggagctgggccaggtggtggagtgcagcctggactttggcctggtgtgcaggaaccgggagcaggtgggcaagttcaagatgtgcttcaactatgagatccgggtcttctgctgcaactacggccactgccccagcaccccagccaccagcagcacagccacccccagcagcaccccaggcaccacctggatcctgaccaagctgaccaccacagccaccaccacagagagcacaggcagcacagccacccccagcagcaccccaggcaccacctggatcctgacagagcccagcaccacagccaccgtgacagtgcccaccggcagcacagccacagccagcagcacccaggccacagctggcacccctcatgtgtccaccacagccaccacccccaccgtgaccagcagcaaggccacccccttcagcagccctggaacagccacagccctgcctgccctgcggagcacagccaccacccccacagccaccagcttcaccgccatccccagcagcagcctgggcaccacctggacccggctgagccagaccaccacccccacagccaccatgagcacagccacccccagcagcaccccagagacagcccacaccagcacagtgctgaccaccacagccaccaccacccgggccaccggctctgtggccacccccagcagcaccccaggcacagcccacaccaccaaggtgcccaccaccaccaccaccggcttcaccgtgacccccagcagcagccctggaacagcccggaccccacctgtgtggatcagcaccaccaccacccccaccaccagcggcagcacagtgacccccagctctgtgcccggcaccacccacacccccaccgtgctgaccaccaccaccaccaccgtggccaccggctccatggccacccccagcagcagcacccagaccagcggcaccacccacaccccacctgtgcccaacaccacagccaccacccacggccgcagcctgagccccagcagcccccacacagtgaggacagcctggaccagcgccaccagcggcaccctgggcaccacccacatcacagagcccagcacaggcaccagccacaccccagctgccaccaccggcaccacccagcacagcaccccagccctgagcagcccccaccccagcagcaggaccacagagagcccccccagccctggcaccaccaccccaggccacaccacagccaccagcaggaccacagccacagccacccccagcaagaccaggaccagcaccctgctgcccagcagccccaccagcgcccccatcaccaccgtggtgaccaccggctgtgagccccagtgtgcctggagcgagtggctggactacagctaccccatgcctggccccagcggcggggactttgacacctacagcaacatccgggctgctggaggagctgtgtgtgagcagcccctgggcctggagtgccgggcccaggcccagcccggggtgcccctgggggagctgggccaggtggtggagtgcagcctggactttggcctggtgtgcaggaaccgggagcaggtgggcaagttcaagatgtgcttcaactatgagatccgggtcttctgctgcaactacggccactgccccagcaccccagccaccagcagcacagccatgcccagcagcaccccaggcaccacctggatcctgacagagctgaccaccacagccaccaccacagccagcacaggcagcacagccacccccagcagcaccccaggcacagcccccccacccaaggtgctgaccagccctgccaccacccccacagccaccagcagcaaggccaccagcagcagcagccccaggacagccaccaccctgcctgtgctgaccagcacagccaccaagagcacagccacctctgtgacccccatccccagcagcaccctgggcaccaccggcaccctgcctgagcagaccaccacccctgtggccaccatgagcaccatccaccccagcagcaccccagagaccacccacaccagcacagtgctgaccaccaaggccaccaccacccgggccaccagcagcaccagcacccccagcagcaccccaggcaccacctggatcctgacagagctgaccacagctgccaccaccacagctgccaccggccccacagccacccccagcagcaccccaggcaccacctggatcctgacagagctgaccaccacagccaccaccacagccagcacaggcagcacagccacccccagcagcaccccaggcaccacctggatcctgacagagcccagcaccacagccaccgtgacagtgcccaccggcagcacagccacagccagcagcacccaggccacagctggcaccccccacgtgtccaccacagccaccacccccaccgtgaccagcagcaaggccacccccagcagcagccctggaacagccacagccctgcctgccctgcggagcacagccaccacccccacagccaccagcttcaccgccatccccagcagcagcctgggcaccacctggacccggctgagccagaccaccacccccacagccaccatgagcacagccacccccagcagcaccccagagaccgtgcacaccagcacagtgctgacagccacagccaccaccaccggggccactggatctgtggccacccccagcagcaccccaggcacagcccacaccaccaaggtgcccaccaccaccaccaccggcttcaccgccacccccagcagcagccctggaacagccctgaccccacccaccaccacccccatgagcaccatgagcaccatccacaccagcagcaccccagagaccacccacaccagcacagtgctgaccaccacagccaccatgacccgggccaccaacagcacagccacccccagcagcaccctgggcaccacccgcatcctgacagagctgaccaccacagccaccaccacagctgccaccggcagcacagccaccctgagcagcaccccaggcaccacctggatcctgacagagcccagcaccatcgccaccgtgatggtgcccaccggcagcacagccacagccagcagcaccctgggcacagcccacacccccaaggtggtgaccaccatggccaccatgcccacagccacagccagcacagtgcccagcagcagcacagtgggcaccaccaggaccccagctgtgctgcccagcagcctgcccaccttctctgtgtccacagtgagcagctctgtgctgaccaccctgcggcccaccggcttccccagcagccacttcagcaccccctgcttctgccgggccttcggccagttcttcagccctggagaggtgatctacaacaagacagaccgggccggctgccacttctatgctgtgtgcaaccagcactgtgacatcgaccgcttccagggcgcctgccccaccagccccccacctgtgagcagcgcccccctgagcagccccagccctgcccctggctgtgacaatgccatccccctgcggcaggtgaatgagacctggaccctggagaactgcaccgtggcccgctgtgtgggggacaacagagtggtgctgctggaccccaagcctgtggccaacgtgacctgtgtgaacaagcacctgcccatcaaggtgtctgaccccagccagccctgtgacttccactatgaatgtgaatgtgaatgtgtgggcggccggggcatcacccctggggccggcatctgcagcatgtggggcggcagccactacagcacctttgatggcaccagctacaccttccggggcaactgcacctacgtgctgatgagggagatccacgccaggtttggaaacctgagcctgtacctggacaaccactactgcacagccagcgccacagctgctgctgcccgctgcccccgggccctgagcatccactacaagtccatggacatcgtgctgactgtgaccatggtgcacggcaaggaggagggcctcatcctgtttgaccagatccctgtgagcagcggcttcagcaagaatggagtgctggtgtctgtgctgggcaccaccaccatgagggtggacatcccagccctgggcgtgtctgtgaccttcaacggccaggtgttccaggcccggctgccctacagcctcttccacaacaacacagagggccagtgtggcacctgcaccaacaaccagagagatgactgcctgcagagagatggcaccacagctgccagctgcaaggacatggccaagacctggctggtgcctgacagcaggaaggatggctgctgggcccccaccggcaccccacccacagccagccctgctgcccctgtgagcagcacccccacccccaccccctgccccccccagcccctgtgtgacctgatgctgagccaggtgtttgctgagtgccacaacctggtgcccccaggccccttcttcaatgcctgcatcagtgaccactgccggggccgcctggaggtgccctgccagagcctggaggcctatgcagagctgtgccgggcccggggcgtgtgcagcgactggaggggggccactggaggcctgtgtgacctgacctgcccccccaccaaggtgtacaagccctgtggccccatccagcctgccacctgcaacagcaggaaccagagcccccagctggagggcatggccgagggctgcttctgcccagaggaccagatcctcttcaatgcccacatgggcatctgtgtgcaggcctgcccctgtgtgggcccagatggcttccccaagtttcctggagagcgctgggtgagcaactgccagagctgtgtgtgtgatgagggctctgtgtctgtgcagtgcaagcccctgccctgtgatgcccagggccagcccccaccctgcaacagacctggctttgtgacagtgacccggcccagggctgagaacccctgctgcccagagaccgtgtgtgtgtgcaacaccaccacctgcccccagagcctgcctgtgtgccccccaggccaggagagcatctgcacccaggaggagggggactgctgccccaccttccgctgccggccccagctgtgcagctacaacggcaccttctacggcgtgggcgccaccttccctggggccctgccctgccacatgtgcacctgcctgagcggggacacccaggaccccaccgtgcagtgccaggaggatgcctgcaacaacaccacctgcccccagggctttgagtacaagagggtggccggccagtgctgcggagaatgtgtgcagacagcctgcctgaccccagatggccagcctgtgcagctgaatgagacctgggtgaacagccacgtggacaactgcaccgtgtacctgtgtgaggccgagggcggcgtgcacctgctgaccccccagcctgccagctgcccagatgtgagcagctgccggggcagcctgaggaagacaggctgctgctacagctgtgaggaggacagctgccaggtgcgcatcaacaccaccatcctgtggcaccagggctgtgaaacagaggtgaacatcaccttctgtgagggcagctgccctggggccagcaagtacagcgctgaggcccaggccatgcagcaccagtgcacctgctgccaggagcggcgggtgcatgaggagaccgtgcccctgcactgccccaatggaagtgccatcctgcacacctacacccatgctgtgcaggtgctgtgtggcctgctggcctggggcctgcaggccggcggccacatcagaggagctgtgcaggacccccagcagcccctgaaggaccaggaggccagcggcaaggcccggcagggcggcggctaccggcagacagtggcctggggagacaagagcaatgcccgggcctggctgcagaagcctgtggtgtgggtgcagagcggggccttccccaccccaggccctgccagcgccctgtgcccctggtag

SEQ ID NO: 160336 - DNA, 17298 bp, synthetic construct
  misc_feature 1..17298: note = Description of Artificial Sequence: Synthetic coding sequence
  source 1..17298: mol_type = other DNA
atgggcgcccccagcgcctgcaggaccctggtgctggccctggccgccatgctggtggtgccccaggccgagacccagggccctgtggagcccagctgggagaatgccggccacaccatggatggaggagcccccaccagcagccccaccaggagagtgtcctttgtgccccctgtgaccgtcttccccagcctgagccccctgaacccagcccacaacggccgggtgtgcagcacctggggagacttccactacaagacctttgatggagatgtgttccgcttccctggcctgtgcaactacgtgttcagcgagcactgcagagctgcctatgaggacttcaacgtgcagctgcggcggggcctggtgggcagcaggcctgtggtgaccagggtggtgatcaaggcccagggcctggtgctggaggccagcaatggatctgtgctgatcaatggccagcgggaggagctgccctacagcaggacaggcctgctggtggagcagagcggggactacatcaaggtgtccatccggctggtgctgaccttcctgtggaatggagaggacagcgccctgctggagctggaccccaagtatgccaaccagacctgtggcctgtgtggggacttcaacggcctgcctgccttcaatgagttctacgcccacaatgcccggctgacccccctgcagtttggaaacctgcagaagctggatggccccacagagcagtgcccagaccccctgcccctgcctgctggcaactgcacagatgaggagggcatctgccacaggaccctgctgggccctgcctttgctgaatgtcatgccctggtggacagcacagcctacctggccgcctgtgcccaggacctgtgccgctgccccacctgcccctgtgccacctttgtggagtacagccggcagtgtgcccacgccggcggccagcccaggaactggcgctgcccagagctgtgccccaggacctgccccctgaacatgcagcaccaggagtgtggcagcccctgcacagacacctgcagcaacccccagagggcccagctgtgtgaggaccactgtgtggatggctgcttctgccccccaggccgcagctgcaccgtgctggatgacatcacccacagcggctgcctgcccctgggccagtgcccctgcacccacggcggccgcacctacagccctggcaccagcttcaacaccacctgcagcagctgcacctgcagcggcggcctgtggcagtgccaggacctgccctgccccggcacctgcagcgtgcagggcggggcccacatcagcacctatgatgagaagctgtatgacctgcatggagactgcagctatgtgctgagcaagaagtgtgccgacagcagcttcaccgtgctggccgagctgaggaaatgtggcctgacagacaatgaaaactgcctgaaggctgtgaccctgagcctggatggaggagacacagccatccgggtgcaggctgatggcggcgtcttcctgaacagcatctacacccagctgcccctgtctgctgccaacatcaccctcttcacccccagcagcttcttcatcgtggtgcagacaggcctgggcctgcagctgctggtgcagctggtgcccctgatgcaggtgtttgtgcggctggaccctgcccaccagggccagatgtgtggcctgtgtggcaacttcaaccagaaccaggctgatgacttcaccgccctgagcggcgtggtggaggccaccggggccgcctttgccaacacctggaaggcccaggccgcctgtgccaatgccaggaacagctttgaggacccctgcagcctgtctgtggagaatgaaaattatgcccggcactggtgcagccggctgacagaccccaacagcgccttcagccgctgccacagcatcatcaaccccaagcccttccacagcaactgcatgtttgacacctgcaactgtgagaggtctgaggactgcctgtgtgccgccctgagcagctatgtgcacgcctgtgccgccaagggcgtgcagctgagtgactggagagatggagtgtgcaccaagtacatgcagaactgccccaagagccagagatatgcctacgtggtggatgcctgccagcccacctgccggggcctgtctgaggctgatgtgacctgcagcgtgtcctttgtgcctgtggatggctgcacctgcccagctggcaccttcctgaatgatgctggggcctgtgtgcctgcccaggagtgcccctgctacgcccacggcaccgtgctggcccctggagaggtggtgcatgatgagggcgctgtgtgcagctgcaccggcggcaagctgagctgcctgggcgccagcctgcagaagagcacaggctgtgccgcccccatggtgtacctggactgcagcaacagcagcgctggcaccccaggagcagaatgtctgcggagctgccacaccctggatgtgggctgcttcagcacccactgtgtgtctggctgtgtgtgccccccaggcctggtgtctgatggcagcggcggctgcatcgccgaggaggactgcccctgtgtgcacaatgaggccacctacaagccaggagagaccatccgggtggactgcaacacctgcacctgcaggaacagacgctgggagtgcagccaccggctgtgcctgggcacctgtgtggcctatggagatggccacttcatcacctttgatggagaccgctacagctttgagggcagctgtgagtacatcctggcccaggactactgtggggacaacaccacccacggcaccttccgcatcgtgacagagaacatcccctgtggcaccaccggcaccacctgcagcaaggccatcaagctgtttgtggagagctatgagctgatcctgcaggagggcaccttcaaggctgtggcccggggccctggaggagaccccccctacaagatccgctacatgggcatcttcctggtgattgagacccacggcatggctgtgtcctgggacaggaagaccagcgtcttcatccggctgcaccaggactacaagggccgggtgtgtggcctgtgtggcaactttgatgacaatgccatcaatgactttgccaccaggagccgctctgtggtgggagatgccctggagtttggaaacagctggaagctgagccccagctgcccagatgccctggcccccaaggacccctgcacagccaaccccttcaggaagtcctgggcccagaagcagtgcagcatcctgcacggccccacctttgctgcctgccgcagccaggtggacagcaccaagtactatgaggcctgtgtgaatgatgcctgtgcctgtgacagcggcggggactgtgagtgcttctgcacagctgtggccgcctatgcccaggcctgccatgatgctggcctgtgtgtgtcctggaggaccccagacacctgccccctcttctgtgacttctacaacccccacggcggctgtgagtggcactaccagccctgtggggccccctgcctgaagacctgcaggaaccccagcggccactgcctggtggacctgcccggcctggagggctgctaccccaagtgcccccccagccagcccttcttcaatgaagaccagatgaagtgtgtggcccagtgtggctgctatgacaaggatggcaactactatgatgtgggcgcccgggtgcccacagctgagaactgccagagctgcaactgcaccccatctggcatccagtgtgcccacagcctggaggcctgcacctgcacctatgaggacaggacctacagctaccaggatgtgatctacaacaccacagatggcctgggcgcctgcctgattgccatctgtggcagcaatggcaccatcatcaggaaggctgtggcctgccccggcaccccagccaccacccccttcaccttcaccacagcctgggtgccccacagcaccaccagccctgccctgcctgtgtccacagtgtgtgtgcgggaggtgtgccgctggagctcctggtacaacggccacaggcctgagcccggcctgggcggcggggactttgagacctttgagaacctgcggcagaggggctaccaggtgtgccctgtgctggccgacatcgagtgcagagctgcccagctgcctgacatgcccctggaggagctgggccagcaggtggactgtgacaggatgaggggcctgatgtgtgccaacagccagcagagcccccccctgtgccacgactatgagctgcgggtgctgtgctgtgaatatgtgccctgtggccccagccctgcccctggcaccagcccccagcccagcctgagcgccagcacagagcctgctgtgcccacccccacccagaccacagccacagagaagaccaccctgtgggtgacccccagcatccgcagcacagctgccctgaccagccagacaggcagcagcagcggccctgtgacagtgaccccatctgcccctggcaccaccacctgccagccccgctgccagtggacagagtggtttgatgaggactaccccaagtctgagcagctgggcggagatgtggagagctatgacaagatccgggctgctgggggccacctgtgccagcagcccaaggacatcgagtgccaggccgagagcttccccaactggaccctggcccaggtgggccagaaggtgcactgtgatgtgcacttcggcctggtgtgcaggaactgggagcaggagggcgtcttcaagatgtgctacaactaccgcatccgggtgctgtgctgcagtgatgaccactgccggggccgggccaccaccccaccacccaccacagagctggagacagccaccaccaccaccacccaggccctcttcagcaccccccagcccaccagcagccctggcctgacccgggcccccccagccagcaccacagctgtgcccaccctgtctgagggcctgaccagcccccgctacaccagcaccctgggcacagccaccaccggcggccccaccaccccagctggcagcacagagcccaccgtgcctggggtggccaccagcaccctgcccaccaggtctgccctgcccggcaccaccggcagcctgggcacctggaggcccagccagccccccaccctggcccccaccaccatggccaccagccgggcccggcccactggaacagccagcacagccagcaaggagcccctgaccaccagcctggcccccaccctgaccagcgagctgagcaccagccaggccgagaccagcacccccaggacagagaccaccatgagccccctgaccaacaccaccaccagccagggcaccacccgctgccagcccaagtgtgagtggacagagtggtttgatgtggacttccccaccagcggcgtggccggcggggacatggagacctttgagaacatccgggccgccggcggcaagatgtgctgggcccccaagagcattgagtgcagagctgagaactacccagaggtgtccattgaccaggtgggccaggtgctgacctgcagcctggagaccggcctgacctgcaagaatgaagaccagacaggccgcttcaacatgtgcttcaactacaacgtgcgggtgctgtgctgtgatgactacagccactgccccagcaccccagccaccagcagcacagccacccccagcagcaccccaggcaccacctggatcctgaccaagcccaccaccacagccaccaccacagccagcacaggcagcacagccacccccaccagcaccctgaggacagcccccccacccaaggtgctgaccaccacagccaccacccccaccgtgaccagcagcaaggccacccccagcagcagccctggaacagccacagccctgcctgccctgcggagcacagccaccacccccacagccacctctgtgacccccatccccagcagcagcctgggcaccacctggacccggctgagccagaccaccacccccacagccaccatgagcacagccacccccagcagcaccccagagacagcccacaccagcacagtgctgacagccacagccaccaccactggagccaccggctctgtggccacccccagcagcaccccaggcacagcccacaccaccaaggtgcccaccaccaccaccaccggcttcaccgccacccccagcagcagccctggaacagccctgaccccacctgtgtggatcagcaccaccaccacccccaccacccggggcagcacagtgacccccagcagcatccctggcaccacccacacagccaccgtgctgaccaccaccaccaccaccgtggccaccggctccatggccacccccagcagcagcacccagaccagcggcaccccacccagcctgaccaccacagccaccaccatcacagccaccggcagcaccaccaaccccagcagcaccccaggcaccacccccatcccccctgtgctgaccaccacagccaccaccccagctgccaccagcaacacagtgacccccagcagcgccctgggcaccacccacaccccacctgtgcccaacaccatggccaccacccacggccgcagcctgccccccagcagcccccacacagtgaggacagcctggaccagcgccaccagcggcatcctgggcaccacccacatcacagagcccagcacagtgaccagccacaccctggccgccaccaccggcaccacccagcacagcaccccagccctgagcagcccccaccccagcagcaggaccacagagagcccccccagccctggcaccaccaccccaggccacaccacagccaccagcaggaccacagccacagccacccccagcaagaccaggaccagcaccctgctgcccagcagccccaccagcgcccccatcaccaccgtggtgaccatgggctgtgagccccagtgtgcctggagcgagtggctggactacagctaccccatgcctggccccagcggcggggactttgacacctacagcaacatccgggccgccggcggcgctgtgtgtgagcagcccctgggcctggagtgccgggcccaggcccagcccggggtgcccctgcgggagctgggccaggtggtggagtgcagcctggactttggcctggtgtgcaggaaccgggagcaggtgggcaagttcaagatgtgcttcaactatgagatccgggtcttctgctgcaactacggccactgccccagcaccccagccaccagcagcacagccatgcccagcagcaccccaggcaccacctggatcctgacagagctgaccaccacagccaccaccacagagagcacaggcagcacagccacccccagcagcaccccaggcaccacctggatcctgacagagcccagcaccacagccaccgtgacagtgcccaccggcagcacagccacagccagcagcacccaggccacagctggcaccccccacgtgtccaccacagccaccacccccaccgtgaccagcagcaaggccacccccttcagcagccctggaacagccacagccctgcctgccctgcggagcacagccaccacccccacagccaccagcttcaccgccatccccagcagcagcctgggcaccacctggacccggctgagccagaccaccacccccacagccaccatgagcacagccacccccagcagcaccccagagaccgtgcacaccagcacagtgctgaccaccacagccaccaccaccggggccactggatctgtggccacccccagcagcaccccaggcacagcccacaccaccaaggtgctgaccaccaccaccaccggcttcaccgccacccccagcagcagccctggaacagcccggaccctgcctgtgtggatcagcaccaccaccacccccaccacccggggcagcacagtgacccccagcagcatccctggcaccacccacacccccaccgtgctgaccaccaccaccaccaccgtggccaccggctccatggccacccccagcagcagcacccagaccagcggcaccccacccagcctgaccaccacagccaccaccatcacagccaccggcagcaccaccaaccccagcagcaccccaggcaccacccccatcccccctgtgctgaccaccacagccaccaccccagctgccaccagcagcacagtgacccccagcagcgccctgggcaccacccacaccccacctgtgcccaacaccacagccaccacccacggccgcagcctgagccccagcagcccccacacagtgaggacagcctggaccagcgccaccagcggcaccctgggcaccacccacatcacagagcccagcacaggcaccagccacaccccagctgccaccaccggcaccacccagcacagcaccccagccctgagcagcccccaccccagcagcaggaccacagagagcccccccagccctggcaccaccaccccaggccacacccgggccaccagcaggaccacagccacagccacccccagcaagaccaggaccagcaccctgctgcccagcagccccaccagcgcccccatcaccaccgtggtgaccatgggctgtgagccccagtgtgcctggagcgagtggctggactacagctaccccatgcctggccccagcggcggggactttgacacctacagcaacatccgggctgctggaggagctgtgtgtgagcagcccctgggcctggagtgccgggcccaggcccagcccggggtgcccctgcgggagctgggccaggtggtggagtgcagcctggactttggcctggtgtgcaggaaccgggagcaggtgggcaagttcaagatgtgcttcaactatgagatccgggtcttctgctgcaactacggccactgccccagcaccccagccaccagcagcacagccacccccagcagcaccccaggcaccacctggatcctgacagagcagaccacagctgccaccaccacagccaccaccggcagcacagccatccccagcagcaccccaggcacagcccccccacccaaggtgctgaccagcacagccaccacccccacagccaccagcagcaaggccaccagcagcagcagccccaggacagccaccaccctgcctgtgctgaccagcacagccaccaagagcacagccaccagcttcacccccatccccagcttcaccctgggcaccaccggcaccctgcctgagcagaccaccacccccatggccaccatgagcaccatccaccccagcagcaccccagagaccacccacaccagcacagtgctgaccaccaaggccaccaccacccgggccaccagctccatgagcacccccagcagcaccccaggcaccacctggatcctgacagagctgaccacagctgccaccaccacagctgccaccggccccacagccacccccagcagcaccccaggcaccacctggatcctgacagagcccagcaccacagccaccgtgacagtgcccaccggcagcacagccacagccagcagcacccgggccacagctggcaccctgaaggtgctgaccagcacagccaccacccccaccgtcatcagcagccgggccacccccagcagcagccctggaacagccacagccctgcctgccctgcggagcacagccaccacccccacagccacctctgtgacagccatccccagcagcagcctgggcacagcctggacccggctgagccagaccaccacccccacagccaccatgagcacagccacccccagcagcaccccagagaccgtgcacaccagcacagtgctgaccaccaccaccaccaccacccgggccactggatctgtggccacccccagcagcaccccaggcacagcccacaccaccaaggtgcccaccaccaccaccaccggcttcaccgccacccccagcagcagccctggaacagccctgaccccacctgtgtggatcagcaccaccaccacccccaccacccggggcagcacagtgacccccagcagcatccctggcaccacccacacagccaccgtgctgaccaccaccaccaccaccgtggccaccggctccatggccacccccagcagcagcacccagaccagcggcaccccacccagcctgaccaccacagccaccaccatcacagccaccggcagcaccaccaaccccagcagcaccccaggcaccacccccatcccccctgtgctgaccaccacagccaccaccccagctgccaccagcagcacagtgacccccagcagcgccctgggcaccacccacaccccacctgtgcccaacaccacagccaccacccacggccgcagcctgccccccagcagcccccacacagtgaggacagcctggaccagcgccaccagcggcatcctgggcaccacccacatcacagagcccagcacagtgaccagccacaccccagctgccaccaccagcaccacccagcacagcaccccagccctgagcagcccccaccccagcagcaggaccacagagagcccccccagccctggcaccaccaccccaggccacacccggggcaccagcaggaccacagccacagccacccccagcaagaccaggaccagcaccctgctgcccagcagccccaccagcgcccccatcaccaccgtggtgaccaccggctgtgagccccagtgtgcctggagcgagtggctggactacagctaccccatgcctggccccagcggcggggactttgacacctacagcaacatccgggctgctggaggagctgtgtgtgagcagcccctgggcctggagtgccgggcccaggcccagcccggggtgcccctgcgggagctgggccaggtggtggagtgcagcctggactttggcctggtgtgcaggaaccgggagcaggtgggcaagttcaagatgtgcttcaactatgagatccgggtcttctgctgcaactacggccactgccccagcaccccagccaccagcagcacagccacccccagcagcaccccaggcaccacctggatcctgaccaagctgaccaccacagccaccaccacagagagcacaggcagcacagccacccccagcagcaccccaggcaccacctggatcctgacagagcccagcaccacagccaccgtgacagtgcccaccggcagcacagccacagccagcagcacccaggccacagctggcacccctcatgtgtccaccacagccaccacccccaccgtgaccagcagcaaggccacccccttcagcagccctggaacagccacagccctgcctgccctgcggagcacagccaccacccccacagccaccagcttcaccgccatccccagcagcagcctgggcaccacctggacccggctgagccagaccaccacccccacagccaccatgagcacagccacccccagcagcaccccagagacagcccacaccagcacagtgctgaccaccacagccaccaccacccgggccaccggctctgtggccacccccagcagcaccccaggcacagcccacaccaccaaggtgcccaccaccaccaccaccggcttcaccgtgacccccagcagcagccctggaacagcccggaccccacctgtgtggatcagcaccaccaccacccccaccaccagcggcagcacagtgacccccagctctgtgcccggcaccacccacacccccaccgtgctgaccaccaccaccaccaccgtggccaccggctccatggccacccccagcagcagcacccagaccagcggcaccccacccagcctcatcaccacagccaccaccatcacagccaccggcagcaccaccaaccccagcagcaccccaggcaccacccccatcccccctgtgctgaccaccacagccaccaccccagctgccaccagcagcacagtgacccccagcagcgccctgggcaccacccacaccccacctgtgcccaacaccacagccaccacccacggccgcagcctgagccccagcagcccccacacagtgaggacagcctggaccagcgccaccagcggcaccctgggcaccacccacatcacagagcccagcacaggcaccagccacaccccagctgccaccaccggcaccacccagcacagcaccccagccctgagcagcccccaccccagcagcaggaccacagagagcccccccagccctggcaccaccaccccaggccacaccacagccaccagcaggaccacagccacagccacccccagcaagaccaggaccagcaccctgctgcccagcagccccaccagcgcccccatcaccaccgtggtgaccaccggctgtgagccccagtgtgcctggagcgagtggctggactacagctaccccatgcctggccccagcggcggggactttgacacctacagcaacatccgggccgccggcggcgctgtgtgtgagcagcccctgggcctggagtgccgggcccaggcccagcccggggtgcccctgggggagctgggccaggtggtggagtgcagcctggactttggcctggtgtgcaggaaccgggagcaggtgggcaagttcaagatgtgcttcaactatgagatccgggtcttctgctgcaactacggccactgccccagcaccccagccaccagcagcacagccatgcccagcagcaccccaggcaccacctggatcctgacagagctgaccaccacagccaccaccacagccagcacaggcagcacagccacccccagcagcaccccaggcacagcccccccacccaaggtgctgaccagccctgccaccacccccacagccaccagcagcaaggccaccagcagcagcagccccaggacagccaccaccctgcctgtgctgaccagcacagccaccaagagcacagccacctctgtgacccccatccccagcagcaccctgggcaccaccggcaccctgcctgagcagaccaccacccctgtggccaccatgagcaccatccaccccagcagcaccccagagaccacccacaccagcacagtgctgaccaccaaggccaccaccacccgggccaccagcagcaccagcacccccagcagcaccccaggcaccacctggatcctgacagagctgaccacagctgccaccaccacagctgccaccggccccacagccacccccagcagcaccccaggcaccacctggatcctgacagagctgaccaccacagccaccaccacagccagcacaggcagcacagccacccccagcagcaccccaggcaccacctggatcctgacagagcccagcaccacagccaccgtgacagtgcccaccggcagcacagccacagccagcagcacccaggccacagctggcacccctcatgtgtccaccacagccaccacccccaccgtgaccagcagcaaggccacccccagcagcagccctggaacagccacagccctgcctgccctgcggagcacagccaccacccccacagccaccagcttcaccgccatccccagcagcagcctgggcaccacctggacccggctgagccagaccaccacccccacagccaccatgagcacagccacccccagcagcaccccagagaccgtgcacaccagcacagtgctgacagccacagccaccaccactggagccaccggctctgtggccacccccagcagcaccccaggcacagcccacaccaccaaggtgcccaccaccaccaccaccggcttcaccgccacccccagcagcagccctggaacagccctgaccccacctgtgtggatcagcaccaccaccacccccaccaccaccacccccaccaccagcggcagcacagtgacccccagcagcatccctggcaccacccacacagcccgggtgctgaccaccaccaccaccaccgtggccaccggctccatggccacccccagcagcagcacccagaccagcggcaccccacccagcctgaccaccacagccaccaccatcacagccaccggcagcaccaccaaccccagcagcaccccaggcaccacccccatcacccctgtgctgaccagcacagccaccaccccagctgccaccagcagcaaggccaccagcagcagcagccccaggacagccaccaccctgcctgtgctgaccagcacagccaccaagagcacagccaccagcttcacccccatccccagcagcaccctgtggaccacctggacagtgcctgcccagaccaccacccccatgagcaccatgagcaccatccacaccagcagcaccccagagaccacccacaccagcacagtgctgaccaccacagccaccatgacccgggccaccaacagcacagccacccccagcagcaccctgggcaccacccgcatcctgacagagctgaccaccacagccaccaccacagctgccaccggcagcacagccaccctgagcagcaccccaggcaccacctggatcctgacagagcccagcaccatcgccaccgtgatggtgcccaccggcagcacagccacagccagcagcaccctgggcacagcccacacccccaaggtggtgaccaccatggccaccatgcccacagccacagccagcacagtgcccagcagcagcacagtgggcaccaccaggaccccagctgtgctgcccagcagcctgcccaccttctctgtgtccacagtgagcagctctgtgctgaccaccctgcggcccaccggcttccccagcagccacttcagcaccccctgcttctgccgggccttcggccagttcttcagccctggagaggtgatctacaacaagacagaccgggccggctgccacttctatgctgtgtgcaaccagcactgtgacatcgaccgcttccagggcgcctgccccaccagccccccacctgtgagcagcgcccccctgagcagccccagccctgcccctggctgtgacaatgccatccccctgcggcaggtgaatgagacctggaccctggagaactgcaccgtggcccgctgtgtgggggacaacagagtggtgctgctggaccccaagcctgtggccaacgtgacctgtgtgaacaagcacctgcccatcaaggtgtctgaccccagccagccctgtgacttccactatgaatgtgagtgcatctgcagcatgtggggcggcagccactacagcacctttgatggcaccagctacaccttccggggcaactgcacctacgtgctgatgagggagatccacgcccgcttcggcaacctgagcctgtacctggacaaccactactgcacagccagcgccacagctgctgctgcccgctgcccccgggccctgagcatccactacaagtccatggacatcgtgctgactgtgaccatggtgcacggcaaggaggagggcctcatcctgtttgaccagatccctgtgagcagcggcttcagcaagaatggagtgctggtgtctgtgctgggcaccaccaccatgagggtggacatcccagccctgggcgtgtctgtgaccttcaacggccaggtgttccaggcccggctgccctacagcctcttccacaacaacacagagggccagtgtggcacctgcaccaacaaccagagagatgactgcctgcagagagatggcaccacagctgccagctgcaaggacatggccaagacctggctggtgcctgacagcaggaaggatggctgctgggcccccaccggcaccccacccacagccagccctgctgcccctgtgagcagcacccccacccccaccccctgccccccccagcccctgtgtgacctgatgctgagccaggtgtttgctgagtgccacaacctggtgcccccaggccccttcttcaatgcctgcatcagtgaccactgccggggccgcctggaggtgccctgccagagcctggaggcctatgcagagctgtgccgggcccggggcgtgtgcagcgactggaggggggccaccggcggcctgtgtgacctgacctgcccccccaccaaggtgtacaagccctgtggccccatccagcctgccacctgcaacagcaggaaccagagcccccagctggagggcatggccgagggctgcttctgcccagaggaccagatcctcttcaatgcccacatgggcatctgtgtgcaggcctgcccctgtgtgggcccagatggcttccccaagtttcctggagagcgctgggtgagcaactgccagagctgtgtgtgtgatgagggctctgtgtctgtgcagtgcaagcccctgccctgtgatgcccagggccagcccccaccctgcaaccggcccggctttgtgacagtgacccggcccagggctgagaacccctgctgcccagagaccgtgtgtgtgtgcaacaccaccacctgcccccagagcctgcctgtgtgccccccaggccaggagagcatctgcacccaggaggagggggactgctgccccaccttccgctgccggccccagctgtgcagctacaacggcaccttctatggagtgggcgccaccttccctggggccctgccctgccacatgtgcacctgcctgagcggggacacccaggaccccaccgtgcagtgccaggaggatgcctgcaacaacaccacctgcccccagggctttgagtacaagagggtggccggccagtgctgcggggagtgtgtgcagacagcctgcctgaccccagatggccagcctgtgcagctgaatgagacctgggtgaacagccacgtggacaactgcaccgtgtacctgtgtgaggccgagggcggcgtgcacctgctgaccccccagcctgccagctgcccagatgtgagcagctgccggggcagcctgaggaagacaggctgctgctacagctgtgaggaggacagctgccaggtgcgcatcaacaccaccatcctgtggcaccagggctgtgaaacagaggtgaacatcaccttctgtgagggcagctgccctggggccagcaagtacagcgctgaggcccaggccatgcagcaccagtgcacctgctgccaggagaggagagtgcatgaggagaccgtgcccctgcactgccccaacggcagcgccatcctgcacacctacacccacgtggatgaatgtggctgcacccccttctgtgtgcctgcccccatggccccaccccacacccggggcttccctgcccaggaggccacagctgtgtag

SEQ ID NO: 160337 - DNA, 17289 bp, synthetic construct
  misc_feature 1..17289: note = Description of Artificial Sequence: Synthetic coding sequence
  source 1..17289: mol_type = other DNA
atgggcgcccccagcgcctgcaggaccctggtgctggccctggccgccatgctggtggtgccccaggccgagacccagggccctgtggagcccagctgggagaatgccggccacaccatggatggaggagcccccaccagcagccccaccaggagagtgtcctttgtgccccctgtgaccgtcttccccagcctgagccccctgaacccagcccacaacggccgggtgtgcagcacctggggagacttccactacaagacctttgatggagatgtgttccgcttccctggcctgtgcaactacgtgttcagcgagcactgcagagctgcctatgaggacttcaacgtgcagctgcggcggggcctggtgggcagcaggcctgtggtgaccagggtggtgatcaaggcccagggcctggtgctggaggccagcaatggatctgtgctgatcaatggccagcgggaggagctgccctacagcaggacaggcctgctggtggagcagagcggggactacatcaaggtgtccatccggctggtgctgaccttcctgtggaatggagaggacagcgccctgctggagctggaccccaagtatgccaaccagacctgtggcctgtgtggggacttcaacggcctgcctgccttcaatgagttctacgcccacaatgcccggctgacccccctgcagtttggaaacctgcagaagctggatggccccacagagcagtgcccagaccccctgcccctgcctgctggcaactgcacagatgaggagggcatctgccacaggaccctgctgggccctgcctttgctgaatgtcatgccctggtggacagcacagcctacctggccgcctgtgcccaggacctgtgccgctgccccacctgcccctgtgccacctttgtggagtacagccggcagtgtgcccacgccggcggccagcccaggaactggcgctgcccagagctgtgccccaggacctgccccctgaacatgcagcaccaggagtgtggcagcccctgcacagacacctgcagcaacccccagagggcccagctgtgtgaggaccactgtgtggatggctgcttctgccccccaggcaccgtgctggatgacatcacccacagcggctgcctgcccctgggccagtgcccctgcacccatggaggccgcacctacagccctggcaccagcttcaacaccacctgcagcagctgcacctgcagcggcggcctgtggcagtgccaggacctgccctgccccggcacctgcagcgtgcagggcggggcccacatcagcacctatgatgagaagctgtatgacctgcacggggactgcagctatgtgctgagcaagaagtgtgccgacagcagcttcaccgtgctggccgagctgaggaaatgtggcctgacagacaatgaaaactgcctgaaggctgtgaccctgagcctggatggaggagacacagccatccgggtgcaggctgatggaggagtcttcctgaacagcatctacacccagctgcccctgtctgctgccaacatcaccctcttcacccccagcagcttcttcatcgtggtgcagacaggcctgggcctgcagctgctggtgcagctggtgcccctgatgcaggtgtttgtgcggctggaccctgcccaccagggccagatgtgtggcctgtgtggcaacttcaaccagaaccaggctgatgacttcaccgccctgtctggagtggtggaggccactggagctgcctttgccaacacctggaaggcccaggccgcctgtgccaatgccagaaattcctttgaggacccctgcagcctgtctgtggagaatgaaaattatgcccggcactggtgcagccggctgacagaccccaacagcgccttcagccgctgccacagcatcatcaaccccaagcccttccacagcaactgcatgtttgacacctgcaactgtgagaggtctgaggactgcctgtgtgccgccctgagcagctatgtgcacgcctgtgccgccaagggcgtgcagctgagtgactggagagatggagtgtgcaccaagtacatgcagaactgccccaagagccagagatatgcctacgtggtggatgcctgccagcccacctgccggggcctgtctgaggctgatgtgacctgcagcgtgtcctttgtgcctgtggatggctgcacctgcccagctggcaccttcctgaatgatgctggggcctgtgtgcctgcccaggagtgcccctgctacgcccatggaacagtgctggcccctggagaggtggtgcatgatgaaggagctgtgtgcagctgcacaggaggcaagctgagctgcctgggcgccagcctgcagaagagcacaggctgtgccgcccccatggtgtacctggactgcagcaacagcagcgctggcaccccaggagctgagtgcctgcggagctgccacaccctggatgtgggctgcttcagcacccactgtgtgtctggctgtgtgtgccccccaggcctggtgtctgatggcagcggcggctgcatcgccgaggaggactgcccctgtgtgcacaatgaggccacctacaagccaggagagaccatccgggtggactgcaacacctgcacctgcaggaacagacgctgggagtgcagccaccggctgtgcctgggcacctgtgtggcctatggagatggccacttcatcacctttgatggagaccgctacagctttgagggcagctgtgagtacatcctggcccaggactactgtggggacaacaccacccacggcaccttcagaattgtgacagagaacatcccctgtggcaccaccggcaccacctgcagcaaggccatcaagctgtttgtggagagctatgagctgatcctgcaggagggcaccttcaaggctgtggcccggggccctggaggagaccccccctacaagatccgctacatgggcatcttcctggtgattgagacccacggcatggctgtgtcctgggacaggaagacctctgtgttcatccggctgcaccaggactacaagggccgggtgtgtggcctgtgtggcaactttgatgacaatgccatcaatgactttgccaccaggagccgctctgtggtgggagatgccctggagtttggaaacagctggaagctgagccccagctgcccagatgccctggcccccaaggacccctgcacagccaaccccttcaggaagtcctgggcccagaagcagtgcagcatcctgcacggccccacctttgctgcctgccgcagccaggtggacagcaccaagtactatgaggcctgtgtgaatgatgcctgtgcctgtgacagcggcggggactgtgagtgcttctgcacagctgtggccgcctatgcccaggcctgccatgatgctggcctgtgtgtgtcctggaggaccccagacacctgccccctcttctgtgacttctacaacccccatggaggctgtgagtggcactaccagccctgtggggccccctgcctgaagacctgcaggaaccccagcggccactgcctggtggacctgcccggcctggagggctgctaccccaagtgcccccccagccagcccttcttcaatgaagaccagatgaagtgtgtggcccagtgtggctgctatgacaaggatggcaactactatgatgtgggcgcccgggtgcccacagctgagaactgccagagctgcaactgcacccccagcggcatccagtgtgcccacagcctggaggcctgcacctgcacctatgaggacaggacctacagctaccaggacgtcatctacaacaccacagatggcctgggcgcctgcctgattgccatctgtggcagcaatggcaccatcatcaggaaggctgtggcctgccccggcaccccagccaccacccccttcaccttcaccacagcctgggtgccccacagcaccaccagccctgccctgcctgtgtccacagtgtgtgtgcgggaggtgtgccgctggagctcctggtacaacggccacaggcctgagcccggcctgggcggcggggactttgagacctttgagaacctgcggcagaggggctaccaggtgtgccctgtgctggccgacattgaatgtcgggccgcccagctgcctgacatgcccctggaggagctgggccagcaggtggactgtgacaggatgaggggcctgatgtgtgccaacagccagcagagcccccccctgtgccacgactatgagctgcgggtgctgtgctgtgaatatgtgccctgtggccccagccctgcccctggcaccagcccccagcccagcctgagcgccagcacagagcctgctgtgcccacccccacccagaccacagccacagagaagaccaccctgtgggtgacccccagcatccgcagcacagctgccctgaccagccagacaggcagcagcagcggccctgtgacagtgacccccagcgcccctggcaccaccacctgccagccccgctgccagtggacagagtggtttgatgaggactaccccaagtctgagcagctgggcggagatgtggagagctatgacaagatccgggccgccggcggccacctgtgccagcagcccaaggacatcgagtgccaggccgagagcttccccaactggaccctggcccaggtgggccagaaggtgcactgtgatgtgcacttcggcctggtgtgcaggaactgggagcaggagggcgtcttcaagatgtgctacaactaccgcatccgggtgctgtgctgcagtgatgaccactgccggggccgggccaccaccccaccacccaccacagagctggagacagccaccaccaccaccacccaggccctcttcagcaccccccagcccaccagcagccctggcctgacccgggcccccccagccagcaccacagctgtgcccaccctgtctgagggcctgaccagcccccgctacaccagcaccctgggcacagccaccactggaggccccaccaccccagctggcagcacagagcccaccgtgcctggggtggccaccagcaccctgcccaccaggtctgccctgcccggcaccaccggcagcctgggcacctggaggcccagccagccccccaccctggcccccaccaccatggccaccagccgggcccggcccaccggcacagccagcacagccagcaaggagcccctgaccaccagcctggcccccaccctgaccagcgagctgagcaccagccaggccgagaccagcacccccaggacagagaccaccatgagccccctgaccaacaccaccaccagccagggcaccacccgctgccagcccaagtgtgagtggacagagtggtttgatgtggacttccccaccagcggcgtggccggcggggacatggagacctttgagaacatccgggctgctgggggcaagatgtgctgggcccccaagagcattgaatgtagagctgagaactacccagaggtgtccattgaccaggtgggccaggtgctgacctgcagcctggagaccggcctgacctgcaagaatgaagaccagacaggccgcttcaacatgtgcttcaactacaacgtgcgggtgctgtgctgtgatgactacagccactgccccagcaccccagccaccagcagcacagccacccccagcagcaccccaggcaccacctggatcctgaccaagcccaccaccacagccaccaccacagccagcacaggcagcacagccacccccaccagcaccctgaggacagcccccccacccaaggtgctgaccaccacagccaccacccccaccgtgaccagcagcaaggccacccccagcagcagccctggaacagccacagccctgcctgccctgcggagcacagccaccacccccacagccacctctgtgacccccatccccagcagcagcctgggcaccacctggacccggctgagccagaccaccacccccacagccaccatgagcacagccacccccagcagcaccccagagacagcccacaccagcacagtgctgacagccacagccaccaccaccggggccactggatctgtggccacccccagcagcaccccaggcacagcccacaccaccaaggtgcccaccaccaccaccaccggcttcaccgccacccccagcagcagccctggaacagccctgaccccacctgtgtggatcagcaccaccaccacccccaccacccggggcagcacagtgacccccagcagcatccctggcaccacccacacagccaccgtgctgaccaccaccaccaccaccgtggccaccggctccatggccacccccagcagcagcacccagaccagcggcaccccacccagcctgaccaccacagccaccaccatcacagccaccggcagcaccaccaaccccagcagcaccccaggcaccacccccatcccccctgtgctgaccaccacagccaccaccccagctgccaccagcaacacagtgacccccagcagcgccctgggcaccacccacaccccacctgtgcccaacaccatggccaccacccacggccgcagcctgccccccagcagcccccacacagtgaggacagcctggaccagcgccaccagcggcatcctgggcaccacccacatcacagagcccagcacagtgaccagccacaccctggccgccaccaccggcaccacccagcacagcaccccagccctgagcagcccccaccccagcagcaggaccacagagagcccccccagccctggcaccaccaccccaggccacaccacagccaccagcaggaccacagccacagccacccccagcaagaccaggaccagcaccctgctgcccagcagccccaccagcgcccccatcaccaccgtggtgaccatgggctgtgagccccagtgtgcctggagcgagtggctggactacagctaccccatgcctggccccagcggcggggactttgacacctacagcaacatccgggctgctggaggagctgtgtgtgagcagcccctgggcctggagtgccgggcccaggcccagcccggggtgcccctgcgggagctgggccaggtggtggagtgcagcctggactttggcctggtgtgcaggaaccgggagcaggtgggcaagttcaagatgtgcttcaactatgagatccgggtcttctgctgcaactacggccactgccccagcaccccagccaccagcagcacagccatgcccagcagcaccccaggcaccacctggatcctgacagagctgaccaccacagccaccaccacagagagcacaggcagcacagccacccccagcagcaccccaggcaccacctggatcctgacagagcccagcaccacagccaccgtgacagtgcccaccggcagcacagccacagccagcagcacccaggccacagctggcacccctcatgtgtccaccacagccaccacccccaccgtgaccagcagcaaggccacccccttcagcagccctggaacagccacagccctgcctgccctgcggagcacagccaccacccccacagccaccagcttcaccgccatccccagcagcagcctgggcaccacctggacccggctgagccagaccaccacccccacagccaccatgagcacagccacccccagcagcaccccagagaccgtgcacaccagcacagtgctgaccaccacagccaccaccactggagccaccggctctgtggccacccccagcagcaccccaggcacagcccacaccaccaaggtgctgaccaccaccaccaccggcttcaccgccacccccagcagcagccctggaacagcccggaccctgcctgtgtggatcagcaccaccaccacccccaccacccggggcagcacagtgacccccagcagcatccctggcaccacccacacccccaccgtgctgaccaccaccaccaccaccgtggccaccggctccatggccacccccagcagcagcacccagaccagcggcaccccacccagcctgaccaccacagccaccaccatcacagccaccggcagcaccaccaaccccagcagcaccccaggcaccacccccatcccccctgtgctgaccaccacagccaccaccccagctgccaccagcagcacagtgacccccagcagcgccctgggcaccacccacaccccacctgtgcccaacaccacagccaccacccacggccgcagcctgagccccagcagcccccacacagtgaggacagcctggaccagcgccaccagcggcaccctgggcaccacccacatcacagagcccagcacaggcaccagccacaccccagctgccaccaccggcaccacccagcacagcaccccagccctgagcagcccccaccccagcagcaggaccacagagagcccccccagccctggcaccaccaccccaggccacacccgggccaccagcaggaccacagccacagccacccccagcaagaccaggaccagcaccctgctgcccagcagccccaccagcgcccccatcaccaccgtggtgaccatgggctgtgagccccagtgtgcctggagcgagtggctggactacagctaccccatgcctggccccagcggcggggactttgacacctacagcaacatccgggccgccggcggcgctgtgtgtgagcagcccctgggcctggagtgccgggcccaggcccagcccggggtgcccctgcgggagctgggccaggtggtggagtgcagcctggactttggcctggtgtgcaggaaccgggagcaggtgggcaagttcaagatgtgcttcaactatgagatccgggtcttctgctgcaactacggccactgccccagcaccccagccaccagcagcacagccacccccagcagcaccccaggcaccacctggatcctgacagagcagaccacagctgccaccaccacagccaccaccggcagcacagccatccccagcagcaccccaggcacagcccccccacccaaggtgctgaccagcacagccaccacccccacagccaccagcagcaaggccaccagcagcagcagccccaggacagccaccaccctgcctgtgctgaccagcacagccaccaagagcacagccaccagcttcacccccatccccagcttcaccctgggcaccaccggcaccctgcctgagcagaccaccacccccatggccaccatgagcaccatccaccccagcagcaccccagagaccacccacaccagcacagtgctgaccaccaaggccaccaccacccgggccaccagctccatgagcacccccagcagcaccccaggcaccacctggatcctgacagagctgaccacagctgccaccaccacagctgccaccggccccacagccacccccagcagcaccccaggcaccacctggatcctgacagagcccagcaccacagccaccgtgacagtgcccaccggcagcacagccacagccagcagcacccgggccacagctggcaccctgaaggtgctgaccagcacagccaccacccccaccgtcatcagcagccgggccacccccagcagcagccctggaacagccacagccctgcctgccctgcggagcacagccaccacccccacagccacctctgtgacagccatccccagcagcagcctgggcacagcctggacccggctgagccagaccaccacccccacagccaccatgagcacagccacccccagcagcaccccagagaccgtgcacaccagcacagtgctgaccaccaccaccaccaccacccgggccaccggctctgtggccacccccagcagcaccccaggcacagcccacaccaccaaggtgcccaccaccaccaccaccggcttcaccgccacccccagcagcagccctggaacagccctgaccccacctgtgtggatcagcaccaccaccacccccaccacccggggcagcacagtgacccccagcagcatccctggcaccacccacacagccaccgtgctgaccaccaccaccaccaccgtggccaccggctccatggccacccccagcagcagcacccagaccagcggcaccccacccagcctgaccaccacagccaccaccatcacagccaccggcagcaccaccaaccccagcagcaccccaggcaccacccccatcccccctgtgctgaccaccacagccaccaccccagctgccaccagcagcacagtgacccccagcagcgccctgggcaccacccacaccccacctgtgcccaacaccacagccaccacccacggccgcagcctgccccccagcagcccccacacagtgaggacagcctggaccagcgccaccagcggcatcctgggcaccacccacatcacagagcccagcacagtgaccagccacaccccagctgccaccaccagcaccacccagcacagcaccccagccctgagcagcccccaccccagcagcaggaccacagagagcccccccagccctggcaccaccaccccaggccacacccggggcaccagcaggaccacagccacagccacccccagcaagaccaggaccagcaccctgctgcccagcagccccaccagcgcccccatcaccaccgtggtgaccaccggctgtgagccccagtgtgcctggagcgagtggctggactacagctaccccatgcctggccccagcggcggggactttgacacctacagcaacatccgggccgccggcggcgctgtgtgtgagcagcccctgggcctggagtgccgggcccaggcccagcccggggtgcccctgcgggagctgggccaggtggtggagtgcagcctggactttggcctggtgtgcaggaaccgggagcaggtgggcaagttcaagatgtgcttcaactatgagatccgggtcttctgctgcaactacggccactgccccagcaccccagccaccagcagcacagccacccccagcagcaccccaggcaccacctggatcctgaccaagctgaccaccacagccaccaccacagagagcacaggcagcacagccacccccagcagcaccccaggcaccacctggatcctgacagagcccagcaccacagccaccgtgacagtgcccaccggcagcacagccacagccagcagcacccaggccacagctggcaccccccacgtgtccaccacagccaccacccccaccgtgaccagcagcaaggccacccccttcagcagccctggaacagccacagccctgcctgccctgcggagcacagccaccacccccacagccaccagcttcaccgccatccccagcagcagcctgggcaccacctggacccggctgagccagaccaccacccccacagccaccatgagcacagccacccccagcagcaccccagagacagcccacaccagcacagtgctgaccaccacagccaccaccacccgggccactggatctgtggccacccccagcagcaccccaggcacagcccacaccaccaaggtgcccaccaccaccaccaccggcttcaccgtgacccccagcagcagccctggaacagcccggaccccacctgtgtggatcagcaccaccaccacccccaccaccagcggcagcacagtgacccccagctctgtgcccggcaccacccacacccccaccgtgctgaccaccaccaccaccaccgtggccaccggctccatggccacccccagcagcagcacccagaccagcggcaccccacccagcctcatcaccacagccaccaccatcacagccaccggcagcaccaccaaccccagcagcaccccaggcaccacccccatcccccctgtgctgaccaccacagccaccaccccagctgccaccagcagcacagtgacccccagcagcgccctgggcaccacccacaccccacctgtgcccaacaccacagccaccacccacggccgcagcctgagccccagcagcccccacacagtgaggacagcctggaccagcgccaccagcggcaccctgggcaccacccacatcacagagcccagcacaggcaccagccacaccccagctgccaccaccggcaccacccagcacagcaccccagccctgagcagcccccaccccagcagcaggaccacagagagcccccccagccctggcaccaccaccccaggccacaccacagccaccagcaggaccacagccacagccacccccagcaagaccaggaccagcaccctgctgcccagcagccccaccagcgcccccatcaccaccgtggtgaccaccggctgtgagccccagtgtgcctggagcgagtggctggactacagctaccccatgcctggccccagcggcggggactttgacacctacagcaacatccgggctgctggaggagctgtgtgtgagcagcccctgggcctggagtgccgggcccaggcccagcccggggtgcccctgggggagctgggccaggtggtggagtgcagcctggactttggcctggtgtgcaggaaccgggagcaggtgggcaagttcaagatgtgcttcaactatgagatccgggtcttctgctgcaactacggccactgccccagcaccccagccaccagcagcacagccatgcccagcagcaccccaggcaccacctggatcctgacagagctgaccaccacagccaccaccacagccagcacaggcagcacagccacccccagcagcaccccaggcacagcccccccacccaaggtgctgaccagccctgccaccacccccacagccaccagcagcaaggccaccagcagcagcagccccaggacagccaccaccctgcctgtgctgaccagcacagccaccaagagcacagccacctctgtgacccccatccccagcagcaccctgggcaccaccggcaccctgcctgagcagaccaccacccctgtggccaccatgagcaccatccaccccagcagcaccccagagaccacccacaccagcacagtgctgaccaccaaggccaccaccacccgggccaccagcagcaccagcacccccagcagcaccccaggcaccacctggatcctgacagagctgaccacagctgccaccaccacagctgccaccggccccacagccacccccagcagcaccccaggcaccacctggatcctgacagagctgaccaccacagccaccaccacagccagcacaggcagcacagccacccccagcagcaccccaggcaccacctggatcctgacagagcccagcaccacagccaccgtgacagtgcccaccggcagcacagccacagccagcagcacccaggccacagctggcaccccccacgtgtccaccacagccaccacccccaccgtgaccagcagcaaggccacccccagcagcagccctggaacagccacagccctgcctgccctgcggagcacagccaccacccccacagccaccagcttcaccgccatccccagcagcagcctgggcaccacctggacccggctgagccagaccaccacccccacagccaccatgagcacagccacccccagcagcaccccagagaccgtgcacaccagcacagtgctgacagccacagccaccaccaccggggccactggatctgtggccacccccagcagcaccccaggcacagcccacaccaccaaggtgcccaccaccaccaccaccggcttcaccgccacccccagcagcagccctggaacagccctgaccccacctgtgtggatcagcaccaccaccacccccaccaccaccacccccaccaccagcggcagcacagtgacccccagcagcatccctggcaccacccacacagcccgggtgctgaccaccaccaccaccaccgtggccaccggctccatggccacccccagcagcagcacccagaccagcggcaccccacccagcctgaccaccacagccaccaccatcacagccaccggcagcaccaccaaccccagcagcaccccaggcaccacccccatcacccctgtgctgaccagcacagccaccaccccagctgccaccagcagcaaggccaccagcagcagcagccccaggacagccaccaccctgcctgtgctgaccagcacagccaccaagagcacagccaccagcttcacccccatccccagcagcaccctgtggaccacctggacagtgcctgcccagaccaccacccccatgagcaccatgagcaccatccacaccagcagcaccccagagaccacccacaccagcacagtgctgaccaccacagccaccatgacccgggccaccaacagcacagccacccccagcagcaccctgggcaccacccgcatcctgacagagctgaccaccacagccaccaccacagctgccaccggcagcacagccaccctgagcagcaccccaggcaccacctggatcctgacagagcccagcaccatcgccaccgtgatggtgcccaccggcagcacagccacagccagcagcaccctgggcacagcccacacccccaaggtggtgaccaccatggccaccatgcccacagccacagccagcacagtgcccagcagcagcacagtgggcaccaccaggaccccagctgtgctgcccagcagcctgcccaccttctctgtgtccacagtgagcagctctgtgctgaccaccctgcggcccaccggcttccccagcagccacttcagcaccccctgcttctgccgggccttcggccagttcttcagccctggagaggtgatctacaacaagacagacagagctggctgccacttctatgctgtgtgcaaccagcactgtgacatcgaccgcttccagggcgcctgccccaccagccccccacctgtgtcctctgcccccctgagcagccccagccctgcccctggctgtgacaatgccatccccctgcggcaggtgaatgagacctggaccctggagaactgcaccgtggcccgctgtgtgggggacaacagagtggtgctgctggaccccaagcctgtggccaacgtgacctgtgtgaacaagcacctgcccatcaaggtgtctgaccccagccagccctgtgacttccactatgaatgtgagtgcatctgcagcatgtggggcggcagccactacagcacctttgatggcaccagctacaccttccggggcaactgcacctacgtgctgatgagggagatccacgccaggtttggaaacctgagcctgtacctggacaaccactactgcacagccagcgccacagctgctgctgcccgctgcccccgggccctgagcatccactacaagtccatggacatcgtgctgactgtgaccatggtgcacggcaaggaggagggcctcatcctgtttgaccagatccctgtgagcagcggcttcagcaagaatggagtgctggtgtctgtgctgggcaccaccaccatgagggtggacatcccagccctgggcgtgtctgtgaccttcaacggccaggtgttccaggcccggctgccctacagcctcttccacaacaacacagagggccagtgtggcacctgcaccaacaaccagagagatgactgcctgcagagagatggcaccacagctgccagctgcaaggacatggccaagacctggctggtgcctgacagcaggaaggatggctgctgggcccccaccggcaccccacccacagccagccctgctgcccctgtgagcagcacccccacccccaccccctgccccccccagcccctgtgtgacctgatgctgagccaggtgtttgctgagtgccacaacctggtgcccccaggccccttcttcaatgcctgcatcagtgaccactgccggggccgcctggaggtgccctgccagagcctggaggcctatgcagagctgtgccgggcccggggcgtgtgcagcgactggaggggggccactggaggcctgtgtgacctgacctgcccccccaccaaggtgtacaagccctgtggccccatccagcctgccacctgcaacagcaggaaccagagcccccagctggagggcatggccgagggctgcttctgcccagaggaccagatcctcttcaatgcccacatgggcatctgtgtgcaggcctgcccctgtgtgggcccagatggcttccccaagtttcctggagagcgctgggtgagcaactgccagagctgtgtgtgtgatgagggctctgtgtctgtgcagtgcaagcccctgccctgtgatgcccagggccagcccccaccctgcaacagacctggctttgtgacagtgacccggcccagggctgagaacccctgctgcccagagaccgtgtgtgtgtgcaacaccaccacctgcccccagagcctgcctgtgtgccccccaggccaggagagcatctgcacccaggaggagggggactgctgccccaccttccgctgccggccccagctgtgcagctacaacggcaccttctacggcgtgggcgccaccttccctggggccctgccctgccacatgtgcacctgcctgagcggggacacccaggaccccaccgtgcagtgccaggaggatgcctgcaacaacaccacctgcccccagggctttgagtacaagagggtggccggccagtgctgcggagaatgtgtgcagacagcctgcctgaccccagatggccagcctgtgcagctgaatgagacctgggtgaacagccacgtggacaactgcaccgtgtacctgtgtgaggccgagggcggcgtgcacctgctgaccccccagcctgccagctgcccagatgtgagcagctgccggggcagcctgaggaagacaggctgctgctacagctgtgaggaggacagctgccaggtgcgcatcaacaccaccatcctgtggcaccagggctgtgaaacagaggtgaacatcaccttctgtgagggcagctgccctggggccagcaagtacagcgctgaggcccaggccatgcagcaccagtgcacctgctgccaggagcggcgggtgcatgaggagaccgtgcccctgcactgccccaatggaagtgccatcctgcacacctacacccacgtggatgaatgtggctgcacccccttctgtgtgcctgcccccatggccccaccccacacccggggcttccctgcccaggaggccacagctgtgtag

SEQ ID NO: 160338 - DNA, 1611 bp, synthetic construct
  misc_feature 1..1611: note = Description of Artificial Sequence: Synthetic coding sequence
  source 1..1611: mol_type = other DNA
gtcttctgctgcaactacggccactgccccccccggcccccagccctgcggccctgccccccacccctgcggggccggcccggcagcacagagctgaccaccacagccaccaccacagccagcacaggcagcacagccacccccagcagcaccccaggcacagcccccccacccaaggtgctgaccagccctgccaccacccccacagccaccagcagcaaggccaccagcagcagcagccccaggacagccaccaccctgcctgtgctgaccagcacagccaccaagagcacagccacctctgtgacccccatccccagcagcaccctgggcaccaccggcaccctgcctgagcagaccaccacccctgtggccaccatgagcaccatccaccccagcagcaccccagagaccacccacaccagcacagtgctgaccaccaaggccaccaccacccgggccaccagcagcaccagcacccccagcagcaccccaggcaccacctggatcctgacagagctgaccacagctgccaccaccacagctgccaccggccccacagccacccccagcagcaccccaggcaccacctggatcctgacagagctgaccaccacagccaccaccacagccagcacaggcagcacagccacccccagcagcaccccaggcaccacctggatcctgacagagcccagcaccacagccaccgtgacagtgcccaccggcagcacagccacagccagcagcacccaggccacagctggcacccctcatgtgtccaccacagccaccacccccaccgtgaccagcagcaaggccacccccagcagcagccctggaacagccacagccctgcctgccctgcggagcacagccaccacccacagctaccagctgtacagccaccccctgctgctgcccaccacctggacccggctgagccagaccaccacccccacagccaccatgagcacagccacccccagcagcaccccagagaccgtgcacaccagcacagtgctgacagccacagccaccaccactggacctgccctgtggcccccacctcctccaccccaggagcagctgaccctgcccaagtgccgcctgccccagcccaggcacagccaccccctgctgcagcccagagatggcacccacgccagctctgtggaccagcacaaccaccacacccacaaccaccacacccacaaccagtggctgcacggggaccccctgctgcaccctggggaccacccccaccggcagagcgctgaccaccaccaccacaactgcaccggctccatggccacccccagcagcagcacccagaccagcggcaccccacccagcctgaccaccacagccaccaccatcacagccaccggcagcaccaccaaccccagcagcaccccaggcaccacccccatcacccctgtgctgaccagcacagccaccaccccagctgccaccagcagcaaggccaccagcagcagcagccccaggacagccaccaccctgcctgtgctgaccagcacagccaccaagagcacagccaccagcttcacccccatccccagcccctgtggcccccggggccccagctag

SEQ ID NO: 160339 - DNA, 561 bp, synthetic construct
  misc_feature 1..561: note = Description of Artificial Sequence: Synthetic coding sequence
  source 1..561: mol_type = other DNA
agcagcaccccaggcaccacctggatcctgacagagcccagcaccacagccaccgtgacagtgcccaccggcagcacagccacagccagcagcacccaggccacagctggcaccccccacgtgtccaccacagccaccacccccaccgtgaccagcagcaaggccacccccttcagcagccctggaacagccacagccctgcctgccctgcggagcacagccaccacccccacagccaccagcttcaccgccatccccagctcctgggcccctcctggccctgcctaccacaggcctccccacccccggcccccctgcccccagccccaccccccacccctgcagaggctgagcaccccaccccagtgcctgcccccccggcccccccggggccaccggctgtgtggccaccccctgctgcaccccaggaacagcagccactaccagagcgctgactaccacaaccacttcaccgccacccccagcagcagccctggaacagcccggaccctgcctgtgtggatcagcaccaccaccacccccaccacccggggcagctag

SEQ ID NO: 160340 - DNA, 960 bp, synthetic construct
  misc_feature 1..960: note = Description of Artificial Sequence: Synthetic coding sequence
  source 1..960: mol_type = other DNA
accaaggccaccaccacccgggccaccagctccatgagcacccccagcagcaccccaggcaccacctggatcctgacagagctgaccacagctgccaccaccacagctgccaccccccacggccaccctgtgctgcacccccgggaccacctggacccccaccgggcccagcactacacagtgacagtgcccaccggcagcacagccacagccagcagcacccgggccacagctggcaccctgaaggtgctgaccagccaccacacccacagccaccagctgcagagccacagcctgctgcagagccgggactgcaaccggcccagcagcacagagaagcacagccaccacacccacagctaccagcgctacagccaccccctcttcctgcccacagcctggacccggctgagccagaccaccacccccacagccaccatgagcacagccacccccagcagcaccccagagaccgtgcacaccagcacagtgctgaccaccaccaccaccaccacccgggccaccctgtggcccccacctcctccaccccaggagcagctgaccctgcccaagtgccgcctgccccagcccaggcacagccaccccctgctgcagcccagagatggcacccacgccagctctgtggaccagcacaaccaccacacccacaaccagaggctgcacggggaccccctgctgcaccccaccacccacacagccaccgtgctgaccaccaccaccaccacccccctggtgctgtggcagcacccccccctggcccacaggcctgtggtgccccccagcctgaccaccacagccaccaccatcacagccaccggcagcaccaccaaccccagcagcaccccaggcaccacccccatcccccctgtgctgaccaccacagcccacacctgcagccaccagcagcacagcgacagcctgctgtgcccccgggactag

SEQ ID NO: 160341 - DNA, 2007 bp, synthetic construct
  misc_feature 1..2007: note = Description of Artificial Sequence: Synthetic coding sequence
  source 1..2007: mol_type = other DNA
atgagggagatccacgcccgcttcggcaacctgagcctgtacctggacaaccactactgcacagccagcgccacagctgctgctgcccgctgcccccgggccctgagcatccactacaagtccatggacatcgtgctgactgtgaccatggtgcacggcaaggaggagggcctcatcctgtttgaccagatccctgtgagcagcggcttcagcaagaatggagtgctggtgtctgtgctgggcaccaccaccatgagggtggacatcccagccctgggcgtgtctgtgaccttcaacggccaggtgttccaggcccggctgccctacagcctcttccacaacaacacagagggccagtgtggcacctgcaccaacaaccagagagatgactgcctgcagagagatggcaccacagctgccagctgcaaggacatggccaagacctggctggtgcctgacagcaggaaggatggctgctgggcccccaccggcaccccacccacagccagccctgctgcccctgtgagcagcacccccacccccaccccctgccccccccagcccctgtgtgacctgatgctgagccaggtgtttgctgagtgccacaacctggtgcccccaggccccttcttcaatgcctgcatcagtgaccactgccggggccgcctggaggtgccctgccagagcctggaggcctatgcagagctgtgccgggcccggggcgtgtgcagcgactggaggggggccaccggcggcctgtgtgacctgacctgcccccccaccaaggtgtacaagccctgtggccccatccagcctgccacctgcaacagcaggaaccagagcccccagctggagggcatggccgagggctgcttctgcccagaggaccagatcctcttcaatgcccacatgggcatctgtgtgcaggcctgcccctgtgtgggcccagatggcttccccaagtttcctggagagcgctgggtgagcaactgccagagctgtgtgtgtgatgagggctctgtgtctgtgcagtgcaagcccctgccctgtgatgcccagggccagcccccaccctgcaaccggcccggctttgtgacagtgacccggcccagggctgagaacccctgctgcccagagaccgtgtgtgtgtgcaacaccaccacctgcccccagagcctgcctgtgtgccccccaggccaggagagcatctgcacccaggaggagggggactgctgccccaccttccgctgccggccccagctgtgcagctacaacggcaccttctatggagtgggcgccaccttccctggggccctgccctgccacatgtgcacctgcctgagcggggacacccaggaccccaccgtgcagtgccaggaggatgcctgcaacaacaccacctgcccccagggctttgagtacaagagggtggccggccagtgctgcggggagtgtgtgcagacagcctgcctgaccccagatggccagcctgtgcagctgaatgagacctgggtgaacagccacgtggacaactgcaccgtgtacctgtgtgaggccgagggcggcgtgcacctgctgaccccccagcctgccagctgcccagatgtgagcagctgccggggcagcctgaggaagacaggctgctgctacagctgtgaggaggacagctgccaggtgcgcatcaacaccaccatcctgtggcaccagggctgtgaaacagaggtgaacatcaccttctgtgagggcagctgccctggggccagcaagtacagcgctgaggcccaggccatgcagcaccagtgcacctgctgccaggagaggagagtgcatgaggagaccgtgcccctgcactgccccaacggcagcgccatcctgcacacctacacccacgtggatgaatgtggctgcacccccttctgtgtgcctgcccccatgagccccccagcctgtgtgtggcacccagccctgcgggccccagctgcccacctgggcctggcccctccttag

SEQ ID NO: 160342 - DNA, 7320 bp, synthetic construct
  misc_feature 1..7320: note = Description of Artificial Sequence: Synthetic coding sequence
  source 1..7320: mol_type = other DNA
atggtgcagcgctggctgctgctgagctgctgcggggccctgctgtctgctggcctggccaacaccagctacaccagccctggcctgcagaggctgaaggacagcccccagacagccccagacaagggccagtgcagcacctggggcgccggccacttcagcacctttgaccaccacgtgtatgacttcagcggcacctgcaactacatctttgctgccacctgcaaggatgccttccccaccttctctgtgcagctgcggcggggcccagatggcagcatcagccgcatcatcgtggagctgggcgcctctgtggtgacagtgtctgaggccatcatctctgtgaaggacatcggggtcatcagcctgccctacaccagcaatggcctgcagatcaccccatttggccagagcgtgcggctggtggccaagcagctggagctggagctggaggtggtgtggggccctgacagccacctgatggtgctggtggagaggaagtacatgggccagatgtgtggcctgtgtggcaactttgatggcaaggtgaccaatgaatttgtgtctgaggagggcaagttcctggagccccacaagtttgctgccctgcagaagctggatgatcctggagagatctgcaccttccaggacatccccagcacccacgtgcggcaggcccagcacgcccgcatctgcacccagctgctgaccctggtggcccctgagtgcagcgtgtccaaggagccctttgtgctgagctgccaggctgatgtggccgccgccccccagcccggcccccagaacagcagctgtgccaccctgtctgagtacagccggcagtgcagcatggtgggccagcctgtgcggcgctggaggagccctggcctgtgcagcgtgggccagtgcccagccaaccaggtgtaccaggagtgtggcagcgcctgtgtgaagacctgcagcaacccccagcacagctgcagcagcagctgcaccttcggctgcttctgcccagagggcaccgtgctgaatgacctgagcaacaaccacacctgtgtgcctgtgacccagtgcccctgtgtgctgcacggggccatgtatgcccctggagaggtgaccatcgccgcctgccagacctgccgctgcaccctgggccgctgggtgtgcacagagcggccctgccccggccactgcagcctggagggcggcagctttgtgaccacctttgatgcccggccctaccgcttccacggcacctgcacctacatcctgctgcagagcccccagctgcctgaagatggagccctgatggctgtgtatgacaagagcggcgtgagccacagcgagaccagcctggtggccgtggtgtacctgagccggcaggacaagatcgtcatcagccaggatgaggtggtgaccaacaacggggaggccaagtggctgccctacaagaccaggaacatcaccgtcttccggcagaccagcacccacctgcagatggccaccagctttggcctggagctggtggtgcagctgcggcccatcttccaggcctacgtgacagtgggcccccagttccggggccagacccggggcctgtgtggcaacttcaatggagacaccacagatgacttcaccacctccatgggcattgctgagggcacagccagcctgtttgtggacagctggagggctggcaactgcccagctgccctggagcgggagacagacccctgcagcatgagccagctgaacaaggtgtgtgccgagacccactgcagcatgctgctgaggacaggcaccgtgtttgagcgctgccacgccaccgtgaacccagcccccttctacaagagatgtgtgtaccaggcctgcaactatgaggagaccttcccccacatctgtgccgccctgggggactatgtgcacgcctgcagcctgcggggcgtgctgctgtggggctggaggagctctgtggacaactgcaccatcccctgcaccggcaacaccaccttctcctacaacagccaggcctgtgagaggacctgcctgagcctgagtgaccgggccacagagtgccaccacagcgctgtgcctgtggatggctgcaactgcccagatggcacctacctgaaccagaagggggagtgtgtgaggaaggcccagtgcccctgcatcctggagggctacaagttcatcctggccgagcagagcaccgtcatcaatggcatcacctgccactgcatcaatggccgcctgagctgcccccagaggccccagatgttcctggccagctgccaggcccccaagaccttcaagagctgcagccagagcagcgagaacaagtttggagctgcctgtgcccccacctgccagatgctggccaccggggtggcctgtgtgcccaccaagtgtgagcccggctgtgtgtgtgccgagggcctgtatgaaaatgctgatggccagtgtgtgcccccagaggagtgcccctgtgagttcagcggcgtgtcctacccaggaggagctgagctgcacacagactgcaggacctgcagctgcagccggggccgctgggcctgccagcagggcacccactgccccagcacctgcaccctgtatggagagggccacgtgatcacctttgatggccagagatttgtgtttgatggcaactgtgagtacatcctggccacagatgtgtgtggggtgaatgacagccagcccaccttcaagatcctgacagaaaatgtcatctgtggcaacagcggcgtgacctgcagccgggccatcaagatcttcctgggcggcctgtctgtggtgctggccgacaggaactacacagtgactggagaggagccccacgtgcagctgggcgtgacccctggggccctgagcctggtggtggacatcagcatccctggccgctacaacctgaccctcatctggaacagacacatgaccatcctgatccgcatcgcccgggccagccaggaccccctgtgtggcctgtgtggcaacttcaacggcaacatgaaggatgactttgagaccaggagccgctacgtggccagcagcgagctggagctggtgaacagctggaaggagagccccctgtgtggagatgtgtcctttgtgacagacccctgcagcctgaatgccttcagaagatcctgggccgagaggaagtgcagcgtcatcaacagccagacctttgccacctgccacagcaaggtgtaccacctgccctactatgaggcctgtgtgagagatgcctgtggctgtgacagcggcggggactgtgaatgtctgtgtgatgctgtggccgcctatgcccaggcctgcctggacaagggcgtgtgtgtggactggaggaccccagccttctgccccatctactgcggcttctacaacacccacacccaggacggccacggggagtaccagtacacccaggaggccaactgcacctggcactaccagccctgcctgtgccccagccagccccagagcgtgcccggcagcaacatcgagggctgctacaactgcagccaggatgagtactttgaccacgaggagggcgtgtgtgtgccctgcatgccacccaccaccccccagccccccaccaccccccagctgcccaccaccggcagccggcccacccaggtgtggcccatgacaggcaccagcaccaccatcggcctgctgagcagcacaggccccagccccagcagcaaccacaccccagccagccccacccagacccccctgctgcctgccaccctgaccagcagcaagcccacagccagcagcggggagcccccccggcccaccacagctgtgaccccccaggccaccagcggcctgcccccaacagccaccctgcggagcacagccaccaagcccaccgtgacccaggccaccacccgggccacagccagcacagccagccctgccaccaccagcacagcccagagcaccaccaggaccaccatgaccctgcccaccccagccaccagcggcaccagccccaccctgcccaagagcaccaaccaggagctgcccggcaccacagccacccagaccaccggcccccggcccaccccagccagcaccaccggccccaccaccccccagcccggccagcccacccggcccacagccacagagaccacccagaccaggaccaccacagagtacaccaccccccagaccccccacaccacccacagccccccaacagctggcagccctgtgcccagcactggacctgtgacagccaccagcttccacgccaccaccacctaccccacccccagccaccctgagaccaccctgcccacccacgtgccccccttcagcaccagcctggtgacccccagcacccacacagtcatcacccccacccacgcccagatggccaccagcgccagcaaccacagcgcccccaccggcaccatccccccacccaccaccctgaaggccaccggcagcacccacacagccccacccatcacccccaccaccagcggcaccagccaggcccacagcagcttcagcaccaacaagacccccaccagcctgcacagccacaccagcagcacccaccaccctgaggtgacccccaccagcaccaccaccatcacccccaaccccaccagcaccaggaccaggacccctgtggcccacaccaacagcgccaccagcagcaggcctcctccacccttcaccacccacagcccccccaccggcagcagccccttcagcagcacaggccccatgacagccaccagcttcaagaccaccaccacctaccccacccccagccacccccagaccaccctgcccacccacgtgccccccttcagcaccagcctggtgacccccagcacccacacagtcatcacccccacccacgcccagatggccaccagcgccagcatccacagcatgcccaccggcaccatccccccacccaccaccctgaaggccaccggcagcacccacacagcccccaccatgaccctgaccaccagcggcaccagccaggccctgagcagcctgaacacagccaagaccagcaccagcctgcacagccacaccagcagcacccaccacgccgaggccaccagcaccagcaccaccaacatcacccccaaccccaccagcacaggcaccccacccatgacagtgaccaccagcggcaccagccagagccgcagcagcttcagcacagccaagaccagcaccagcctgcacagccacaccagcagcacccaccaccctgaggtgaccagcaccagcaccaccagcatcacccccaaccacaccagcacaggcaccaggacccctgtggcccacaccaccagcgccaccagcagccggctgcccacccccttcaccacccacagcccccccaccggcaccacccccatcagcagcacaggccctgtgacagccaccagcttccagaccaccaccacctaccccacccccagccacccccacaccaccctgcccacccacgtgcccagcttcagcaccagcctggtgacccccagcacccacacagtcatcatccccacccacacccagatggccaccagcgccagcatccacagcatgcccaccggcaccatccccccacccaccaccatcaaggccaccggcagcacccacacagccccacccatgacccccaccaccagcggcaccagccagagccccagcagcttcagcacagccaagaccagcaccagcctgccctaccacaccagcagcacccaccaccctgaggtgacccccaccagcaccaccaacatcacccccaagcacaccagcacaggcaccaggacccctgtggcccacaccaccagcgccagcagcagccggctgcccacccccttcaccacccacagccccccaacaggcagcagccccttcagcagcacaggccccatgacagccaccagcttccagaccaccaccacctaccccacccccagccacccccagaccaccctgcccacccacgtgccccccttcagcaccagcctggtgacccccagcacccacacagtcatcatcaccacccacacccagatggccaccagcgccagcatccacagcacccccactggaacagtgcccccacccaccaccctgaaggccaccggcagcacccacacagccccacccatgacagtgaccaccagcggcaccagccagacccacagcagcttcagcacagccacagccagcagcagcttcatcagcagcagctcctggctgccccagaacagcagcagccggccccccagcagccccatcaccacccagctgccccacctgagcagcgccaccacccctgtgtccaccaccaaccagctgagcagcagcttcagccccagccccagcgcccccagcacagtgtcctcctatgtgcccagcagccacagcagcccccagaccagcagccccagcgtgggcaccagcagcagctttgtgtctgcccctgtgcacagcaccaccctgagcagcggcagccacagcagcctgagcacccaccccaccacagcctctgtgtctgccagccccctcttccccagcagccctgctgccagcaccaccatccgggccaccctgccccacaccatcagcagccccttcaccctgagcgccctgctgcccatcagcacagtgacagtgagccccacccccagcagccacctggccagcagcaccatcgccttccccagcacccccaggaccacagccagcacccacacagccccagccttcagcagccagagcaccaccagccgcagcaccagcctgaccaccagggtgcccaccagcggctttgtgtccctgaccagcggcgtgacaggcatccccaccagccctgtgaccaacctgaccaccaggcaccctggccccaccctgagccccaccacccgcttcctgaccagcagcctgacagcccacggcagcaccccagccagcgcccctgtgagcagcctgggcacccccacccccaccagccctggggtgtgcagcgtgcgggagcagcaggaggagatcaccttcaagggctgcatggccaacgtgacagtgacccgctgtgagggcgcctgcatctctgctgccagcttcaacatcatcacccagcaggtggatgcccgctgcagctgctgccggcccctgcacagctatgagcagcagctggagctgccctgcccagaccccagcaccccaggccggcggctggtgctgaccctgcaggtgttcagccactgtgtgtgcagctctgtggcctgtggggactag

SEQ ID NO: 160343 - DNA, 1134 bp, synthetic construct
  misc_feature 1..1134: note = Description of Artificial Sequence: Synthetic coding sequence
  source 1..1134: mol_type = other DNA
atgaagaccctgcccctgtttgtgtgcatctgtgccctgagcgcctgcttctccttcagcgagggccgggagcgggaccacgagctgcggcaccggcggcaccaccaccagagccccaagagccactttgagctgccccactacccaggcctgctggcccaccagaagcccttcatcaggaagagctacaagtgcctgcacaagcgctgccggcccaagctgccccccagccccaacaacccccccaagttccccaacccccaccagccccccaagcacccagacaagaacagctctgtggtgaaccccaccctggtggccaccacccagatccccagcgtgaccttccccagcgccagcaccaagatcaccaccctgcccaacgtgaccttcctgccccagaatgccaccaccatcagcagcagagaaaatgtgaacaccagcagctctgtggccaccctggcccctgtgaacagccctgccccccaggacaccacagctgccccacccaccccatctgccaccaccccagccccacccagcagcagcgcccctcctgagaccacagctgccccacccacccccagcgccaccacccaggccccacccagcagcagcgcccctcctgagaccacagctgccccacccaccccaccagccaccaccccagccccacccagcagcagcgcccctcctgagaccacagctgccccacccacccccagcgccaccaccccagcccccctgagcagcagcgcccctcctgagaccacagctgtgccccccaccccatctgccaccaccctggaccccagcagcgccagcgcccctcctgagaccacagctgccccacccacccccagcgccaccaccccagccccacccagcagccctgccccccaggagaccacagctgcccccatcaccacccccaacagcagccccaccaccctggccccagacaccagcgagaccagcgctgcccccacccaccagaccaccacctctgtgaccacccagaccaccaccaccaagcagcccaccagcgcccctggccagaacaagatcagccgcttcctgctgtacatgaagaacctgctgaaccgcatcattgatgacatggtggagcagtag

SEQ ID NO: 160344 - DNA, 1134 bp, synthetic construct; identical to SEQ ID NO: 160343
  misc_feature 1..1134: note = Description of Artificial Sequence: Synthetic coding sequence
  source 1..1134: mol_type = other DNA

SEQ ID NO: 160345 - DNA, 1134 bp, synthetic construct; identical to SEQ ID NO: 160343
  misc_feature 1..1134: note = Description of Artificial Sequence: Synthetic coding sequence
  source 1..1134: mol_type = other DNA

SEQ ID NO: 160346 - DNA, 411 bp, synthetic construct
  misc_feature 1..411: note = Description of Artificial Sequence: Synthetic coding sequence
  source 1..411: mol_type = other DNA
atgaagaccctgcccctgtttgtgtgcatctgtgccctgagcgcctgcttctccttcagcgagggccgggagcgggaccacgagctgcggcaccggcggcaccaccaccagagccccaagagccactttgagctgccccactacccaggcctgctggcccaccagaagcccttcatcaggaagagctacaagtgcctgcacaagcgctgccggcccaagctgccccccagccccaacaacccccccaagttccccaacccccaccagccccccaagcacccagacaagaacagctctgtggtgaaccccaccctggtggccaccacccagatccccagcgtgaccttccccagcgccagcaccaagatcaccaccctgcccaacgtgaccttcctgccccagaatgcctag

SEQ ID NO: 160347 - DNA, 1743 bp, synthetic construct
  misc_feature 1..1743: note = Description of Artificial Sequence: Synthetic coding sequence
  source 1..1743: mol_type = other DNA
atgacagccccagctggcccccggggcagcgagacagagcggctgctgacccccaaccctggctacggcacccaggccggccccagccctgccccacccaccccacctgaggaggaggacctgcggcggcggctgaagtacttcttcatgagcccctgtgacaagttccgggccaagggcaggaagccctgcaagctgatgctgcaggtggtgaagatcctggtggtgacagtgcagctgatcctgtttggcctgagcaaccagctggccgtgaccttccgggaggagaacaccatcgccttccgccacctgttcctgctgggctacagtgatggagcagatgacacctttgctgcctacacccgggagcagctgtaccaggccatcttccacgctgtggaccagtacctggccctgcctgatgtgtccctgggccgctatgcctacgtgcggggcggcggggacccctggaccaatggaagtggcctggccctgtgccagcgctactaccaccggggccacgtggaccctgccaatgacacctttgacatcgaccccatggtggtgacagactgcatccaggtggaccccccagagaggcctcctcctccacccagtgatgacctgaccctgctggagagcagcagcagctacaagaacctgaccctgaagttccacaagctggtgaatgtgaccatccacttccggctgaagaccatcaacctgcagagcctcatcaacaatgagatcccagactgctacaccttctctgtgctgatcacctttgacaacaaggcccacagcggccgcatccccatcagcctggagacccaggcccacatccaggagtgcaagcaccccagcgtcttccagcacggggacaacagcttccggctgctgtttgatgtggtggtgatcctgacctgcagcctgtccttcctgctgtgtgcccggagcctgctgcggggcttcctgctgcagaatgaatttgtgggcttcatgtggaggcagaggggccgggtcatcagcctgtgggagcggctggagtttgtgaatggctggtacatcctgctggtgaccagtgatgtgctgaccatcagcggcaccatcatgaagattggaattgaggccaagaacctggccagctatgatgtgtgcagcatcctgctgggcaccagcaccctgctggtgtgggtgggcgtcatccgctacctgaccttcttccacaactacaacatcctgattgccaccctgcgggtggccctgcccagcgtgatgaggttctgctgctgcgtggccgtcatctacctgggctactgcttctgtggctggatcgtgctgggcccctaccacgtgaagttccgcagcctgtccatggtgtctgagtgcctcttcagcctcatcaatggagatgacatgtttgtgacctttgctgccatgcaggcccagcagggccgcagcagcctggtgtggctgttcagccagctgtacctgtacagcttcatcagcctcttcatctacatggtgctgagcctcttcatcgccctgatcaccggggcctatgacaccatcaagcaccctggaggagctggagctgaggagagcgagctgcaggcctacatcgcccagtgccaggacagccccaccagcggcaagttccggcggggcagcggcagcgcctgcagcctgctgtgctgctgcggccgggaccccagcgaggagcacagcctgctggtgaactag

SEQ ID NO: 160348 - DNA, 1638 bp, synthetic construct
  misc_feature 1..1638: note = Description of Artificial Sequence: Synthetic coding sequence
  source 1..1638: mol_type = other DNA
atgacccccagccagcccacccggggcagcagctgcacccggcccagctccatgctgtggaccagcacctggcgctgcctgacctgccactgggccggcatgaggatgtctgtggtgggcgtgaccctgggccccatggcccagggcctgctgagcgccagcggcaccaccacagaggccacctggacccggcccaccacccacctgaccctcatccgctggtggctgctgacagccagccgctggatcccccccagcggccccctgcggcccccagccaccatcagccccagctggaaggccgcccctgtgaccaggaccagccgcagcaacagcaccagcacagcctgcagcctggagggcggccctggctggggccggcagcacaccaggcacagccaccccagcaactacttccccaaggtgggcaccggccccccccggccccgctggtgcctgctgggggagcacttcccctgccagctgcagagccagcacgtggccggagatgctggcacctggggcaggaaaggaccagaagatgccccagacccccaccccagcctgctgccccggctggtgaatgtgaccatccacttccggctgaagaccatcaacctgcagagcctcatcaacaatgagatcccagactgctacaccttctctgtgctgatcacctttgacaacaaggcccacagcggccgcatccccatcagcctggagacccaggcccacatccaggagtgcaagcaccccagcgtcttccagcacggggacaacagcttccggctgctgtttgatgtggtggtgatcctgacctgcagcctgtccttcctgctgtgtgcccggagcctgctgcggggcttcctgctgcagaatgaatttgtgggcttcatgtggaggcagaggggccgggtcatcagcctgtgggagcggctggagtttgtgaatggctggtacatcctgctggtgaccagtgatgtgctgaccatcagcggcaccatcatgaagattggcatcgaggccaagaacctggccagctatgatgtgtgcagcatcctgctgggcaccagcaccctgctggtgtgggtgggcgtcatccgctacctgaccttcttccacaactacaacatcctgattgccaccctgcgggtggccctgcccagcgtgatgaggttctgctgctgcgtggccgtcatctacctgggctactgcttctgtggctggatcgtgctgggcccctaccacgtgaagttccgcagcctgtccatggtgtctgaatgtctcttcagcctcatcaatggagatgacatgtttgtgacctttgctgccatgcaggcccagcagggccgcagcagcctggtgtggctgttcagccagctgtacctgtacagcttcatcagcctcttcatctacatggtgctgagcctcttcatcgccctgatcactggagcctatgacaccatcaagcaccctgggggcgctggagctgaggagagcgagctgcaggcctacatcgcccagtgccaggacagccccaccagcggcaagttcagaagaggcagcggcagcgcctgcagcctgctgtgctgctgcggccgggaccccagcgaggagcacagcctgctggtgaactag

SEQ ID NO: 160349 - DNA, 1701 bp, synthetic construct
  misc_feature 1..1701: note = Description of Artificial Sequence: Synthetic coding sequence
  source 1..1701: mol_type = other DNA
atggcccggcagccctaccgcttcccccaggcccgcatccctgagcggggcagcggggtcttccggctgactgtgagaaatgccatggcccaccgggacagcgagatgaaggaggagtgcctgcgggaggacctgaagttctacttcatgagcccctgtgagaagtaccgggcccggcggcagatcccctggaagctgggcctgcagatcctgaagatcgtgatggtgaccacccagctggtgcgcttcggcctgagcaaccagctggtggtggccttcaaggaggacaacacagtggccttcaagcacctgttcctgaagggctacagcggcacagatgaagatgactacagctgcagcgtgtacacccaggaggatgcctatgagagcatcttctttgccatcaaccagtaccaccagctgaaggacatcaccctgggcaccctgggctatggagaaaatgaagacaacagaattggcctgaaggtgtgcaagcagcactacaagaagggcaccatgttccccagcaatgagaccctgaacatcgacaatgatgtggagctggactgtgtgcagctggacctgcaggacctgagcaagaagcccccagactggaagaacagcagcttcttccggctggagttctaccgcctgctgcaggtggagatctccttccacctgaagggcatcgacctgcagaccatccacagccgggagctgcctgactgctacgtgttccagaacaccatcatctttgacaacaaggcccacagcggcaagatcaagatctactttgacagtgatgccaagattgaggagtgcaaggacctgaacatcttcggcagcacccagaagaatgcccagtatgtgctggtgtttgatgccttcgtcatcgtcatctgcctggccagcctcatcctgtgcaccaggagcatcgtgctggccctgcggctgaggaagcgcttcctgaacttcttcctggagaagtacaagaggcctgtgtgtgacacagaccagtgggagttcatcaatggctggtacgtgctggtgatcatcagtgacctgatgaccatcatcggcagcatcctgaagatggagatcaaggccaagaacctgaccaactatgacctgtgcagcatcttcctgggcaccagcaccctgctggtgtgggtgggcgtcatccgctacctgggctacttccaggcctacaacgtgctgatcctgaccatgcaggccagcctgcccaaggtgctgcgcttctgtgcctgtgccggcatgatctacctgggctacaccttctgtggctggatcgtgctgggcccctaccatgacaagtttgagaacctgaacacagtggccgagtgcctcttcagcctggtgaatggagatgacatgtttgccacctttgcccagatccagcagaagagcatcctggtgtggctgttcagccggctgtacctgtacagcttcatcagcctcttcatctacatgatcctgagcctcttcatcgccctgatcacagacagctatgacaccatcaagaagttccagcagaatggcttccctgagacagacctgcaggagttcctgaaggagtgcagcagcaaggaggagtaccagaaggagagcagcgccttcctgagctgcatctgctgcagaagaaggaagagaagtgatgaccacctgatccccatctcctag

SEQ ID NO: 160350 - DNA, 1662 bp, synthetic construct
  misc_feature 1..1662: note = Description of Artificial Sequence: Synthetic coding sequence
  source 1..1662: mol_type = other DNA
atggctgaccctgaggtggtggtgagcagctgcagcagccatgaggaggagaaccgctgcaacttcaaccagcagaccagccccagcgaggagctgctgctggaggaccagatgaggaggaagctgaagttcttcttcatgaacccctgtgagaagttctgggcccggggcaggaagccctggaagctggccatccagatcctgaagatcgccatggtgaccatccagctggtgctgtttggcctgagcaaccagatggtggtggccttcaaggaggagaacaccatcgccttcaagcacctgttcctgaagggctacatggacaggatggatgacacctatgctgtgtacacccagagtgatgtgtatgaccagctgatctttgctgtgaaccagtacctgcagctgtacaacgtgtctgtgggcaaccacgcctatgaaaataaaggcaccaagcagagcgccatggccatctgccagcacttctacaagaggggcaacatctacccaggaaatgacacctttgatattgatcctgagattgaaacagagtgcttctttgtggagccagatgagcccttccacatcggcaccccagctgagaacaagctgaacctgaccctggacttccaccggctgctgactgtggagctgcagttcaagctgaaggccatcaacctgcagacagtgcgccaccaggagctgcctgactgctatgacttcaccctgaccatcacctttgacaacaaggcccacagcggccgcatcaagatcagcctggacaatgacatcagcatccgggagtgcaaggactggcacgtgtctggcagcatccagaagaacacccactacatgatgatctttgatgcctttgtgatcctgacctgcctggtgtccctcatcctgtgcatccgcagcgtcatccggggcctgcagctgcagcaggagtttgtgaacttcttcctgctgcactacaagaaggaggtgtctgtgtctgaccagatggagtttgtgaatggctggtacatcatgatcatcatcagtgacatcctgaccatcatcggcagcatcctgaagatggagatccaggccaagagcctgaccagctatgatgtgtgcagcatcctgctgggcaccagcaccatgctggtgtggctgggcgtcatccgctacctgggcttctttgccaagtacaacctgctgatcctgaccctgcaggccgccctgcccaacgtcatccgcttctgctgctgtgccgccatgatctacctgggctactgcttctgtggctggatcgtgctgggcccctaccatgacaagttccgcagcctgaacatggtgtctgaatgtctcttcagcctcatcaatggagatgacatgtttgccacctttgccaagatgcagcagaagagctacctggtgtggctgttcagccgcatctacctgtacagcttcatcagcctcttcatctacatgatcctgagcctcttcatcgccctgatcacagacacctatgagaccatcaagcagtaccagcaggacggcttccctgagacagagctgcggaccttcatcagcgagtgcaaggacctgcccaacagcggcaagtaccgcctggaggatgatcctcctgtgtccctcttctgctgctgcaagaagtag

SEQ ID NO: 160351 - DNA, 1494 bp, synthetic construct
  misc_feature 1..1494: note = Description of Artificial Sequence: Synthetic coding sequence
  source 1..1494: mol_type = other DNA
atggctgaccctgaggtggtggtgagcagctgcagcagccatgaggaggagaaccgctgcaacttcaaccagcagaccagccccagcgaggagctgctgctggaggaccagatgaggaggaagctgaagttcttcttcatgaacccctgtgagaagttctgggcccggggcaggaagccctggaagctggccatccagatcctgaagatcgccatggtgaccatccagtacctgcagctgtacaacgtgtctgtgggcaaccacgcctatgaaaataaaggcaccaagcagagcgccatggccatctgccagcacttctacaagaggggcaacatctacccaggaaatgacacctttgatattgatcctgagattgaaacagagtgcttctttgtggagccagatgagcccttccacatcggcaccccagctgagaacaagctgaacctgaccctggacttccaccggctgctgactgtggagctgcagttcaagctgaaggccatcaacctgcagacagtgcgccaccaggagctgcctgactgctatgacttcaccctgaccatcacctttgacaacaaggcccacagcggccgcatcaagatcagcctggacaatgacatcagcatccgggagtgcaaggactggcacgtgtctggcagcatccagaagaacacccactacatgatgatctttgatgcctttgtgatcctgacctgcctggtgtccctcatcctgtgcatccgcagcgtcatccggggcctgcagctgcagcaggagtttgtgaacttcttcctgctgcactacaagaaggaggtgtctgtgtctgaccagatggagtttgtgaatggctggtacatcatgatcatcatcagtgacatcctgaccatcatcggcagcatcctgaagatggagatccaggccaagagcctgaccagctatgatgtgtgcagcatcctgctgggcaccagcaccatgctggtgtggctgggcgtcatccgctacctgggcttctttgccaagtacaacctgctgatcctgaccctgcaggccgccctgcccaacgtcatccgcttctgctgctgtgccgccatgatctacctgggctactgcttctgtggctggatcgtgctgggcccctaccatgacaagttccgcagcctgaacatggtgtctgaatgtctcttcagcctcatcaatggagatgacatgtttgccacctttgccaagatgcagcagaagagctacctggtgtggctgttcagccgcatctacctgtacagcttcatcagcctcttcatctacatgatcctgagcctcttcatcgccctgatcacagacacctatgagaccatcaagcagtaccagcaggacggcttccctgagacagagctgcggaccttcatcagcgagtgcaaggacctgcccaacagcggcaagtaccgcctggaggatgatcctcctgtgtccctcttctgctgctgcaagaagtag

SEQ ID NO: 160352 - DNA, 966 bp, synthetic construct
  misc_feature 1..966: note = Description of Artificial Sequence: Synthetic coding sequence
  source 1..966: mol_type = other DNA
atggctgaccctgaggtggtggtgagcagctgcagcagccatgaggaggagaaccgctgcaacttcaaccagcagaccagccccagcgaggagctgctgctggaggaccagatgaggaggaagctgaagttcttcttcatgaacccctgtgagaagttctgggcccggggcaggaagccctggaagctggccatccagatcctgaagatcgccatggtgaccatccagctggtgctgtttggcctgagcaaccagatggtggtggccttcaaggaggagaacaccatcgccttcaagcacctgttcctgaagggctacatggacaggatggatgacacctatgctgtgtacacccagagtgatgtgtatgaccagctgatctttgctgtgaaccagtacctgcagctgtacaacgtgtctgtgggcaaccacgcctatgaaaataaaggcaccaagcagagcgccatggccatctgccagcacttctacaagaggggcaacatctacccaggaaatgacacctttgatattgatcctgagattgaaacagagtgcttctttgtggagccagatgagcccttccacatcggcaccccagctgagaacaagctgaacctgaccctggacttccaccggctgctgactgtggagctgcagttcaagctgaaggccatcaacctgcagacagtgcgccaccaggagctgcctgactgctatgacttcaccctgaccatcacctttgacaacaaggcccacagcggccgcatcaagatcagcctggacaatgacatcagcatccgggagtgcaaggactggcacgtgtctggcagcatccagaagaacacccactacatgatgatctttgatgcctttgtgatcctgacctgcctggtgtccctcatcctgtgcatccgcagcgtcatccggggcctgcagctgcagcaggtgggcaatgtggccttctag

SEQ ID NO: 160353 - DNA, 1494 bp, synthetic construct; identical to SEQ ID NO: 160351
  misc_feature 1..1494: note = Description of Artificial Sequence: Synthetic coding sequence
  source 1..1494: mol_type = other DNA

SEQ ID NO: 160354 - DNA, 1662 bp, synthetic construct; identical to SEQ ID NO: 160350
  misc_feature 1..1662: note = Description of Artificial Sequence: Synthetic coding sequence
  source 1..1662: mol_type = other DNA

SEQ ID NO: 160355 - DNA, 2442 bp, synthetic construct
  misc_feature 1..2442: note = Description of Artificial Sequence: Synthetic coding sequence
  source 1..2442: mol_type = other DNA
atgagcctgctgggggaccccctgcaggccctgccccccagcgctgcccccaccggccccctgctggcccccccagctggggccaccctgaaccggctgcgggagcccctgctgcggcggctgtctgagctgctggaccaggcccctgagggccggggctggaggcggctggccgagctggccggcagccggggccgcctgcggctgagctgcctggacctggagcagtgcagcctgaaggtgctggagcctgagggcagccccagcctgtgcctgctgaagctgatgggagagaagggctgcaccgtgacagagctgagtgacttcctgcaggccatggagcacacagaggtgctgcagctgctgagccccccaggcatcaagatcaccgtgaaccctgagagcaaggctgtgctggccggccagtttgtgaagctgtgctgccgggccaccggccacccctttgtgcagtaccagtggttcaagatgaacaaggagatccccaatggaaacaccagcgagctgatcttcaatgctgtgcacgtgaaggatgctggcttctacgtgtgccgggtgaacaacaacttcacctttgagttcagccagtggagccagctggatgtgtgtgacatccctgagagcttccagaggtctgtggatggagtgtctgagagcaagctgcagatctgtgtggagcccaccagccagaagctgatgcctggcagcaccctggtgctgcagtgtgtggccgtgggcagccccatcccccactaccagtggttcaagaatgagctgcccctgacccatgagaccaagaagctgtacatggtgccctacgtggacctggagcaccagggcacctactggtgccacgtgtacaatgaccgggacagccaggacagcaagaaggtggagatcatcattgatgagctgaacaacctgggccacccagacaacaaggagcagaccacagaccagcccctggccaaggacaaggtggccctgctgattggcaacatgaactaccgggagcaccccaagctgaaggcccccctggtggatgtgtatgagctgaccaacctgctgcggcagctggacttcaaggtggtgtccctgctggacctgacagaatatgagatgagaaatgctgtggatgagttcctgctgctgctggacaagggcgtgtatggcctgctgtactatgccggccacggctatgaaaattttggaaacagcttcatggtgcctgtggatgcccccaacccctacagaagtgagaactgcctgtgtgtgcagaacatcctgaagctgatgcaggagaaggagaccggcctgaatgtgttcctgctggacatgtgcaggaagagaaatgactatgatgacaccatccccatcctggatgccctgaaggtgacagccaacatcgtgtttggctacgccacctgccagggcgctgaggcctttgagatccagcacagcggcctggccaacggcatcttcatgaagttcctgaaggaccggctgctggaggacaagaagatcaccgtgctgctggatgaggtggccgaggacatgggcaagtgccacctgaccaagggcaagcaggccctggagatccgcagcagcctgtctgagaagagggccctgacagaccccatccagggcacagagtacagcgctgagagcctggtgaggaacctgcagtgggccaaggcccacgagctgcctgagagcatgtgcctgaagtttgactgtggggtgcagatccagctgggctttgctgctgagttcagcaatgtgatgatcatctacaccagcatcgtgtacaagcccccagagatcatcatgtgtgatgcctacgtgacagacttccccctggacctggacatcgaccccaaggatgccaacaagggcaccccagaggagaccggcagctacctggtgtccaaggacctgcccaagcactgcctgtacacccggctgagcagcctgcagaagctgaaggagcacctggtgttcaccgtgtgcctgagctaccagtacagcggcctggaggacacagtggaggacaagcaggaggtgaatgtgggcaagcccctgattgccaagctggacatgcaccggggcctgggcaggaagacctgcttccagacctgcctgatgagcaatggcccctaccagagcagcgctgccaccagcggcggggccggccactaccacagcctgcaggaccccttccatggagtgtaccacagccaccctggcaaccccagcaatgtgaccccagctgacagctgccactgcagcaggaccccagatgccttcatcagcagctttgcccaccacgccagctgccacttcagccgcagcaatgtgcctgtggagaccacagatgagatccccttctccttcagtgaccggctgcgcatcagcgagaagtag

SEQ ID NO: 160356 - DNA, 2475 bp, synthetic construct
  misc_feature 1..2475: note = Description of Artificial Sequence: Synthetic coding sequence
  source 1..2475: mol_type = other DNA
atgagcctgctgggggaccccctgcaggccctgccccccagcgctgcccccaccggccccctgctggcccccccagctggggccaccctgaaccggctgcgggagcccctgctgcggcggctgtctgagctgctggaccaggcccctgagggccggggctggaggcggctggccgagctggccggcagccggggccgcctgcggctgagctgcctggacctggagcagtgcagcctgaaggtgctggagcctgagggcagccccagcctgtgcctgctgaagctgatgggagagaagggctgcaccgtgacagagctgagtgacttcctgcaggccatggagcacacagaggtgctgcagctgctgagccccccaggcatcaagatcaccgtgaaccctgagagcaaggctgtgctggccggccagtttgtgaagctgtgctgccgggccaccggccacccctttgtgcagtaccagtggttcaagatgaacaaggagatccccaatggaaacaccagcgagctgatcttcaatgctgtgcacgtgaaggatgctggcttctacgtgtgccgggtgaacaacaacttcacctttgagttcagccagtggagccagctggatgtgtgtgacatccctgagagcttccagaggtctgtggatggagtgtctgagagcaagctgcagatctgtgtggagcccaccagccagaagctgatgcctggcagcaccctggtgctgcagtgtgtggccgtgggcagccccatcccccactaccagtggttcaagaatgagctgcccctgacccatgagaccaagaagctgtacatggtgccctacgtggacctggagcaccagggcacctactggtgccacgtgtacaatgaccgggacagccaggacagcaagaaggtggagatcatcatcggccgcacagatgaggccgtggagtgcacagaagatgagctgaacaacctgggccacccagacaacaaggagcagaccacagaccagcccctggccaaggacaaggtggccctgctgattggcaacatgaactaccgggagcaccccaagctgaaggcccccctggtggatgtgtatgagctgaccaacctgctgcggcagctggacttcaaggtggtgtccctgctggacctgacagaatatgagatgagaaatgctgtggatgagttcctgctgctgctggacaagggcgtgtatggcctgctgtactatgccggccacggctatgagaactttggaaacagcttcatggtgcctgtggatgcccccaacccctacagaagtgagaactgcctgtgtgtgcagaacatcctgaagctgatgcaggagaaggagaccggcctgaatgtgttcctgctggacatgtgcaggaagagaaatgactatgatgacaccatccccatcctggatgccctgaaggtgacagccaacatcgtgtttggctacgccacctgccagggcgctgaggcctttgagatccagcacagcggcctggccaacggcatcttcatgaagttcctgaaggaccggctgctggaggacaagaagatcaccgtgctgctggatgaggtggccgaggacatgggcaagtgccacctgaccaagggcaagcaggccctggagatccgcagcagcctgtctgagaagagggccctgacagaccccatccagggcacagagtacagcgctgagagcctggtgaggaacctgcagtgggccaaggcccacgagctgcctgagagcatgtgcctgaagtttgactgtggggtgcagatccagctgggctttgctgctgagttcagcaatgtgatgatcatctacaccagcatcgtgtacaagcccccagagatcatcatgtgtgatgcctacgtgacagacttccccctggacctggacatcgaccccaaggatgccaacaagggcaccccagaggagaccggcagctacctggtgtccaaggacctgcccaagcactgcctgtacacccggctgagcagcctgcagaagctgaaggagcacctggtgttcaccgtgtgcctgagctaccagtacagcggcctggaggacacagtggaggacaagcaggaggtgaatgtgggcaagcccctcatcgccaagctggacatgcaccggggcctgggcaggaagacctgcttccagacctgcctgatgagcaatggcccctaccagagcagcgctgccaccagcggcggggccggccactaccacagcctgcaggaccccttccacggcgtgtaccacagccaccctggcaaccccagcaatgtgaccccagctgacagctgccactgcagcaggaccccagatgccttcatcagcagctttgcccaccacgccagctgccacttcagccgcagcaatgtgcctgtggagaccacagatgagatccccttctccttcagtgaccggctgcgcatcagcgagaagtag

SEQ ID NO: 160357 - DNA, 441 bp, synthetic construct
  misc_feature 1..441: note = Description of Artificial Sequence: Synthetic coding sequence
  source 1..441: mol_type = other DNA
atgaccatgaggagcctgctgcggacccccttcctgtgtggcctgctgtgggccttctgtgcccctggggcccgggcagaggagcctgctgccagcttcagccagcccggctccatgggcctggacaagaacacagtgcatgaccaggagcacatcatggagcacctggagggcgtcatcaacaagccagaggccgagatgagcccccaggagctgcagctgcactacttcaagatgcatgactatgatggcaacaacctgctggatggcctggagctgagcacagccatcacccacgtgcacaaggaggagggcagcgagcaggcccccctgatgtctgaagatgagctgatcaacatcattgatggagtgctgagagatgatgacaagaacaatgatggctacatcgactatgcagagtttgccaagagcctgcagtag

SEQ ID NO: 160358 - DNA, 441 bp, synthetic construct; identical to SEQ ID NO: 160357
  misc_feature 1..441: note = Description of Artificial Sequence: Synthetic coding sequence
  source 1..441: mol_type = other DNA

SEQ ID NO: 160359 - DNA, 285 bp, synthetic construct
  misc_feature 1..285: note = Description of Artificial Sequence: Synthetic coding sequence
  source 1..285: mol_type = other DNA
atggagcacctggagggcgtcatcaacaagccagaggccgagatgagcccccaggagctgcagctgcactacttcaagatgcatgactatgatggcaacaacctgctggatggcctggagctgagcacagccatcacccacgtgcacaaggaggagggcagcgagcaggcccccctgatgtctgaagatgagctgatcaacatcattgatggagtgctgagagatgatgacaagaacaatgatggctacatcgactatgcagagtttgccaagagcctgcagtag

SEQ ID NO: 160360 - DNA, 441 bp, synthetic construct; identical to SEQ ID NO: 160357
  misc_feature 1..441: note = Description of Artificial Sequence: Synthetic coding sequence
  source 1..441: mol_type = other DNA

SEQ ID NO: 160361 - DNA, 441 bp, synthetic construct; identical to SEQ ID NO: 160357
  misc_feature 1..441: note = Description of Artificial Sequence: Synthetic coding sequence
  source 1..441: mol_type = other DNA

SEQ ID NO: 160362 - DNA, 285 bp, synthetic construct; identical to SEQ ID NO: 160359
  misc_feature 1..285: note = Description of Artificial Sequence: Synthetic coding sequence
  source 1..285: mol_type = other DNA

SEQ ID NO: 160363 - DNA, 285 bp, synthetic construct; identical to SEQ ID NO: 160359
  misc_feature 1..285: note = Description of Artificial Sequence: Synthetic coding sequence
  source 1..285: mol_type = other DNA

SEQ ID NO: 160364 - DNA, 441 bp, synthetic construct; identical to SEQ ID NO: 160357
  misc_feature 1..441: note = Description of Artificial Sequence: Synthetic coding sequence
  source 1..441: mol_type = other DNA

SEQ ID NO: 160365 - DNA, 441 bp, synthetic construct; identical to SEQ ID NO: 160357
  misc_feature 1..441: note = Description of Artificial Sequence: Synthetic coding sequence
  source 1..441: mol_type = other DNA

SEQ ID NO: 160366 - DNA, 186 bp, synthetic construct
  misc_feature 1..186: note = Description of Artificial Sequence: Synthetic coding sequence
  source 1..186: mol_type = other DNA
atgaccatgaggagcctgctgcggacccccttcctgtgtggcctgctgtgggccttctgtgcccctggggcccgggcagaggagcctgctgccagcttcagccagcccggctccatgggcctggacaagaacacagtgcatgaccaggagcacatcatggagcacctggagggcgtcatcaactag

SEQ ID NO: 160367 - DNA, 384 bp, synthetic construct
  misc_feature 1..384: note = Description of Artificial Sequence: Synthetic coding sequence
  source 1..384: mol_type = other DNA
atgctgtctgtgtgcagctgcaggaccagcagcggcatgaggagccagtggcccagcgcccggcagaggagcagcagcctgagcaccttccgccacatcatggagcacctggagggcgtcatcaacaagccagaggccgagatgagcccccaggagctgcagctgcactacttcaagatgcatgactatgatggcaacaacctgctggatggcctggagctgagcacagccatcacccacgtgcacaaggaggagggcagcgagcaggcccccctgatgtctgaagatgagctgatcaacatcattgatggagtgctgagagatgatgacaagaacaatgatggctacattgattatgcagagtttgccaagagcctgcagtag

SEQ ID NO: 160368 - DNA, 3423 bp, synthetic construct
  misc_feature 1..3423: note = Description of Artificial Sequence: Synthetic coding sequence
  source 1..3423: mol_type = other DNA
atggtgatcagcctgaacagctgcctgtccttcatctgcctgctgctgtgccactggattggaacagccagccccctgaacctggaggaccccaacgtgtgcagccactgggagagctacagcgtgacagtgcaggagagctacccccacccctttgaccagatctactacaccagctgcacagacatcctgaactggttcaagtgcaccaggcaccgggtgtcctacagaacagcctaccgccacggggagaagaccatgtacagaaggaagagccagtgctgccccggcttctatgaaagtggagagatgtgtgtgccccactgtgccgacaagtgtgtgcacggccgctgcatcgcccccaacacctgccagtgtgagcccggctggggcggcaccaactgcagcagcgcctgtgatggagaccactggggcccccactgcaccagccgctgccagtgcaagaatggagccctgtgcaaccccatcaccggggcctgccactgtgccgccggcttccggggctggaggtgtgaagatcgctgtgagcagggcacctatggaaatgactgccaccagcgctgccagtgccagaatggagccacctgtgaccacgtgactggagaatgtcgctgccccccaggctacacaggagccttctgtgaggacctgtgccccccaggcaagcacggcccccagtgtgagcagcgctgcccctgccagaatggaggagtgtgccaccacgtgactggagagtgcagctgccccagcggctggatgggcaccgtgtgtggccagccctgcccagagggccgctttgggaagaactgcagccaggagtgccagtgccacaatggaggcacctgtgatgctgccaccggccagtgccactgcagccctggctacacaggagagcgctgccaggatgagtgccctgtgggcacctacggcgtgctgtgtgccgagacctgccagtgtgtgaatggaggcaagtgctaccacgtgtctggggcctgcctgtgtgaggccggctttgctggggagcgctgtgaggcccggctgtgcccagagggcctgtatggcatcaagtgtgacaagcgctgcccctgccacctggagaacacccacagctgccaccccatgtctggagaatgtgcctgcaagccaggctggagcggcctgtactgcaatgagacctgcagccctggcttctatggagaggcctgccagcagatctgcagctgccagaatggagctgactgtgacagcgtgacaggcaagtgcacctgtgcccctggcttcaagggcatcgactgcagcaccccctgccccctgggcacctacggcatcaactgcagcagccgctgtggctgcaagaatgatgctgtgtgcagccctgtggatggcagctgcacctgcaaggccggctggcacggcgtggactgcagcatccgctgccccagcggcacctggggcttcggctgcaacctgacctgccagtgcctgaatggaggagcctgcaacaccctggatggcacctgcacctgtgcccctggctggagaggagagaagtgtgagctgccctgccaggacggcacctacggcctgaactgtgccgagcgctgtgactgcagccatgctgatggctgccaccccaccaccggccactgccgctgcctgcccggctggagcggcgtgcactgtgacagcgtgtgtgccgagggccgctggggccccaactgcagcctgccctgctactgcaagaatggagccagctgcagcccagatgatggcatctgtgaatgtgcccctggcttccggggcaccacctgccagaggatctgcagccctggcttctacggccaccgctgcagccagacctgcccccagtgtgtgcacagcagcggcccctgccaccacatcaccggcctgtgtgactgcctgcccggcttcaccggggccctgtgcaatgaggtgtgccccagcggccgctttgggaagaactgtgccggcatctgcacctgcaccaacaacggcacctgcaaccccatcgacaggagctgccagtgctacccaggctggattggaagtgactgcagccagccctgccccccagcccactggggccccaactgcatccacacctgcaactgccacaacggggccttctgcagcgcctatgatggagagtgcaagtgcaccccaggctggacaggcctgtactgcacccagcgctgccccctgggcttctacggcaaggactgtgccctgatctgccagtgccagaatggagctgactgtgaccacatcagcggccagtgcacctgcaggacaggcttcatgggccgccactgtgagcagaagtgccccagcggcacctacggctacggctgccggcagatctgtgactgcctgaacaacagcacctgtgaccacatcaccggcacctgctactgcagccctggctggaagggggcccgctgtgaccaggccggggtcatcatcgtgggcaacctgaacagcctgagcaggaccagcacagccctgcctgctgacagctaccagatcggggccatcgccggcatcatcatcctggtgctggtggtgctcttcctgctggccctcttcatcatctaccgccacaagcagaagggcaaggagagctccatgcctgctgtgacctacaccccagccatgagggtggtgaatgctgactacaccatcagcggcaccctgccccacagcaatggaggaaatgccaacagccactacttcaccaaccccagctaccacaccctgacccagtgtgccaccagcccccacgtgaacaacagagacaggatgacagtgaccaagagcaagaacaaccagctgtttgtgaacctgaagaatgtgaaccctgggaagaggggccctgtgggggactgcaccggcaccctgcctgctgactggaagcacggcggctacctgaatgagctgggcgccttcggcctggacaggagctacatgggcaagagcctgaaggacctgggcaagaacagcgagtacaacagcagcaactgcagcctgagcagcagcgagaacccctatgccaccatcaaggacccccctgtgctgatccccaagagcagtgaatgtggctacgtggagatgaagagccctgcccggcgggacagcccctatgcagagatcaacaacagcaccagcgccaacagaaatgtgtatgaggtggagcccaccgtgtctgtggtgcagggcgtcttcagcaacaacggccgcctgagccaggacccctatgacctgcccaagaacagccacatcccctgccactatgacctgctgcctgtgcgggacagcagcagcagccccaagcaggaggacagcggcggcagcagcagcaacagcagcagcagcagcgagtag

SEQ ID NO: 160369 - DNA, 1704 bp, synthetic construct
  misc_feature 1..1704: note = Description of Artificial Sequence: Synthetic coding sequence
  source 1..1704: mol_type = other DNA
atggtgatcagcctgaacagctgcctgtccttcatctgcctgctgctgtgccactggattggaacagccagccccctgaacctggaggaccccaacgtgtgcagccactgggagagctacagcgtgacagtgcaggagagctacccccacccctttgaccagatctactacaccagctgcacagacatcctgaactggttcaagtgcaccaggcaccgggtgtcctacagaacagcctaccgccacggggagaagaccatgtacagaaggaagagccagtgctgccccggcttctatgaaagtggagagatgtgtgtgccccactgtgccgacaagtgtgtgcacggccgctgcatcgcccccaacacctgccagtgtgagcccggctggggcggcaccaactgcagcagcgcctgtgatggagaccactggggcccccactgcaccagccgctgccagtgcaagaatggagccctgtgcaaccccatcaccggggcctgccactgtgccgccggcttccggggctggaggtgtgaagatcgctgtgagcagggcacctatggaaatgactgccaccagcgctgccagtgccagaatggagccacctgtgaccacgtgactggagaatgtcgctgccccccaggctacacaggagccttctgtgaggacctgtgccccccaggcaagcacggcccccagtgtgagcagcgctgcccctgccagaatggaggagtgtgccaccacgtgactggagagtgcagctgccccagcggctggatgggcaccgtgtgtggccagccctgcccagagggccgctttgggaagaactgcagccaggagtgccagtgccacaatggaggcacctgtgatgctgccaccggccagtgccactgcagccctggctacacaggagagcgctgccaggatgagtgccctgtgggcacctacggcgtgctgtgtgccgagacctgccagtgtgtgaatggaggcaagtgctaccacgtgtctggggcctgcctgtgtgaggccggctttgctggggagcgctgtgaggcccggctgtgcccagagggcctgtatggcatcaagtgtgacaagcgctgcccctgccacctggagaacacccacagctgccaccccatgtctggagaatgtgcctgcaagccaggctggagcggcctgtactgcaatgagacctgcagccctggcttctatggagaggcctgccagcagatctgcagctgccagaatggagctgactgtgacagcgtgacaggcaagtgcacctgtgcccctggcttcaagggcatcgactgcagcaccccctgccccctgggcacctacggcatcaactgcagcagccgctgtggctgcaagaatgatgctgtgtgcagccctgtggatggcagctgcacctgcaaggccggctggcacggcgtggactgcagcatccgctgccccagcggcacctggggcttcggctgcaacctgacctgccagtgcctgaatggaggagcctgcaacaccctggatggcacctgcacctgtgcccctggctggagaggagagaagtgtgagctgccctgccaggacggcacctacggcctgaactgtgccgagcgctgtgactgcagccatgctgatggctgccaccccaccaccggccactgccgctgcctgcccggctggagcggcctcttctag

SEQ ID NO: 160370 - DNA, 3423 bp, synthetic construct; identical to SEQ ID NO: 160368
  misc_feature 1..3423: note = Description of Artificial Sequence: Synthetic coding sequence
  source 1..3423: mol_type = other DNA

SEQ ID NO: 160371 - DNA, 2910 bp, synthetic construct
  misc_feature 1..2910: note = Description of Artificial Sequence: Synthetic coding sequence
  source 1..2910: mol_type = other DNA
atgcacacccccagcatccgcagcatcacccatgatgcccagaccagcagcacaggcagcagcgcccctggaacagccctgtgcacagaagaatgtgtgcacggccgctgtgtgtccccagacacctgccactgtgagcccggctggggcggccctgactgcagcagcggctgtgacagcgaccactggggcccccactgcagcaaccgctgccagtgccagaatggagccctgtgcaaccccatcactggagcctgtgtgtgtgccgccggcttccggggctggaggtgtgaggagctgtgtgcccctggcacccacggcaagggctgccagctgccctgccagtgccgccacggggccagctgtgacccccgggccggggagtgcctgtgtgcccctggctacacaggagtgtactgtgaggagctgtgccccccaggcagccatggagcccactgtgagctgcgctgcccctgccagaatggaggcacctgccaccacatcactggagaatgtgcctgccccccaggctggacaggagctgtgtgtgcccagccctgccccccaggcaccttcggccagaactgcagccaggactgcccctgccaccacggcggccagtgtgaccacgtgacaggccagtgccactgcacagctggctacatgggagaccgctgccaggaggagtgccccttcggcagctttggcttccagtgcagccagcactgtgactgccacaatggaggccagtgcagccccaccactggagcctgtgaatgtgagcccggctacaagggcccccgctgccaggagcggctgtgcccagagggcctgcacggccctggctgcaccctgccctgcccctgtgatgctgacaacaccatcagctgccaccctgtgactggagcctgcacctgccagcccggctggagcggccaccactgcaatgaaagctgccctgtgggctactatggagatggctgccagctgccctgcacctgccagaatggagctgactgccacagcatcaccggcggctgcacctgtgcccctggcttcatgggagaggtgtgtgctgtgtcctgtgccgccggcacctacggccccaactgcagcagcatctgcagctgcaacaatggaggcacctgcagccctgtggatggcagctgcacctgcaaggagggctggcagggcctggactgcaccctgccctgccccagcggcacctggggcctgaactgcaatgaaagctgcacctgtgccaacggggccgcctgcagccccattgatggcagctgcagctgcaccccaggctggctgggggacacctgtgagctgccctgcccagatggcaccttcggcctgaactgcagcgagcactgtgactgcagccatgctgatggctgtgaccctgtgacaggccactgctgctgcctggccggctggacaggcatccgctgtgacagcacctgccccccaggccgctggggccccaactgcagcgtgtcctgcagctgtgaaaatggaggcagctgcagcccagaagatggcagctgtgaatgtgcccctggcttccggggccccctgtgccagaggatctgccccccaggcttctacggccacggctgtgcccagccctgccccctgtgtgtgcacagcagccggccctgccaccacatcagcggcatctgtgaatgtctgcccggcttcagcggggccctgtgcaaccaggtgtgtgccggcggctacttcggccaggactgtgcccagctgtgcagctgtgccaacaacggcacctgcagccccattgatggcagctgccagtgcttccctggctggattggcaaggactgcagccaggcctgccccccaggcttctggggccctgcctgcttccacgcctgcagctgccacaatggagccagctgcagcgcagaagatggagcctgccactgcaccccaggctggacaggcctcttctgcacccagcgctgcccagctgccttcttcggcaaggactgtggccgggtgtgccagtgccagaatggagccagctgtgaccacatcagcggcaagtgcacctgcaggacaggcttcaccggccagcactgtgagcagagatgtgcccctggcaccttcggctacggctgccagcagctgtgtgagtgcatgaacaacagcacctgtgaccacgtgacaggcacctgctactgcagccctggcttcaagggcatccgctgtgaccaggccgccctgatgatggaggagctgaacccctacaccaagatcagccctgccctgggcgctgagcggcacagcgtgggcgctgtgacaggcatcatgctgctgctcttcctgattgtggtgctgctgggcctgtttgcctggcacagaagacggcagaaggagaagggccgggacctggccccccgggtgtcctacaccccagccatgaggatgaccagcacagactacagcctgagcggggcctgtggcatggaccggcggcagaacacctacatcatggacaagggcttcaaggactacatgaaggagagcgtgtgcagcagcagcacctgcagcctgaacagcagcgagaacccctatgccaccatcaaggacccccccatcctgacctgcaagctgcctgagagcagctatgtggagatgaagagccctgtgcacatgggcagcccctacacagatgtgcccagcctgagcaccagcaacaagaacatctatgaggtggagcccaccgtgtctgtggtgcaggagggctgcggccacaacagcagctacatccagaatgcctatgacctgcccaggaacagccacatccctggccactatgacctgctgcctgtgcggcagagccctgccaacggccccagccaggacaagcagagctag

SEQ ID NO: 160372 - DNA, 2628 bp, synthetic construct
  misc_feature 1..2628: note = Description of Artificial Sequence: Synthetic coding sequence
  source 1..2628: mol_type = other DNA
atggtgctgagcctgaccggcctgattgccttctccttcctgcaggccaccctggccctgaaccctgaggaccccaacgtgtgcagccactgggagagctatgctgtgacagtgcaggagagctatgcccacccctttgaccagatctactacacccgctgcacagacatcctgaactggttcaagtgcaccaggcaccgcatctcctacaagacagcctacagaagaggcctgcggaccatgtacagaagaagaagccagtgctgccccggctactatgaaagtggggacttctgcatccccctgtgcacagaggagtgtgtgcacggccgctgtgtgtccccagacacctgccactgtgagcccggctggggcggccctgactgcagcagcggctgtgacagcgaccactggggcccccactgcagcaaccgctgccagtgccagaatggagccctgtgcaaccccatcaccggggcctgtgtgtgtgccgccggcttccggggctggaggtgtgaggagctgtgtgcccctggcacccacggcaagggctgccagctgccctgccagtgcagacatggagccagctgtgaccccagggctggagaatgtctgtgtgcccctggctacacaggagtgtactgtgaggagctgtgccccccaggcagccacggggcccactgtgagctgcgctgcccctgccagaatggaggcacctgccaccacatcaccggggagtgtgcctgccccccaggctggacaggagctgtgtgtgcccagccctgccccccaggcaccttcggccagaactgcagccaggactgcccctgccaccacggcggccagtgtgaccacgtgacaggccagtgccactgcacagctggctacatgggagaccgctgccaggaggagtgccccttcggcagctttggcttccagtgcagccagcactgtgactgccacaacggcggccagtgcagccccaccaccggggcctgtgaatgtgagcccggctacaagggcccccgctgccaggagcggctgtgcccagagggcctgcacggccctggctgcaccctgccctgcccctgtgatgctgacaacaccatcagctgccaccctgtgactggagcctgcacctgccagcccggctggagcggccaccactgcaatgaaagctgccctgtgggctactatggagatggctgccagctgccctgcacctgccagaatggagctgactgccacagcatcactggaggctgcacctgtgcccctggcttcatgggagaggtgtgtgctgtgtcctgtgccgccggcacctacggccccaactgcagcagcatctgcagctgcaacaacggcggcacctgcagccctgtggatggcagctgcacctgcaaggagggctggcagggcctggactgcaccctgccctgccccagcggcacctggggcctgaactgcaatgaaagctgcacctgtgccaatggagctgcctgcagccccattgatggcagctgcagctgcaccccaggctggctgggggacacctgtgagctgccctgcccagatggcaccttcggcctgaactgcagcgagcactgtgactgcagccatgctgatggctgtgaccctgtgacaggccactgctgctgcctggccggctggacaggcatccgctgtgacagcacctgccccccaggccgctggggccccaactgcagcgtgtcctgcagctgtgaaaatggaggcagctgcagcccagaagatggcagctgtgaatgtgcccctggcttccggggccccctgtgccagaggatctgccccccaggcttctacggccacggctgtgcccagccctgccccctgtgtgtgcacagcagccggccctgccaccacatcagcggcatctgtgagtgcctgcccggcttcagcggggccctgtgcaaccaggtgtgtgccggcggctacttcggccaggactgtgcccagctgtgcagctgtgccaacaacggcacctgcagccccattgatggcagctgccagtgcttccctggctggattggcaaggactgcagccaggcctgccccccaggcttctggggccctgcctgcttccacgcctgcagctgccacaacggggccagctgcagcgcagaagatggagcctgccactgcaccccaggctggacaggcctcttctgcacccagaggaagccccacctgctggccagccagcccctgcgcatcccctgctgcggcctgctggccaccgtgggcatcgtgcagaccagccgggagggcggcatgcaggccgcccctggcctggtggtgcctgacagctgccccaccaggacagaggagctgtgccggggcagcagcaggccagactggatccagggcatcgacaagcccaaggtgctggagggccagggctgcaaggccgcccagcagcacttcctgggccgcacagtgggcgcctatgcctctgtgaggatggccccagctgtgaccacctctgtggccagcgccccagctgcccaggccagccctggcaacacagtgtccagagatgtgccccaggagcccctggccatgggcgtgtcctcctatgtgtctgcctag

SEQ ID NO: 160373 - DNA, 414 bp, synthetic construct
  misc_feature 1..414: note = Description of Artificial Sequence: Synthetic coding sequence
  source 1..414: mol_type = other DNA
atgatggaggagctgaacccctacaccaagatcagccctgccctgggcgctgagcggcacagcgtgggcgctgtgacaggcatcatgctgctgctcttcctgattgtggtgctgctgggcctgtttgcctggcacagaagacggcagaaggagaagggccgggacctggccccccgggtgtcctacaccccagccatgaggatgaccagcacagactacagcctgagcgccagcaccaccccctggtggcctgtgatggagcacctggcccggcccttcagccagaggcccaggacccagctgagcaacaagagcctggaccgggacacagctggctggaccccctacagctatgtgaatgtgctggaccagtgccctgggggccaggtgcctgcccggggcctgctgcactag

SEQ ID NO: 160374 - DNA, 2910 bp, synthetic construct; identical to SEQ ID NO: 160371
  misc_feature 1..2910: note = Description of Artificial Sequence: Synthetic coding sequence
  source 1..2910: mol_type = other DNA

SEQ ID NO: 160375 - DNA, 3135 bp, synthetic construct
  misc_feature 1..3135: note = Description of Artificial Sequence: Synthetic coding sequence
  source 1..3135: mol_type = other DNA
atggtgctgagcctgaccggcctgattgccttctccttcctgcaggccaccctggccctgaaccctgaggaccccaacgtgtgcagccactgggagagctatgctgtgacagtgcaggagagctatgcccacccctttgaccagatctactacacccgctgcacagacatcctgaactggttcaagtgcaccaggcaccgcatctcctacaagacagcctacagaagaggcctgcggaccatgtacagaagaagaagccagtgctgccccggctactatgaaagtggggacttctgcatccccctgtgcacagaggagtgtgtgcacggccgctgtgtgtccccagacacctgccactgtgagcccggctggggcggccctgactgcagcagcggctgtgacagcgaccactggggcccccactgcagcaaccgctgccagtgccagaatggagccctgtgcaaccccatcaccggggcctgtgtgtgtgccgccggcttccggggctggaggtgtgaggagctgtgtgcccctggcacccacggcaagggctgccagctgccctgccagtgcagacatggagccagctgtgaccccagggctggagaatgtctgtgtgcccctggctacacaggagtgtactgtgaggagctgtgccccccaggcagccacggggcccactgtgagctgcgctgcccctgccagaatggaggcacctgccaccacatcaccggggagtgtgcctgccccccaggctggacaggagctgtgtgtgcccagccctgccccccaggcaccttcggccagaactgcagccaggactgcccctgccaccacggcggccagtgtgaccacgtgacaggccagtgccactgcacagctggctacatgggagaccgctgccaggaggagtgccccttcggcagctttggcttccagtgcagccagcactgtgactgccacaacggcggccagtgcagccccaccaccggggcctgtgaatgtgagcccggctacaagggcccccgctgccaggagcggctgtgcccagagggcctgcacggccctggctgcaccctgccctgcccctgtgatgctgacaacaccatcagctgccaccctgtgactggagcctgcacctgccagcccggctggagcggccaccactgcaatgaaagctgccctgtgggctactatggagatggctgccagctgccctgcacctgccagaatggagctgactgccacagcatcactggaggctgcacctgtgcccctggcttcatgggagaggtgtgtgctgtgtcctgtgccgccggcacctacggccccaactgcagcagcatctgcagctgcaacaacggcggcacctgcagccctgtggatggcagctgcacctgcaaggagggctggcagggcctggactgcaccctgccctgccccagcggcacctggggcctgaactgcaatgaaagctgcacctgtgccaatggagctgcctgcagccccattgatggcagctgcagctgcaccccaggctggctgggggacacctgtgagctgccctgcccagatggcaccttcggcctgaactgcagcgagcactgtgactgcagccatgctgatggctgtgaccctgtgacaggccactgctgctgcctggccggctggacaggcatccgctgtgacagcacctgccccccaggccgctggggccccaactgcagcgtgtcctgcagctgtgaaaatggaggcagctgcagcccagaagatggcagctgtgaatgtgcccctggcttccggggccccctgtgccagaggatctgccccccaggcttctacggccacggctgtgcccagccctgccccctgtgtgtgcacagcagccggccctgccaccacatcagcggcatctgtgagtgcctgcccggcttcagcggggccctgtgcaaccaggtgtgtgccggcggctacttcggccaggactgtgcccagctgtgcagctgtgccaacaacggcacctgcagccccattgatggcagctgccagtgcttccctggctggattggcaaggactgcagccaggcctgccccccaggcttctggggccctgcctgcttccacgcctgcagctgccacaacggggccagctgcagcgcagaagatggagcctgccactgcaccccaggctggacaggcctcttctgcacccagcgctgcccagctgccttcttcggcaaggactgtggccgggtgtgccagtgccagaatggagccagctgtgaccacatcagcggcaagtgcacctgcaggacaggcttcaccggccagcactgtgagcagagatgtgcccctggcaccttcggctacggctgccagcagctgtgtgagtgcatgaacaacagcacctgtgaccacgtgacaggcacctgctactgcagccctggcttcaagggcatccgctgtgaccaggccgccctgatgatggaggagctgaacccctacaccaagatcagccctgccctgggcgctgagcggcacagcgtgggcgctgtgacaggcatcatgctgctgctcttcctgattgtggtgctgctgggcctgtttgcctggcacagaagacggcagaaggagaagggccgggacctggccccccgggtgtcctacaccccagccatgaggatgaccagcacagactacagcctgagcggggcctgtggcatggaccggcggcagaacacctacatcatggacaagggcttcaaggactacatgaaggagagcgtgtgcagcagcagcacctgcagcctgaacagcagcgagaacccctatgccaccatcaaggacccccccatcctgacctgcaagctgcctgagagcagctatgtggagatgaagagccctgtgcacatgggcagcccctacacagatgtgcccagcctgagcaccagcaacaagaacatctatgaggtggagcccaccgtgtctgtggtgcaggagggctgcggccacaacagcagctacatccagaatgcctatgacctgcccaggaacagccacatccctggccactatgacctgctgcctgtgcggcagagccctgccaacggccccagccaggacaagcagagctag

SEQ ID NO: 160376 - DNA, 3135 bp, synthetic construct; identical to SEQ ID NO: 160375
  misc_feature 1..3135: note = Description of Artificial Sequence: Synthetic coding sequence
  source 1..3135: mol_type = other DNA

SEQ ID NO: 160377 - DNA, 3690 bp, synthetic construct
  misc_feature 1..3690: note = Description of Artificial Sequence: Synthetic coding sequence
  source 1..3690: mol_type = other DNA
atgggcgccagccgggaccggggcctggccgccctgtggtgcctgggcctgctgggcggcctggcccgggtggccggcacccactaccgctacctgtggaggggctgctacccctgccacctgggccaggccggctaccctgtgtctgctggggaccagaggccagatgtggatgaatgtaggacccacaacggcggctgccagcaccgctgtgtgaacaccccaggcagctacctgtgtgagtgcaagccaggcttccggctgcacacagacagcaggacctgcctggccatcaacagctgtgccctgggcaatggaggctgccagcaccactgtgtgcagctgaccatcaccaggcaccgctgccagtgccggcccggcttccagctgcaggaggatggccgccactgtgtgagaagaagcccctgtgccaacagaaatggcagctgcatgcaccgctgccaggtggtgcggggcctggcccgctgtgagtgccacgtgggctaccagctggccgcagatggcaaggcctgtgaagatgtggatgaatgtgccgccggcctggcccagtgtgcccacggctgcctgaacacccagggcagcttcaagtgtgtgtgccacgccggctatgagctgggcgcagatggccggcagtgctaccgcatcgagatggagatcgtgaacagctgtgaggccaacaacggcggctgcagccacggctgcagccacaccagcgctggccccctgtgcacctgcccccggggctatgagctggacacagaccagaggacctgcattgatgtggatgactgtgccgacagcccctgctgccagcaggtgtgcaccaacaaccctgggggctatgaatgtggctgctacgccggctaccgcctgtctgcagatggctgcggctgtgaagatgtggatgaatgtgccagcagccggggcggctgtgagcaccactgcaccaacctggccggcagcttccagtgcagctgtgaggccggctaccgcctgcatgaagatagaagaggctgcagccccctggaggagcccatggtggacctggatggagagctgccctttgtgcggcccctgccccacatcgctgtgctgcaggatgagctgccccagctgttccaggatgatgatgtgggcgcagatgaggaggaggccgagctgcggggggagcacaccctgacagagaagtttgtgtgcctggatgacagctttggacatgactgcagcctgacctgtgatgactgcagaaatggaggcacctgcctgctgggcctggatggctgtgactgcccagagggctggacaggcctcatctgcaatgagacctgccccccagacaccttcggcaagaactgcagcttcagctgcagctgccagaatggaggcacctgtgacagcgtgactggagcctgccgctgccccccaggagtgtctggcaccaactgtgaagatggctgccccaagggctactacggcaagcactgcaggaagaagtgcaactgtgccaacagaggccgctgccaccggctgtatggagcctgcctgtgtgaccccggcctgtatggccgcttctgccacctgacctgccccccctgggcctttggacctggctgcagcgaggagtgccagtgtgtgcagccccacacccagagctgtgacaagagagatggcagctgcagctgcaaggccggcttccggggggagcgctgccaggccgagtgtgagctgggctacttcggccctggctgctggcaggcctgcacctgccctgtgggcgtggcctgtgacagcgtgtctggagaatgtgggaagcgctgcccagctggcttccagggcgaggactgtggccaggagtgccctgtgggcacctttggagtgaactgcagcagcagctgcagctgtggcggggccccctgccacggcgtgacaggccagtgccgctgccccccaggccgcactggagaggactgtgaggccgactgcccagagggccgctggggcctgggctgccaggagatctgcccagcctgccagcacgccgcccgctgtgaccctgagaccggggcctgcctgtgcctgcccggctttgtgggcagccgctgccaggatgtgtgcccagctggctggtacggccccagctgccagacccgctgcagctgtgccaatgatggccactgccacccagccaccggccactgcagctgtgcccctggctggacaggcttcagctgccagagggcctgtgacaccggccactggggccctgactgcagccacccctgcaactgcagcgctggccacggcagctgtgatgccatcagcggcctgtgcctgtgtgaggccggctacgtgggcccccgctgtgagcagcagtgcccccagggccacttcggccctggctgtgagcagcgctgccagtgccagcacggggccgcctgtgaccacgtgtctggggcctgcacctgcccagctggctggaggggcaccttctgtgagcacgcctgcccagctggcttcttcggcctggactgccgcagcgcctgcaactgcacagctggagctgcctgtgatgctgtgaatggcagctgcctgtgcccagctggccggcggggcccccgctgtgccgagaagtgcctgcccagagatgtgcgggccggctgccgccacagcggcggctgcctgaatggaggcctgtgtgacccccacacaggccgctgcctgtgcccagctggctggacaggagacaagtgccagagcccctgcctgcggggctggtttggagaggcctgtgcccagcgctgcagctgccccccaggagctgcctgccaccacgtgactggagcctgccgctgccccccaggcttcaccggcagcggctgtgagcagggctgccccccaggccgctatggccctggctgtgagcagctgtgtggctgcctgaatggaggcagctgtgatgctgccaccggggcctgccgctgccccaccggcttcctgggcacagactgcaacctgacctgcccccagggccgcttcggccccaactgcacccacgtgtgtggctgcggccagggcgccgcctgtgaccctgtgacaggcacctgcctgtgccccccaggccgggccggcgtgcgctgtgagcggggctgcccccagaaccgcttcggcgtgggctgtgagcacacctgcagctgcagaaatggaggcctgtgccacgccagcaatggcagctgcagctgtggcctgggctggacaggccgccactgtgagctggcctgccccccaggccgctatggagctgcctgccacctggagtgcagctgccacaacaacagcacctgtgagcccgccaccggcacctgccgctgtggccctggcttctacggccaggcctgtgagcaccggcgcagcggggccacctgcaacctggactgcagaagaggccagtttggccccagctgcaccctgcactgtgactgtggcggcggcgctgactgtgaccctgtgtctggccagtgccactgtgtggatggctacatgggccccacctgccgggagggcggccccctgcggctgcctgagaaccccagcctggcccagggcagcgctggcaccctgcctgccagcagccggcccaccagccgcagcggcggccctgcccggcactag

SEQ ID NO: 160378 - DNA, 4626 bp, synthetic construct
  misc_feature 1..4626: note = Description of Artificial Sequence: Synthetic coding sequence
  source 1..4626: mol_type = other DNA
atgtccttcctggaggaggcccgggccgccggccgggctgtggtgctggccctggtgctgctgctgctgcctgctgtgcctgtgggcgcctctgtgcccccccggcccctgctgcccctgcagcccggcatgccccacgtgtgtgccgagcaggagctgaccctggtgggccggcggcagccctgtgtgcaggccctgagccacacagtgcctgtgtggaaggccggctgcggctggcaggcctggtgtgtgggccacgagaggagaacagtgtactacatgggctaccggcaggtgtacaccacagaggccaggacagtgctgcgctgctgccggggctggatgcagcagccagatgaggagggctgcctgtctgcagaatgttctgccagcctgtgcttccatggaggccgctgtgtgcccggcagcgcccagccctgccactgccccccaggcttccagggcccccgctgccagtatgatgtggatgagtgcaggacccacaatggaggctgccagcaccgctgtgtgaacaccccaggcagctacctgtgtgagtgcaagccaggcttccggctgcacacagacagcaggacctgcctggccatcaacagctgtgccctgggcaatggaggctgccagcaccactgtgtgcagctgaccatcaccaggcaccgctgccagtgcaggcctggcttccagctgcaggaggatggccgccactgtgtgcggcgcagcccctgtgccaacagaaatggcagctgcatgcaccgctgccaggtggtgcggggcctggcccgctgtgaatgtcatgtgggctaccagctggccgcagatggcaaggcctgtgaagatgtggatgaatgtgccgccggcctggcccagtgtgcccacggctgcctgaacacccagggcagcttcaagtgtgtgtgccacgccggctatgagctgggcgcagatggccggcagtgctacagaattgagatggagatcgtgaacagctgtgaggccaacaatggaggctgcagccacggctgcagccacaccagcgctggccccctgtgcacctgcccccggggctatgagctggacacagaccagaggacctgcattgatgtggatgactgtgccgacagcccctgctgccagcaggtgtgcaccaacaaccctgggggctatgaatgtggctgctacgccggctaccgcctgtctgcagatggctgcggctgtgaagatgtggatgaatgtgccagcagcagaggaggctgtgagcaccactgcaccaacctggccggcagcttccagtgcagctgtgaggccggctaccgcctgcacgaggaccggcggggctgcagccccctggaggagcccatggtggacctggatggagagctgccctttgtgcggcccctgccccacatcgctgtgctgcaggatgagctgccccagctgttccaggatgatgatgtgggcgcagatgaggaggaggccgagctgcggggggagcacaccctgacagagaagtttgtgtgcctggatgacagctttggacatgactgcagcctgacctgtgatgactgcagaaatggaggcacctgcctgctgggcctggatggctgtgactgcccagagggctggacaggcctcatctgcaatgagacctgccccccagacaccttcggcaagaactgcagcttcagctgcagctgccagaatggaggcacctgtgacagcgtgactggagcctgccgctgccccccaggagtgtctggcaccaactgtgaagatggctgccccaagggctactacggcaagcactgcaggaagaagtgcaactgtgccaacagaggccgctgccaccggctgtatggagcctgcctgtgtgaccccggcctgtatggccgcttctgccacctgacctgccccccctgggccttcggccctggctgcagcgaggagtgccagtgtgtgcagccccacacccagagctgtgacaagagagatggcagctgcagctgcaaggccggcttccggggggagcgctgccaggctgaatgtgagctgggctactttggacctggctgctggcaggcctgcacctgccctgtgggcgtggcctgtgacagcgtgtctggagaatgtgggaagcgctgcccagctggcttccagggcgaggactgtggccaggagtgccctgtgggcaccttcggcgtgaactgcagcagcagctgcagctgtggcggggccccctgccacggcgtgacaggccagtgccgctgccccccaggccgcactggagaggactgtgaggccgactgcccagagggccgctggggcctgggctgccaggagatctgcccagcctgccagcacgccgcccgctgtgaccctgagactggagcctgcctgtgcctgcccggctttgtgggcagccgctgccaggatgtgtgcccagctggctggtacggccccagctgccagacccgctgcagctgtgccaatgatggccactgccacccagccaccggccactgcagctgtgcccctggctggacaggcttcagctgccagagggcctgtgacaccggccactggggccctgactgcagccacccctgcaactgcagcgctggccacggcagctgtgatgccatcagcggcctgtgcctgtgtgaggccggctacgtgggcccccgctgtgagcagcagtgcccccagggccactttggacctggctgtgagcagcgctgccagtgccagcacggggccgcctgtgaccacgtgtctggggcctgcacctgcccagctggctggaggggcaccttctgtgaacatgcctgcccagctggcttcttcggcctggactgccgcagcgcctgcaactgcacagctggggccgcctgtgatgctgtgaatggcagctgcctgtgcccagctggaagaagaggcccccgctgtgccgagacctgcccagcccacacctacggccacaactgcagccaggcctgtgcctgcttcaatggagccagctgtgaccctgtgcacggccagtgccactgtgcccctggctggatgggccccagctgcctgcaggcctgcccagctggcctgtatggagacaactgccgccacagctgcctgtgccagaatggaggcacctgtgaccctgtgtctggccactgtgcctgcccagagggctgggccggcctggcctgtgagaaggaatgtctgcccagagatgtgcgggccggctgccgccacagcggcggctgcctgaatggaggcctgtgtgacccccacacaggccgctgcctgtgcccagctggctggacaggagacaagtgccagagcccctgcctgcggggctggtttggagaggcctgtgcccagcgctgcagctgccccccaggggccgcctgccaccacgtgactggagcctgccgctgccccccaggcttcaccggcagcggctgtgagcaggcctgccccccaggcagctttggagaggactgtgcccagatgtgccagtgccctggagagaacccagcctgccacccagccaccggcacctgcagctgtgccgccggctaccacggccccagctgccagcagcgctgccccccaggccgctatggccctggctgtgagcagctgtgtggctgcctgaatggaggcagctgtgatgctgccactggagcctgccgctgccccaccggcttcctgggcacagactgcaacctgacctgcccccagggccgcttcggccccaactgcacccacgtgtgtggctgcggccagggcgccgcctgtgaccctgtgacaggcacctgcctgtgccccccaggccgggccggcgtgcgctgtgagcggggctgcccccagaacagatttggagtgggctgtgagcacacctgcagctgcagaaatggaggcctgtgccacgccagcaatggcagctgcagctgtggcctgggctggacaggccgccactgtgagctggcctgccccccaggccgctacggggccgcctgccacctggagtgcagctgccacaacaacagcacctgtgagcccgccaccggcacctgccgctgtggccctggcttctacggccaggcctgtgagcacccctgccccccaggcttccatggagctggctgccagggcctgtgctggtgccagcacggggccccctgtgaccccatcagcggccgctgcctgtgcccagctggcttccacggccacttctgtgagcggggctgtgagcccggcagctttggagagggctgccaccagagatgtgactgtgatggaggagccccctgtgaccctgtgacaggcctgtgcctgtgccccccaggccgcagcggggccacctgcaacctggactgcagaagaggccagtttggccccagctgcaccctgcactgtgactgtggcggcggcgctgactgtgaccctgtgtctggccagtgccactgtgtggatggctacatgggccccacctgccgggagggcggccccctgcggctgcctgagaaccccagcctggcccagggcagcgctggcaccctgcctgccagcagccggcccaccagccgcagcggcggccctgcccggcactag

SEQ ID NO: 160379 - DNA, 8538 bp, synthetic construct
  misc_feature 1..8538: note = Description of Artificial Sequence: Synthetic coding sequence
  source 1..8538: mol_type = other DNA
atggccctgggcaaggtgctggccatggccctggtgctggccctggccgtgctgggcagcctgagccctggggcccgggccggggactgcaagggccagaggcaggtgctgcgggaggcccctggctttgtgacagatggagctggcaactacagcgtgaatggaaactgtgagtggctgattgaggcccccagcccccagcaccgcatcctgctggacttcctgttcctggacacagagtgcacctatgactacctgtttgtgtatgatggagacagcccccggggccccctgctggccagcctgagcggcagcacccggcccccacccatcgaggccagcagcggcaagatgctgctgcacctgttcagtgatgccaactacaacctgctgggcttcaatgccagcttccgcttcagcctgtgccctgggggctgccagagccacggccagtgccagcccccaggagtgtgtgcctgtgagcccggctggggcggccctgactgtggcctgcaggagtgcagcgcctactgcggcagccacggcacctgtgccagccccctgggcccctgccgctgtgagcccggcttcctgggccgggcctgtgacctgcacctgtgggagaaccagggcgccggctggtggcacaacgtgtctgcccgggaccctgccttcagcgccagaattggagctgctggggccttcctgagccccccaggcctgctggccgtgtttggaggccaggacctgaacaatgccctgggggacctggtgctgtacaacttcagcgccaacacctgggagagctgggacctgagccctgccccagctgcccggcacagccacgtggccgtggcctgggccggcagcctggtgctgatgggcggggagctggctgatggcagcctgaccaatgatgtgtgggccttcagccccctgggccggggccactgggagctgctggcccccccagccagcagcagcagcggccccccaggcctggccggccacgccgccgccctggtggatgatgtgtggctgtatgtgtctgggggccgcacccctcatgacctcttcagcagcggcctcttccgcttccggctggacagcaccagcggcggctactgggagcaggtgatcccagctgggggccggcccccagctgccaccggccacagcatggtgttccacgcccccagccgggccctgctggtgcacggcggccaccggcccagcacagcccgcttctctgtgcgggtgaacagcacagagctgttccacgtggacagacatgtgtggaccaccctgaagggcagagatggcctgcagggcccccgggagcgggccttccacacagcctctgtgctgggcaactacatggtggtgtatggaggaaatgtgcacacccactaccaggaggagaagtgctatgaagatggcatcttcttctaccacctgggctgccaccagtgggtgtctggagctgagctggcccctcctggcaccccagagggccgggccgcccctccttctggccgctacagccacgtggccgctgtgctgggcggctctgtgctgctggtggccggcggctacagcggccggcccaggggggacctgatggcctacaaggtgcccccatttgtgttccaggccccagccccagactaccacctggactactgcagcatgtacacagaccacagcgtgtgcagccgggaccctgagtgctcctggtgccagggcgcctgccaggccgcccctcctcctggcacccccctgggcgcctgcccagctgccagctgcctgggcctgggccgcctgctgggggactgccaggcctgcctggccttcagcagccccacagccccaccccggggccctggcaccctgggctggtgtgtgcacaatgaaagctgcctgcccaggcctgagcaggcccgctgccgcggggagcagatctctggaacagtgggctggtggggccctgcccctgtgtttgtgaccagcctggaggcctgtgtgacccagagcttcctgcccggcctgcacctgctgaccttccagcagccccccaacaccagccagcctgacaaggtgtccatcgtgcgcagcaccaccatcaccctgaccccatctgctgagacagatgtgtccctggtgtaccggggcttcatctaccccatgctgcccggcggccctgggggccctggagcagaagatgtggccgtgtggacccgggcccagaggctgcacgtgctggccaggatggcccggggccctgacacagagaacatggaggaggtgggccgctgggtggcccaccaggagaaggagacccggcggctgcagaggcctggcagcgcccggctcttccccctgcccggccgggaccacaagtatgctgtggagatccagggccagctgaatggcagcgctggccctggccacagcgagctgaccctgctgtgggacagaactggagtgcctgggggcagcgagatctccttcttcttcctggagccctaccgcagcagcagctgcaccagctacagcagctgcctgggctgcctggccgaccagggctgcggctggtgcctgaccagcgccacctgccacctgcggcagggcggggcccactgtggagatgatggagctgggggcagcctgctggtgctggtgcccaccctgtgccccctgtgtgaggagcaccgggactgccacgcctgcacccaggaccccttctgtgagtggcaccagagcaccagcaggaaaggagatgctgcctgcagccggcggggccggggccgcggggccctgaagagcccagaagaatgtcctcccctgtgcagccagaggctgacctgtgaggactgcctggccaacagcagccagtgtgcctggtgccagagcacccacacctgcttcctgtttgctgcctacctggcccgctacccccatggaggctgccggggctgggatgacagcgtgcacagcgagccccgctgccgcagctgtgatggcttcctgacctgccacgagtgcctgcagagccatgaatgtggctggtgtggaaatgaagacaaccccaccctgggccgctgcctgcagggcgacttcagcggccccctgggcggcggcaactgcagcctgtgggtgggggagggcctgggcctgcctgtggccctgcctgcccgctgggcctatgcccgctgcccagatgtggatgaatgtcggctgggcctggcccgctgccacccccgggccacctgcctgaacacccccctgtcctatgagtgccactgccagaggggctaccagggagatggcatcagccactgcaacagaacctgcctggaggactgtggccacggcgtgtgcagcggccccccagacttcacctgtgtgtgtgacctgggctggaccagtgacctgcccccacccaccccagcccctggccccccagccccccgctgcagccgggactgtggctgcagcttccacagccactgcaggaagaggggccctggcttctgtgatgagtgccaggactggacctggggcgagcactgtgagcgctgccggcccggcagctttggaaatgccaccggcagccggggctgccggccctgccagtgcaatggccacggggacccccggcggggccactgtgacaacctgagcggcctgtgcttctgccaggaccacacagaaggagcccactgccagctgtgcagccctggctactacggggaccccagggctgggggcagctgcttccgggagtgtggcggccgggccctgctgaccaacgtgtcctctgtggccctgggcagccggcgggtgggcggcctgctgcccccaggcggcggggccgcccgggccggccctggcctgagctactgtgtgtgggtggtgtctgccacagaggagctgcagccctgtgcccctggcaccctgtgcccccccctgaccctgaccttctccccagacagcagcaccccctgcaccctgtcctatgtgctggcctttgatggcttcccccgcttcctggacacaggagtggtgcagagcgacaggagcctgattgctgccttctgtggccagaggcgggaccggcccctgactgtgcaggccctgagcggcctgctggtgctgcactgggaggccaacggcagcagctcctggggcttcaatgcctctgtgggcagcgcccgctgtggcagcggcggccctggcagctgccctgtgccccaggagtgtgtgccccaggatggagctgctggggccggcctgtgccgctgcccccagggctgggccggcccccactgcaggatggccctgtgcccagagaactgcaatgcccacactggagctggcacctgcaaccagagcctgggcgtgtgcatctgtgccgagggctttggaggccctgactgtgccaccaagctggatggcggccagctggtgtgggagaccctgatggacagccggctgtctgctgacacagccagccgcttcctgcaccggctgggccacaccatggtggatggcccagatgccaccctgtggatgtttggaggcctgggcctgccccagggcctgctgggcaacctgtaccgctacagcgtgtctgaaagacgctggacccagatgctggccggggctgaagatggcggccctggccccagccccaggagcttccacgccgccgcctacgtgcctgctggccgcggggccatgtacctgctgggcggcctgacagctggaggagtgacccgggacttctgggtgctgaacctgaccaccctgcagtggaggcaggagaaggccccccagacagtggagctgcctgctgtggccggccacaccctgacagcccggcggggcctgagcctgctgctggtgggcggctacagcccagaaaatggcttcaaccagcagctgctggagtaccagctggccaccggcacctgggtgtctggggcccagagcggcaccccacccaccggcctgtatggccacagcgctgtgtaccacgaggccacagacagcctgtatgtgtttggaggcttccgcttccacgtggagctggccgcccccagccctgagctgtacagcctgcactgcccagacaggacctggagcctgctggcccccagccagggcgccaagagggacaggatgagaaatgtgcggggcagcagccggggcctgggccaggtgcctggagagcagcccggctcctggggcttccgggaggtgaggaagaagatggccctgtgggccgccctggccggcaccggcggcttcctggaggagatcagcccccacctgaaggagccccggcccaggctcttccacgccagcgccctgctgggggacaccatggtggtgctgggcggccgcagtgaccctgatgagttcagcagtgatgtgctgctgtaccaggtgaactgcaatgcctggctgctgcctgacctgaccaggtctgcctctgtgggcccccccatggaggagagcgtggcccatgctgtggccgctgtgggcagccggctgtacatcagcggcggctttggaggagtggccctgggccgcctgctggccctgaccctgcccccagacccctgccgcctgctgagcagccctgaggcctgcaaccagagcggggcctgcacctggtgccacggggcctgcctgagcggggaccaggcccaccggctgggctgcggcggcagcccctgcagccccatgcccaggagccctgaggagtgccggcggctgcggacctgcagtgaatgtctggcccggcaccccaggaccctgcagcctggagatggagaggccagcaccccccgctgcaagtggtgcaccaactgcccagagggcgcctgcatcggcagaaatggcagctgcaccagtgaaaatgactgccgcatcaaccagcgggaggtgttctgggccggcaactgcagcgaggccgcctgtggggctgctgactgtgagcagtgcacccgggagggcaagtgcatgtggacccggcagttcaagaggactggagagacccggcgcatcctgtctgtgcagcccacctatgactggacctgcttcagccacagcctgctgaatgtgagccccatgcctgtggagagcagcccccccctgccctgccccaccccctgccacctgctgcccaactgcaccagctgcctggacagcaaaggagcagatggcggctggcagcactgtgtgtggagcagcagcctgcagcagtgcctgagccccagctacctgcccctgcgctgcatggccggcggctgcggccgcctgctgcggggccctgagagctgcagcctgggctgtgcccaggccacccagtgtgccctgtgcctgcggcggccccactgcggctggtgtgcctggggcggccaggacggcggcggccgctgcatggagggcggcctgagcggccccagagatggcctgacctgtggccggcctggggcctcctgggccttcctgagctgccccccagaagatgaatgtgccaacggccaccacgactgcaatgagacccagaactgccacgaccagccccacggctatgaatgtagctgcaagacaggctacaccatggacaacatgacaggcctgtgcaggcctgtgtgtgcccagggctgtgtgaatggcagctgtgtggagccagaccactgccgctgccacttcggctttgtgggcaggaactgcagcacagagtgccgctgcaacagacattctgaatgtgccggcgtgggcgcccgggaccactgcctgctgtgcaggaaccacaccaagggcagccactgtgagcagtgcctgcccctgtttgtgggcagcgctgtgggcggcggcacctgccggccctgccacgccttctgccggggcaacagccacatctgcatcagcaggaaggagctgcagatgagcaaaggagagcccaagaagtacagcctggaccctgaggagattgagaactgggtgacagagggccccagtgaagatgaagctgtgtgtgtgaactgccagaacaacagctatggagagaagtgtgagagctgcctgcagggctacttcctgctggatggcaagtgcaccaagtgccagtgcaatggacatgctgacacctgcaatgagcaggacggcaccggctgcccctgccagaacaacacagaaacaggcacctgccagggcagcagccccagcgaccggcgggactgctacaagtaccagtgtgccaagtgccgggagagcttccacggcagccccctgggcggccagcagtgctaccgcctcatctctgtggagcaggagtgctgcctggaccccaccagccagaccaactgcttccacgagcccaagagaagagccctgggccctggccgcacagtgctgtttggagtgcagcccaagttcaccaacgtggacatccggctgaccctggatgtgacctttggagctgtggacctgtatgtgtccaccagctatgacacctttgtggtgcgggtggccccagacacaggagtgcacacagtgcacatccagcccccaccagcccctcctcctcctcctcctccagcagatggcggccccaggggggccggggaccctggaggagctggggccagcagcggccctggggccccagctgagccccgggtgcgggaggtgtggccccggggcctcatcacctacgtgacagtgacagagcccagcgctgtgctggtggtgcggggcgtgcgggaccggctggtgatcacctacccccatgagcaccacgccctgaagagcagccgcttctacctgctgctgctgggcgtgggggaccccagcggccctggggccaacggcagcgctgacagccagggcctgctcttcttccggcaggaccaggcccacatcgacctgtttgtgttcttctctgtgttcttcagctgcttcttcctgttcctgagcctgtgtgtgctgctgtggaaggccaagcaggccctggaccagaggcaggagcagaggaggcacctgcaggagatgaccaagatggccagccggccctttgccaaggtgacagtgtgcttccccccagaccccacagccccagccagcgcctggaagccagctggcctgcccccaccagccttccgccgctctgagcccttcctggcccccctgctgctgaccggggccggcggcccctggggccccatgggcggcggctgctgccccccagccatcccagccaccacagctggcctgcgggccggccccatcaccctggagcccacagaagatggcatggccggcgtggccaccctgctgctgcagctgcccggcggcccccacgccccaaatggagcctgcctgggcagcgccctggtgaccctgcggcaccggctgcacgagtactgcggcggcggcggcggggccggcggcagcggccatggaactggagctggcaggaagggcctgctgagccaggacaacctgacctccatgagcctgtag

SEQ ID NO: 160380 - DNA, 8337 bp, synthetic construct
  misc_feature 1..8337: note = Description of Artificial Sequence: Synthetic coding sequence
  source 1..8337: mol_type = other DNA
atggccctgggcaaggtgctggccatggccctggtgctggccctggccgtgctgggcagcctgagccctggggcccgggccggggactgcaagggccagaggcaggtgctgcgggaggcccctggctttgtgacagatggagctggcaactacagcgtgaatggaaactgtgagtggctgattgaggcccccagcccccagcaccgcatcctgctggacttcctgttcctggacacagagtgcacctatgactacctgtttgtgtatgatggagacagcccccggggccccctgctggccagcctgagcggcagcacccggcccccacccatcgaggccagcagcggcaagatgctgctgcacctgttcagtgatgccaactacaacctgctgggcttcaatgccagcttccgcttcagcctgtgccctgggggctgccagagccacggccagtgccagcccccaggagtgtgtgcctgtgagcccggctggggcggccctgactgtggcctgcaggagtgcagcgcctactgcggcagccacggcacctgtgccagccccctgggcccctgccgctgtgagcccggcttcctgggccgggcctgtgacctgcacctgtgggagaaccagggcgccggctggtggcacaacgtgtctgcccgggaccctgccttcagcgccagaattggagctgctggggccttcctgagccccccaggcctgctggccgtgtttggaggccaggacctgaacaatgccctgggggacctggtgctgtacaacttcagcgccaacacctgggagagctgggacctgagccctgccccagctgcccggcacagccacgtggccgtggcctgggccggcagcctggtgctgatgggcggggagctggctgatggcagcctgaccaatgatgtgtgggccttcagccccctgggccggggccactgggagctgctggcccccccagccagcagcagcagcggccccccaggcctggccggccacgccgccgccctggtggatgatgtgtggctgtatgtgtctgggggccgcacccctcatgacctcttcagcagcggcctcttccgcttccggctggacagcaccagcggcggctactgggagcaggtgatcccagctgggggccggcccccagctgccaccggccacagcatggtgttccacgcccccagccgggccctgctggtgcacggcggccaccggcccagcacagcccgcttctctgtgcgggtgaacagcacagagctgttccacgtggacagacatgtgtggaccaccctgaagggcagagatggcctgcagggcccccgggagcgggccttccacacagcctctgtgctgggcaactacatggtggtgtatggaggaaatgtgcacacccactaccaggaggagaagtgctatgaagatggcatcttcttctaccacctgggctgccaccagtgggtgtctggagctgagctggcccctcctggcaccccagagggccgggccgcccctccttctggccgctacagccacgtggccgctgtgctgggcggctctgtgctgctggtggccggcggctacagcggccggcccaggggggacctgatggcctacaaggtgcccccatttgtgttccaggccccagccccagactaccacctggactactgcagcatgtacacagaccacagcgtgtgcagccgggaccctgagtgctcctggtgccagggcgcctgccaggccgcccctcctcctggcacccccctgggcgcctgcccagctgccagctgcctgggcctgggccgcctgctgggggactgccaggcctgcctggccttcagcagccccacagccccaccccggggccctggcaccctgggctggtgtgtgcacaatgaaagctgcctgcccaggcctgagcaggcccgctgccgcggggagcagatctctggaacagtgggctggtggggccctgcccctgtgtttgtgaccagcctggaggcctgtgtgacccagagcttcctgcccggcctgcacctgctgaccttccagcagccccccaacaccagccagcctgacaaggaggaggtgggccgctgggtggcccaccaggagaaggagacccggcggctgcagaggcctggcagcgcccggctcttccccctgcccggccgggaccacaagtatgctgtggagatccagggccagctgaatggatctgctggccctggccacagcgagctgaccctgctgtgggacagaactggagtgcctgggggcagcgagatctccttcttcttcctggagccctaccgcagcagcagctgcaccagctacagcagctgcctgggctgcctggccgaccagggctgcggctggtgcctgaccagcgccacctgccacctgcggcagggcggggcccactgtggagatgatggagctgggggcagcctgctggtgctggtgcccaccctgtgccccctgtgtgaggagcaccgggactgccacgcctgcacccaggaccccttctgtgagtggcaccagagcaccagcaggaaaggagatgctgcctgcagcagaagaggccggggccgcggggccctgaagagccctgaggagtgcccccccctgtgcagccagaggctgacctgtgaggactgcctggccaacagcagccagtgtgcctggtgccagagcacccacacctgcttcctgtttgctgcctacctggcccgctacccccacggcggctgccggggctgggatgattctgtgcacagcgagccccgctgccgcagctgtgatggcttcctgacctgccatgaatgtctgcagagccatgaatgtggctggtgtggaaatgaagacaaccccaccctgggccgctgcctgcagggcgacttcagcggccccctgggcggcggcaactgcagcctgtgggtgggggagggcctgggcctgcctgtggccctgcctgcccgctgggcctatgcccgctgcccagatgtggatgagtgccgcctgggcctggcccgctgccacccccgggccacctgcctgaacacccccctgtcctatgagtgccactgccagaggggctaccagggagatggcatcagccactgcaacagaacctgcctggaggactgtggccatggagtgtgcagcggccccccagacttcacctgtgtgtgtgacctgggctggaccagtgacctgcccccacccaccccagcccctggccccccagccccccgctgcagccgggactgtggctgcagcttccacagccactgcaggaagaggggccctggcttctgtgatgagtgccaggactggacctggggcgagcactgtgagcgctgcaggcctggcagctttggaaatgccaccggcagccggggctgccggccctgccagtgcaatggacatggagacccccggcggggccactgtgacaacctgagcggcctgtgcttctgccaggaccacacagagggcgcccactgccagctgtgcagccctggctactatggagacccccgggccggcggcagctgcttcagagaatgtggcggccgggccctgctgaccaacgtgtcctctgtggccctgggcagcagaagagtgggcggcctgctgcccccaggcggcggggccgcccgggccggccctggcctgagctactgtgtgtgggtggtgtctgccacagaggagctgcagccctgtgcccctggcaccctgtgcccccccctgaccctgaccttctccccagacagcagcaccccctgcaccctgtcctatgtgctggcctttgatggcttcccccgcttcctggacaccggggtggtgcagagcgacaggagcctgattgctgccttctgtggccagaggcgggaccggcccctgactgtgcaggccctgagcggcctgctggtgctgcactgggaggccaacggcagcagctcctggggcttcaatgcctctgtgggcagcgcccgctgtggcagcggcggccctggcagctgccctgtgccccaggagtgtgtgccccaggatggagctgctggagctggcctgtgccgctgcccccagggctgggccggcccccactgcaggatggccctgtgcccagagaactgcaatgcccacactggagctggcacctgcaaccagagcctgggcgtgtgcatctgtgccgagggctttggaggccctgactgtgccaccaagctggatggcggccagctggtgtgggagaccctgatggacagccggctgtctgctgacacagccagccgcttcctgcaccggctgggccacaccatggtggatggcccagatgccaccctgtggatgtttggaggcctgggcctgccccagggcctgctgggcaacctgtaccgctacagcgtgtctgagcggcgctggacccagatgctggccggggctgaagatggcggccctggccccagccccaggagcttccacgccgccgcctacgtgcctgctggccgcggggccatgtacctgctgggcggcctgacagctgggggcgtgacccgggacttctgggtgctgaacctgaccaccctgcagtggaggcaggagaaggccccccagacagtggagctgcctgctgtggccggccacaccctgacagcccggcggggcctgagcctgctgctggtgggcggctacagcccagaaaatggcttcaaccagcagctgctggagtaccagctggccaccggcacctgggtgtctggggcccagagcggcaccccacccaccggcctgtatggccacagcgctgtgtaccacgaggccacagacagcctgtatgtgtttggaggcttccgcttccacgtggagctggccgcccccagccctgagctgtacagcctgcactgcccagacaggacctggagcctgctggcccccagccagggcgccaagagggacaggatgagaaatgtgcggggcagcagccggggcctgggccaggtgcctggagagcagcccggctcctggggcttccgggaggtgaggaagaagatggccctgtgggccgccctggccggcactggaggcttcctggaggagatcagcccccacctgaaggagccccggcccaggctcttccacgccagcgccctgctgggggacaccatggtggtgctgggcggccgcagtgaccctgatgagttcagcagtgatgtgctgctgtaccaggtgaactgcaatgcctggctgctgcctgacctgaccaggtctgcctctgtgggcccccccatggaggagagcgtggcccatgctgtggccgctgtgggcagccggctgtacatcagcggcggctttggaggagtggccctgggccgcctgctggccctgaccctgcccccagacccctgccgcctgctgagcagccctgaggcctgcaaccagagcggggcctgcacctggtgccacggggcctgcctgagcggggaccaggcccaccggctgggctgcggcggcagcccctgcagccccatgcccaggagcccagaagaatgtagaaggctgcggacctgcagcgagtgcctggcccggcaccccaggaccctgcagcctggagatggagaggccagcaccccccgctgcaagtggtgcaccaactgcccagagggcgcctgcattggaagaaatggcagctgcaccagtgaaaatgactgccgcatcaaccagcgggaggtgttctgggccggcaactgcagcgaggccgcctgtggggctgctgactgtgagcagtgcacccgggagggcaagtgcatgtggacccggcagttcaagaggactggagagacccggcgcatcctgtctgtgcagcccacctatgactggacctgcttcagccacagcctgctgaatgtgagccccatgcctgtggagagcagcccccccctgccctgccccaccccctgccacctgctgcccaactgcaccagctgcctggacagcaaaggagcagatggcggctggcagcactgtgtgtggagcagcagcctgcagcagtgcctgagccccagctacctgcccctgcgctgcatggccggcggctgcggccgcctgctgcggggccctgagagctgcagcctgggctgtgcccaggccacccagtgtgccctgtgcctgcggcggccccactgcggctggtgtgcctggggcggccaggacggcggcggccgctgcatggagggcggcctgagcggccccagagatggcctgacctgtggccggcctggggcctcctgggccttcctgagctgccccccagaagatgaatgtgccaacggccaccacgactgcaatgagacccagaactgccacgaccagccccacggctatgagtgcagctgcaagacaggctacaccatggacaacatgacaggcctgtgcaggcctgtgtgtgcccagggctgtgtgaatggcagctgtgtggagccagaccactgccgctgccactttggatttgtgggcaggaactgcagcacagaatgtcgctgcaacagacacagtgaatgtgccggcgtgggcgcccgggaccactgcctgctgtgcaggaaccacaccaagggcagccactgtgagcagtgcctgcccctgtttgtgggcagcgctgtgggcggcggcacctgccggccctgccacgccttctgccggggcaacagccacatctgcatcagcaggaaggagctgcagatgagcaagggggagcccaagaagtacagcctggaccctgaggagattgagaactgggtgacagagggccccagtgaagatgaggccgtgtgtgtgaactgccagaacaacagctatggagagaagtgtgagagctgcctgcagggctacttcctgctggatggcaagtgcaccaagtgccagtgcaatggacatgctgacacctgcaatgagcaggacggcaccggctgcccctgccagaacaacacagagaccggcacctgccagggcagcagccccagcgacagaagagactgctacaagtaccagtgtgccaagtgccgggagagcttccacggcagccccctgggcggccagcagtgctaccgcctcatctctgtggagcaggagtgctgcctggaccccaccagccagaccaactgcttccacgagcccaagaggcgggccctgggccctggccgcacagtgctgtttggagtgcagcccaagttcaccaacgtggacatccggctgaccctggatgtgaccttcggggctgtggacctgtatgtgtccaccagctatgacacctttgtggtgcgggtggccccagacaccggggtgcacacagtgcacatccagcccccaccagcccctcctcctcctcctcctccagcagatggcggccccagaggagctggggaccccggcggggccggggccagcagcggccctggggccccagctgagccccgggtgcgggaggtgtggccccggggcctcatcacctacgtgacagtgacagagcccagcgctgtgctggtggtgcggggcgtgcgggaccggctggtgatcacctacccccatgagcaccacgccctgaagagcagccgcttctacctgctgctgctgggcgtgggggaccccagcggccctggggccaatggatctgctgacagccagggcctgctcttcttccggcaggaccaggcccacatcgacctgtttgtgttcttcagcgtcttcttcagctgcttcttcctgttcctgagcctgtgtgtgctgctgtggaaggccaagcaggccctggaccagaggcaggagcagaggaggcacctgcaggagatgaccaagatggccagccggccctttgccaaggtgacagtgtgcttccccccagaccccacagccccagccagcgcctggaagccagctggcctgcccccaccagccttcagaagaagtgagcccttcctggcccccctgctgctgactggagctgggggcccctggggccccatgggcggcggctgctgccccccagccatcccagccaccacagctggcctgcgggccggccccatcaccctggagcccacagaagatggcatggccggcgtggccaccctgctgctgcagctgcccggcggcccccacgcccccaacggggcctgcctgggcagcgccctggtgaccctgcggcaccggctgcacgagtactgcggcggcggcggcggggccggcggcagcggccacggcaccggggccggcaggaagggcctgctgagccaggacaacctgacctccatgagcctgtag

SEQ ID NO: 160381 - DNA, 1320 bp, synthetic construct
  misc_feature 1..1320: note = Description of Artificial Sequence: Synthetic coding sequence
  source 1..1320: mol_type = other DNA
atgagggagctgcctgctggcctgctgcccccaggccgggaggtgcaccagtgtgccaagtgccgggagagcttccacggcagccccctgggcggccagcagtgctaccgcctcatctctgtggagcaggagtgctgcctggaccccaccagccagaccaactgcttccacgagcccaagagaagagccctgggccctggccgcacagtgctgtttggagtgcagcccaagttcaccaacgtggacatccggctgaccctggatgtgacctttggagctgtggacctgtatgtgtccaccagctatgacacctttgtggtgcgggtggccccagacacaggagtgcacacagtgcacatccagcccccaccagcccctcctcctcctcctcctccagcagatggcggccccaggggggccggggaccctggaggagctggggccagcagcggccctggggccccagctgagccccgggtgcgggaggtgtggccccggggcctcatcacctacgtgacagtgacagagcccagcgctgtgctggtggtgcggggcgtgcgggaccggctggtgatcacctacccccatgagcaccacgccctgaagagcagccgcttctacctgctgctgctgggcgtgggggaccccagcggccctggggccaacggcagcgctgacagccagggcctgctcttcttccggcaggaccaggcccacatcgacctgtttgtgttcttctctgtgttcttcagctgcttcttcctgttcctgagcctgtgtgtgctgctgtggaaggccaagcaggccctggaccagaggcaggagcagaggaggcacctgcaggagatgaccaagatggccagccggccctttgccaaggtgacagtgtgcttccccccagaccccacagccccagccagcgcctggaagccagctggcctgcccccaccagccttccgccgctctgagcccttcctggcccccctgctgctgaccggggccggcggcccctggggccccatgggcggcggctgctgccccccagccatcccagccaccacagctggcctgcgggccggccccatcaccctggagcccacagaagatggcatggccggcgtggccaccctgctgctgcagctgcccggcggcccccacgccccaaatggagcctgcctgggcagcgccctggtgaccctgcggcaccggctgcacgagtactgcggcggcggcggcggggccggcggcagcggccatggaactggagctggcaggaagggcctgctgagccaggacaacctgacctccatgagcctgtag

SEQ ID NO: 160382 - DNA, 1809 bp, synthetic construct
  misc_feature 1..1809: note = Description of Artificial Sequence: Synthetic coding sequence
  source 1..1809: mol_type = other DNA
atgaatggaggagctgagcgggccatgaggagcctgcccagcctgggcggcctggccctgctgtgctgtgccgctgctgctgctgctgctgctgtggccagcgctgccagcgctggaaatgtgactggaggcggcggggccgccggccaggtggatgccagccctggccctggcctgcggggggagcccagccaccccttcccccgggccacagcccccacagcccaggcccccaggacaggccccccccgggccaccgtgcaccggcccctggccgccaccagccctgcccagagccctgagaccacccccctgtgggccacagctggccccagcagcaccaccttccaggcccccctgggccccagccccaccaccccacctgctgctgagaggaccagcaccaccagccaggcccccaccaggcctgcccccaccaccctgagcaccaccaccggccctgcccccaccacccctgtggccaccaccgtgcctgcccccaccacccccaggacccccaccccagacctgcccagcagcagcaacagctctgtgctgcccaccccaccagccacagaggcccccagcagccccccaccagaatatgtgtgcaactgcagcgtggtgggcagcctgaatgtgaaccgctgcaaccagaccaccggccagtgtgaatgtcggcccggctaccagggcctgcactgtgagacctgcaaggagggcttctacctgaactacaccagcggcctgtgccagccctgtgactgcagcccccatggagccctgagcatcccctgcaacagcagcggcaagtgccagtgcaaggtgggcgtgattggcagcatctgtgaccgctgccaggacggctactacggcttcagcaagaatggctgcctgccctgccagtgcaacaacagaagtgccagctgtgatgccctgaccggggcctgcctgaactgccaggagaacagcaaaggaaaccactgtgaggagtgcaaggagggcttctaccagagcccagatgccaccaaggaatgtctgcgctgcccctgcagcgctgtgaccagcacaggcagctgcagcatcaagagcagcgagctggagccagaatgtgaccagtgcaaggatggctacatcggccccaactgcaacaagtgtgaaaatggctactacaactttgacagcatctgcaggaagtgccagtgccacggccacgtggaccctgtgaagacccccaagatctgcaagccagagagcggggagtgcatcaactgcctgcacaacaccaccggcttctggtgtgagaactgcctggagggctacgtgcatgacctggagggcaactgcatcaagaaggaggtgatcctgcccaccccagagggcagcaccatcctggtgtccaatgccagcctgaccacctctgtgcccacccctgtgatcaacagcaccttcacccccaccaccctgcagaccatcttctctgtgtccaccagcgagaacagcaccagcgccctggctgatgtgtcctggacccagttcaacatcatcatcctgaccgtcatcatcatcgtggtggtgctgctgatgggctttgtgggcgctgtgtacatgtaccgggagtaccagaacaggaagctgaatgcccccttctggaccatcgagctgaaggaggacaacatctccttcagcagctaccatgacagcatccccaatgctgatgtgtctggcctgctggaggatgatggaaatgaggtggcccccaacggccagctgaccctgaccacccccatccacaactacaaggcctag

SEQ ID NO: 160383 - DNA, 1920 bp, synthetic construct
  misc_feature 1..1920: note = Description of Artificial Sequence: Synthetic coding sequence
  source 1..1920: mol_type = other DNA
atgaggagcctgcccagcctgggcggcctggccctgctgtgctgtgccgctgctgctgctgctgctgctgtggccagcgctgccagcgctggaaatgtgactggaggcggcggggccgccggccaggtggatgccagccctggccctggcctgcggggggagcccagccaccccttcccccgggccacagcccccacagcccaggcccccaggacaggccccccccgggccaccgtgcaccggcccctggccgccaccagccctgcccagagccctgagaccacccccctgtgggccacagctggccccagcagcaccaccttccaggcccccctgggccccagccccaccaccccacctgctgctgagaggaccagcaccaccagccaggcccccaccaggcctgcccccaccaccctgagcaccaccaccggccctgcccccaccacccctgtggccaccaccgtgcctgcccccaccacccccaggacccccaccccagacctgcccagcagcagcaacagctctgtgctgcccaccccaccagccacagaggcccccagcagccccccacctggccaccagtggcctgtggccaagatgccccagaagtacctgggcaagtatgcctgtgagagcaacctgaagagcaagtacctgcccctgacccagcctgtgatgaacctgcgggtgtctgaggccgtgaagacagaatatgtgtgcaactgcagcgtggtgggcagcctgaatgtgaaccgctgcaaccagaccaccggccagtgtgagtgcaggcctggctaccagggcctgcactgtgagacctgcaaggagggcttctacctgaactacaccagcggcctgtgccagccctgtgactgcagcccccacggggccctgagcatcccctgcaacagcagcggcaagtgccagtgcaaggtgggcgtcatcggcagcatctgtgaccgctgccaggacggctactacggcttcagcaagaatggctgcctgccctgccagtgcaacaacagaagtgccagctgtgatgccctgactggagcctgcctgaactgccaggagaacagcaagggcaaccactgtgaggagtgcaaggagggcttctaccagagcccagatgccaccaaggagtgcctgcgctgcccctgcagcgctgtgaccagcacaggcagctgcagcatcaagagcagcgagctggagccagaatgtgaccagtgcaaggatggctacatcggccccaactgcaacaagtgtgaaaatggctactacaactttgacagcatctgcaggaagtgccagtgccacggccacgtggaccctgtgaagacccccaagatctgcaagccagagagcggggagtgcatcaactgcctgcacaacaccaccggcttctggtgtgagaactgcctggagggctacgtgcatgacctggagggcaactgcatcaagaaggaggtgatcctgcccaccccagagggcagcaccatcctggtgtccaatgccagcctgaccacctctgtgcccacccctgtgatcaacagcaccttcacccccaccaccctgcagaccatcttctctgtgtccaccagcgagaacagcaccagcgccctggctgatgtgtcctggacccagttcaacatcatcatcctgaccgtcatcatcatcgtggtggtgctgctgatgggctttgtgggcgctgtgtacatgtaccgggagtaccagaacaggaagctgaatgcccccttctggaccatcgagctgaaggaggacaacatctccttcagcagctaccatgacagcatccccaatgctgatgtgtctggcctgctggaggatgatggaaatgaggtggccccaaatggccagctgaccctgaccacccccatccacaactacaaggcctag

SEQ ID NO: 160384 - DNA, 939 bp, synthetic construct
  misc_feature 1..939: note = Description of Artificial Sequence: Synthetic coding sequence
  source 1..939: mol_type = other DNA
atgctgcgggcccctggctgcctgctgcggacctctgtggccccagctgctgccctggccgccgccctgctgagcagcctggcccgctgcagcctgctggagccccgggaccctgtggccagcagcctgagcccctacttcggcaccaagaccaggtatgaagatgtgaaccctgtgctgctgagcggccctgaggccccctggagggaccctgagctgctggagggcacctgcacccctgtgcagctggtggccctgatcagacatggcacccgctaccccaccgtgaagcagatcaggaagctgcggcagctgcacggcctgctgcaggcccggggcagcagagatggaggagccagcagcacaggcagccgggacctgggcgccgccctggccgactggcccctgtggtatgctgactggatggatggccagctggtggagaagggccggcaggacatgaggcagctggccctgcggctggccagcctcttccctgccctcttcagccgggagaactacggccgcctgcggctcatcaccagcagcaagcaccgctgcatggacagcagcgctgccttcctgcagggcctgtggcagcactaccaccctggcctgcccccaccagatgtggccgacatggagtttggcccccccaccgtgaatgacaagctgatgaggttctttgaccactgtgagaagttcctgacagaggtggagaagaatgccacagccctgtaccacgtggaggccttcaagacaggccctgagatgcagaacatcctgaagaaggtggccgccaccctgcaggtgcctgtgaatgacctgaatgccggcctgagccagttcctgctgcagagcagcagcagcctggtgatgcagaggctcttcttccactgcttcctgtcctgggccaccagcaagaccaggaacccctag

SEQ ID NO: 160385 - DNA, 1464 bp, synthetic construct
  misc_feature 1..1464: note = Description of Artificial Sequence: Synthetic coding sequence
  source 1..1464: mol_type = other DNA
atgctgcgggcccctggctgcctgctgcggacctctgtggccccagctgctgccctggccgccgccctgctgagcagcctggcccgctgcagcctgctggagccccgggaccctgtggccagcagcctgagcccctacttcggcaccaagaccaggtatgaagatgtgaaccctgtgctgctgagcggccctgaggccccctggagggaccctgagctgctggagggcacctgcacccctgtgcagctggtggccctgatcagacatggcacccgctaccccaccgtgaagcagatcaggaagctgcggcagctgcacggcctgctgcaggcccggggcagcagagatggaggagccagcagcacaggcagccgggacctgggcgccgccctggccgactggcccctgtggtatgctgactggatggatggccagctggtggagaagggccggcaggacatgaggcagctggccctgcggctggccagcctcttccctgccctcttcagccgggagaactacggccgcctgcggctcatcaccagcagcaagcaccgctgcatggacagcagcgctgccttcctgcagggcctgtggcagcactaccaccctggcctgcccccaccagatgtggccgacatggagtttggcccccccaccgtgaatgacaagctgatgaggttctttgaccactgtgagaagttcctgacagaggtggagaagaatgccacagccctgtaccacgtggaggccttcaagacaggccctgagatgcagaacatcctgaagaaggtggccgccaccctgcaggtgcctgtgaatgacctgaatgctgacctgatccaggtggccttcttcacctgcagctttgacctggccatcaagggcgtgaagagcccctggtgtgatgtgtttgatattgatgatgccaaggtgctggagtacctgaatgacctgaagcagtactggaagaggggctacggctacaccatcaacagccgcagcagctgcaccctcttccaggacatcttccagcacctggacaaggctgtggagcagaagcagaggagccagcccatcagcagccctgtgatcctgcagtttggacatgctgagaccctgctgcccctgctgagcctgatgggctacttcaaggacaaggagcccctgacagcctacaactacaagaagcagatgcacaggaagttccgcagcggcctcatcgtgccctatgccagcaacctgatctttgtgctgtaccactgtgaaaatgccaagacccccaaggagcagttccgggtgcagatgctgctgaatgagaaggtgctgcccctggcctacagccaggagaccgtgtccttctatgaggacctgaagaaccactacaaggacatcctgcagagctgccagaccagcgaggagtgtgagctggcccgggccaacagcaccagtgatgagctgtag

SEQ ID NO: 160386 - DNA, 861 bp, synthetic construct
  misc_feature 1..861: note = Description of Artificial Sequence: Synthetic coding sequence
  source 1..861: mol_type = other DNA
atgtgcctcttccagctgtgtggcctggtgcgctacatggagtttggaccacccaccgtgaatgacaagctgatgaggttctttgaccactgtgagaagttcctgacagaggtggagaagaatgccacagccctgtaccacgtggaggccttcaagacaggccctgagatgcagaacatcctgaagaaggtggccgccaccctgcaggtgcctgtgaatgacctgaatgctgacctgatccaggtggccttcttcacctgcagctttgacctggccatcaagggcgtgaagagcccctggtgtgatgtgtttgatattgatgatgccaaggtgctggagtacctgaatgacctgaagcagtactggaagaggggctacggctacaccatcaacagccgcagcagctgcaccctcttccaggacatcttccagcacctggacaaggctgtggagcagaagcagaggagccagcccatcagcagccctgtgatcctgcagtttggacatgctgagaccctgctgcccctgctgagcctgatgggctacttcaaggacaaggagcccctgacagcctacaactacaagaagcagatgcacaggaagttccgcagcggcctgattgtgccctatgccagcaacctgatctttgtgctgtaccactgtgaaaatgccaagacccccaaggagcagttccgggtgcagatgctgctgaatgagaaggtgctgcccctggcctacagccaggagaccgtgtccttctatgaggacctgaagaaccactacaaggacatcctgcagagctgccagaccagtgaagaatgtgagctggcccgggccaacagcaccagtgatgagctgtag

SEQ ID NO: 160387 - DNA, 1041 bp, synthetic construct
  misc_feature 1..1041: note = Description of Artificial Sequence: Synthetic coding sequence
  source 1..1041: mol_type = other DNA
atggatggccagctggtggagaagggccggcaggacatgaggcagctggccctgcggctggccagcctcttccctgccctcttcagcagagaaaattatggccgcctgcggctcatcaccagcagcaagcaccgctgcatggacagcagcgctgccttcctgcagggcctgtggcagcactaccaccctggcctgcccccaccagatgtggccgacatggagtttggaccacccaccgtgaatgacaagctgatgaggttctttgaccactgtgagaagttcctgacagaggtggagaagaatgccacagccctgtaccacgtggaggccttcaagacaggccctgagatgcagaacatcctgaagaaggtggccgccaccctgcaggtgcctgtgaatgacctgaatgctgacctgatccaggtggccttcttcacctgcagctttgacctggccatcaagggcgtgaagagcccctggtgtgatgtgtttgatattgatgatgccaaggtgctggagtacctgaatgacctgaagcagtactggaagaggggctacggctacaccatcaacagccgcagcagctgcaccctcttccaggacatcttccagcacctggacaaggctgtggagcagaagcagaggagccagcccatcagcagccctgtgatcctgcagtttggacatgctgagaccctgctgcccctgctgagcctgatgggctacttcaaggacaaggagcccctgacagcctacaactacaagaagcagatgcacaggaagttccgcagcggcctgattgtgccctatgccagcaacctgatctttgtgctgtaccactgtgaaaatgccaagacccccaaggagcagttccgggtgcagatgctgctgaatgagaaggtgctgcccctggcctacagccaggagaccgtgtccttctatgaggacctgaagaaccactacaaggacatcctgcagagctgccagaccagtgaagaatgtgagctggcccgggccaacagcaccagtgatgagctgtag

SEQ ID NO: 160388 - DNA, 6213 bp, synthetic construct
  misc_feature 1..6213: note = Description of Artificial Sequence: Synthetic coding sequence
  source 1..6213: mol_type = other DNA
atgctggaggccatcgacaagaacagagccctgcatgctgctgagcggctgcagaccaagctgcgggagagaggagatgtggccaatgaagacaagctgagcctgctgaagtctgtgctgcagagccccctcttcagccagatcctgagcctgcagacctctgtgcagcagctgaaggaccaggtgaacatcgccaccagcgccaccagcaacatcgagtatgcccacgtgccccacctgagccctgctgtgatccccaccctgcagaatgaaagcttcctgctgagccccaacaatggaaacctggaggccctgaccggccctggcatcccccacatcaacgggaagccagcctgtgatgaatttgaccagctgatcaagaacatggcccagggccgccacgtggaggtgtttgagctgctgaagcccccatctgggggcctgggcttctctgtggtgggcctgcggtctgagaacagaggagagctgggcatctttgtgcaggagatccaggagggctctgtggcccacagagatggccgcctgaaggagacagaccagatcctggccatcaatggccaggccctggaccagaccatcacccaccagcaggccatcagcatcctgcagaaggccaaggacacagtgcagctggtgattgcccggggcagcctgccccagctggtgagccccatcgtgagccgcagccccagcgctgccagcaccatcagcgcccacagcaaccctgtgcactggcagcacatggagaccatcgagctggtgaatgatggcagcggcctgggcttcggcatcatcggcggcaaggccactggagtcatcgtgaagaccatcctgcccggcggcgtggccgaccagcacggccgcctgtgcagcggggaccacatcctgaagattggagacacagacctggccggcatgagcagcgagcaggtggcccaggtgctgcggcagtgtggcaacagagtgaagctgatgattgcccggggggccatcgaggagaggacagcccccacagccctgggcatcaccctgagcagcagccccaccagcaccccagagctgcgggtggatgccagcacccagaagggggaggagagcgagacctttgatgtggagctgaccaagaatgtgcagggcctgggcatcaccatcgccggctacatcggggacaagaagctggagcccagcggcatctttgtgaagagcatcaccaagagcagcgctgtggagcatgatggccgcatccagatcggggaccagatcatcgctgtggatggcaccaacctgcagggcttcaccaaccagcaggccgtggaggtgctgcggcacacaggccagacagtgctgctgaccctgatgagaagaggcatgaagcaggaggccgagctgatgagccgggaggatgtgaccaaggatgctgacctgagccctgtgaatgccagcatcatcaaggagaactatgagaaggatgaggacttcctgagcagcaccaggaacaccaacatcctgcccacagaggaggagggctaccccctgctgtctgctgagattgaggagattgaagatgcccagaagcaggaggccgccctgctgaccaagtggcagaggatcatgggcatcaactatgaaattgtggtggcccacgtgtccaagttctctgaaaattctggcctgggcatcagcctggaggccaccgtgggccaccacttcatccgctctgtgctgcctgagggccctgtgggccacagcggcaagctgttctctggagatgagctgctggaggtgaatggcatcaccctgctgggggagaaccaccaggatgtggtgaacatcctgaaggagctgcccatcgaggtgaccatggtgtgctgcagaagaacagtgccccccaccacccagagcgagctggacagcctggacctgtgtgacatcgagctgacagagaagccccacgtggacctgggggagttcatcggcagcagcgagacagaagatcctgtgctggccatgacagatgctggccagagcacagaggaggtgcaggcccccctggccatgtgggaggccggcatccagcacatcgagctggagaagggcagcaagggcctgggcttcagcatcctggactaccaggaccccattgatcctgccagcaccgtcatcatcatccgcagcctggtgcctgggggcattgctgagaaggatggccgcctgctgcccggggaccggctgatgtttgtgaatgatgtgaacctggagaacagcagcctggaggaggccgtggaggccctgaagggggcccccagcggcaccgtgagaattggagtggccaagcccctgcccctgagccctgaggagggctacgtgtctgccaaggaggacagcttcctgtacccaccccacagctgtgaggaggccggcctggccgacaagcccctcttccgggctgacctggccctggtgggcaccaatgatgctgacctggtggatgagagcacctttgagagcccctacagcccagaaaatgacagcatctacagcacccaggccagcatcctgagcctgcacggcagcagctgtggagatggcctgaactacggcagcagcctgcccagcagcccccccaaggatgtgattgagaacagctgtgaccctgtgctggacctgcacatgagcctggaggagctgtacacccagaacctgctgcagaggcaggatgagaacacccccagcgtggacatctccatgggccctgccagcggcttcaccatcaatgactacaccccagccaatgccatcgagcagcagtatgaatgtgagaacaccatcgtgtggacagagagccacctgcccagcgaggtgatcagcagcgctgagctgcccagcgtgctgcctgacagcgctggaaaaggaagtgagtacctgctggagcagagcagcctggcctgcaatgcagaatgtgtgatgctgcagaatgtgtccaaggagagctttgagaggaccatcaacatcgccaagggcaacagcagcctgggcatgacagtgtctgccaacaaggatggcctgggcatgattgtgcgcagcatcatccacggcggggccatcagcagagatggccgcatcgccatcggggactgcatcctgagcatcaatgaggagagcaccatctctgtgaccaatgcccaggcccgggccatgctgcggcggcacagcctcatcggccctgacatcaagatcacctacgtgcctgctgagcacctggaggagttcaagatcagcctgggccagcagagcggccgggtgatggccctggacatcttcagcagctacacaggccgggacatccctgagctgcctgagcgggaggagggggagggggaggagagcgagctgcagaacacagcctacagcaactggaaccagccccggcgggtggagctgtggagggagcccagcaagagcctgggcatcagcatcgtgggcggccggggcatgggcagccggctgagcaatggagaggtgatgaggggcatcttcatcaagcacgtgctggaggacagccctgctgggaagaatggcaccctgaagccaggggaccgcatcgtggaggtggatggcatggacctgagagatgccagccatgagcaggccgtggaggccatcaggaaggccggcaaccctgtggtgttcatggtgcagagcatcatcaaccggcccaggaagagccccctgcccagcctgctgcacaacctgtaccccaagtacaacttcagcagcaccaacccctttgctgacagcctgcagatcaatgctgacaaggcccccagccagagcgagagcgagcctgagaaggcccccctgtgcagcgtgcccccacctcctccttctgcctttgctgagatgggcagtgaccacacccagagcagcgccagcaagatcagccaggatgtggacaaggaggatgaatttggctacagctggaagaacatccgggagagatatggcaccctgactggagagctgcacatgattgagctggagaagggccacagcggcctgggcctgagcctggccggcaacaaggacaggagcaggatgtctgtgttcatcgtgggcatcgaccccaatggagctgctgggaaggatggccgcctgcagattgctgatgagctgctggagatcaatggccagatcctgtatggccgcagccaccagaatgccagcagcatcatcaagtgtgcccccagcaaggtgaagatcatcttcatccggaacaaggatgctgtgaaccagatggctgtgtgccctggaaatgctgtggagcccctgcccagcaacagcgagaacctgcagaacaaggagacagagcccaccgtgaccaccagtgatgctgctgtggacctgagcagcttcaagaatgtgcagcacctggagctgcccaaggaccagggcggcctgggcatcgccatcagcgaggaggacaccctgagcggggtcatcatcaagagcctgacagagcacggcgtggccgccacagatggccgcctgaaggtgggggaccagatcctggccgtggatgatgagatcgtggtgggctaccccatcgagaagttcatcagcctgctgaagacagccaagatgacagtgaagctgaccatccacgcagaaaatccagacagccaggccgtgcccagcgctgctggggccgccagcggggagaagaagaacagcagccagagcctgatggtgccccagagcggcagccctgagcctgagagcatccggaacaccagccgcagcagcaccccagccatctttgccagtgaccctgccacctgccccatcatccctggctgtgagaccaccatcgagatcagcaagggccgcacaggcctgggcctgagcatcgtgggcggcagtgacaccctgctgggcgccatcatcatccacgaggtgtatgaggagggcgccgcctgcaaggatggccgcctgtgggccggggaccagatcctggaggtgaatggaattgacctgaggaaggccacccatgatgaggccatcaacgtgctgcggcagaccccccagagggtgcggctgaccctgtacagagatgaggccccctacaaggaggaggaggtgtgtgacaccctgaccatcgagctgcagaagaagccaggcaagggcctgggcctgagcatcgtgggcaagagaaatgacacaggagtgtttgtgtctgacatcgtgaagggcggcattgctgatgctgatggccgcctgatgcagggcgaccagatcctgatggtgaatggagaagatgtgagaaatgccacccaggaggccgtggccgccctgctgaagtgcagcctgggcaccgtgaccctggaggtgggccgcatcaaggccggccccttccacagcgagcggcggcccagccagagcagccaggtgtctgagggcagcctgagcagcttcaccttccccctgagcggcagcagcaccagcgagagcctggagagcagcagcaagaagaatgccctggccagcgagatccagggcctgaggacagtggagatgaagaagggccccacagacagcctgggcatcagcattgctgggggcgtgggcagccccctgggagatgtgcccatcttcatcgccatgatgcaccccaccggggtggccgcccagacccagaagctgcgggtgggggacagaattgtgaccatctgtggcaccagcacagagggcatgacccacacccaggccgtgaacctgctgaagaatgccagcggcagcattgagatgcaggtggtggccggaggagatgtgtctgtggtgacaggccaccagcaggagcccgccagcagcagcctgtccttcaccggcctgaccagcagcagcatcttccaggatgacctgggccccccccagtgcaagagcatcaccctggagcggggcccagatggcctgggcttcagcatcgtgggcggctacggcagcccccatggagacctgcccatctacgtgaagacagtgtttgccaagggggccgcctctgaagatggccgcctgaagagaggagaccagatcatcgctgtgaatggccagagcctggagggcgtgacccatgaggaggccgtggccatcctgaagaggaccaagggcaccgtgaccctgatggtgctgtcctag

SEQ ID NO: 160389 - DNA, 6213 bp, synthetic construct; identical to SEQ ID NO: 160388
  misc_feature 1..6213: note = Description of Artificial Sequence: Synthetic coding sequence
  source 1..6213: mol_type = other DNA

SEQ ID NO: 160390 - DNA, 6126 bp, synthetic construct
  misc_feature 1..6126: note = Description of Artificial Sequence: Synthetic coding sequence
  source 1..6126: mol_type = other DNA
atgctggaggccatcgacaagaacagagccctgcatgctgctgagcggctgcagaccaagctgcgggagagaggagatgtggccaatgaagacaagctgagcctgctgaagtctgtgctgcagagccccctcttcagccagatcctgagcctgcagacctctgtgcagcagctgaaggaccaggtgaacatcgccaccagcgccaccagcaacatcgagtatgcccacgtgccccacctgagccctgctgtgatccccaccctgcagaatgaaagcttcctgctgagccccaacaatggaaacctggaggccctgaccggccctggcatcccccacatcaacgggaagccagcctgtgatgaatttgaccagctgatcaagaacatggcccagggccgccacgtggaggtgtttgagctgctgaagcccccatctgggggcctgggcttctctgtggtgggcctgcggtctgagaacagaggagagctgggcatctttgtgcaggagatccaggagggctctgtggcccacagagatggccgcctgaaggagacagaccagatcctggccatcaatggccaggccctggaccagaccatcacccaccagcaggccatcagcatcctgcagaaggccaaggacacagtgcagctggtgattgcccggggcagcctgccccagctggtgagccccatcgtgagccgcagccccagcgctgccagcaccatcagcgcccacagcaaccctgtgcactggcagcacatggagaccatcgagctggtgaatgatggcagcggcctgggcttcggcatcatcggcggcaaggccactggagtcatcgtgaagaccatcctgcccggcggcgtggccgaccagcacggccgcctgtgcagcggggaccacatcctgaagattggagacacagacctggccggcatgagcagcgagcaggtggcccaggtgctgcggcagtgtggcaacagagtgaagctgatgattgcccggggggccatcgaggagaggacagcccccacagccctgggcatcaccctgagcagcagccccaccagcaccccagagctgcgggtggatgccagcacccagaagggggaggagagcgagacctttgatgtggagctgaccaagaatgtgcagggcctgggcatcaccatcgccggctacatcggggacaagaagctggagcccagcggcatctttgtgaagagcatcaccaagagcagcgctgtggagcatgatggccgcatccagatcggggaccagatcatcgctgtggatggcaccaacctgcagggcttcaccaaccagcaggccgtggaggtgctgcggcacacaggccagacagtgctgctgaccctgatgagaagaggcatgaagcaggaggccgagctgatgagccgggaggatgtgaccaaggatgctgacctgagccctgtgaatgccagcatcatcaaggagaactatgagaaggatgaggacttcctgagcagcaccaggaacaccaacatcctgcccacagaggaggagggctaccccctgctgtctgctgagattgaggagattgaagatgcccagaagcaggaggccgccctgctgaccaagtggcagaggatcatgggcatcaactatgaaattgtggtggcccacgtgtccaagttctctgaaaattctggcctgggcatcagcctggaggccaccgtgggccaccacttcatccgctctgtgctgcctgagggccctgtgggccacagcggcaagctgttctctggagatgagctgctggaggtgaatggcatcaccctgctgggggagaaccaccaggatgtggtgaacatcctgaaggagctgcccatcgaggtgaccatggtgtgctgcagaagaacagtgccccccaccacccagagcgagctggacagcctggacctgtgtgacatcgagctgacagagaagccccacgtggacctgggggagttcatcggcagcagcgagacagaagatcctgtgctggccatgacagatgctggccagagcacagaggaggtgcaggcccccctggccatgtgggaggccggcatccagcacatcgagctggagaagggcagcaagggcctgggcttcagcatcctggactaccaggaccccattgatcctgccagcaccgtcatcatcatccgcagcctggtgcctgggggcattgctgagaaggatggccgcctgctgcccggggaccggctgatgtttgtgaatgatgtgaacctggagaacagcagcctggaggaggccgtggaggccctgaagggggcccccagcggcaccgtgagaattggagtggccaagcccctgcccctgagccctgaggagggctacgtgtctgccaaggaggacagcttcctgtacccaccccacagctgtgaggaggccggcctggccgacaagcccctcttccgggctgacctggccctggtgggcaccaatgatgctgacctggtggatgagagcacctttgagagcccctacagcccagaaaatgacagcatctacagcacccaggccagcatcctgagcctgcacggcagcagctgtggagatggcctgaactacggcagcagcctgcccagcagcccccccaaggatgtgattgagaacagctgtgaccctgtgctggacctgcacatgagcctggaggagctgtacacccagaacctgctgcagaggcaggatgagaacacccccagcgtggacatctccatgggccctgccagcggcttcaccatcaatgactacaccccagccaatgccatcgagcagcagtatgaatgtgagaacaccatcgtgtggacagagagccacctgcccagcgaggtgatcagcagcgctgagctgcccagcgtgctgcctgacagcgctggaaaaggaagtgagtacctgctggagcagagcagcctggcctgcaatgcagaatgtgtgatgctgcagaatgtgtccaaggagagctttgagaggaccatcaacatcgccaagggcaacagcagcctgggcatgacagtgtctgccaacaaggatggcctgggcatgattgtgcgcagcatcatccacggcggggccatcagcagagatggccgcatcgccatcggggactgcatcctgagcatcaatgaggagagcaccatctctgtgaccaatgcccaggcccgggccatgctgcggcggcacagcctcatcggccctgacatcaagatcacctacgtgcctgctgagcacctggaggagttcaagatcagcctgggccagcagagcggccgggtgatggccctggacatcttcagcagctacacaggccgggacatccctgagctgcctgagcgggaggagggggagggggaggagagcgagctgcagaacacagcctacagcaactggaaccagccccggcgggtggagctgtggagggagcccagcaagagcctgggcatcagcatcgtgggcggccggggcatgggcagccggctgagcaatggagaggtgatgaggggcatcttcatcaagcacgtgctggaggacagccctgctgggaagaatggcaccctgaagccaggggaccgcatcgtggaggtggatggcatggacctgagagatgccagccatgagcaggccgtggaggccatcaggaaggccggcaaccctgtggtgttcatggtgcagagcatcatcaaccggcccaggaagagccccctgcccagcctgctgcacaacctgtaccccaagtacaacttcagcagcaccaacccctttgctgacagcctgcagatcaatgctgacaaggcccccagccagagcgagagcgagcctgagaaggcccccctgtgcagcgtgcccccacctcctccttctgcctttgctgagatgggcagtgaccacacccagagcagcgccagcaagatcagccaggatgtggacaaggaggatgaatttggctacagctggaagaacatccgggagagatatggcaccctgactggagagctgcacatgattgagctggagaagggccacagcggcctgggcctgagcctggccggcaacaaggacaggagcaggatgtctgtgttcatcgtgggcatcgaccccaatggagctgctgggaaggatggccgcctgcagattgctgatgagctgctggagatcaatggccagatcctgtatggccgcagccaccagaatgccagcagcatcatcaagtgtgcccccagcaaggtgaagatcatcttcatccggaacaaggatgctgtgaaccagatggctgtgtgccctggaaatgctgtggagcccctgcccagcaacagcgagaacctgcagaacaaggagacagagcccaccgtgaccaccagtgatgctgctgtggacctgagcagcttcaagaatgtgcagcacctggagctgcccaaggaccagggcggcctgggcatcgccatcagcgaggaggacaccctgagcggggtcatcatcaagagcctgacagagcacggcgtggccgccacagatggccgcctgaaggtgggggaccagatcctggccgtggatgatgagatcgtggtgggctaccccatcgagaagttcatcagcctgctgaagacagccaagatgacagtgaagctgaccatccacgcagaaaatccagacagccaggccgtgcccagcgctgctggggccgccagcggggagaagaagaacagcagccagagcctgatggtgccccagagcggcagccctgagcctgagagcatccggaacaccagccgcagcagcaccccagccatctttgccagtgaccctgccacctgccccatcatccctggctgtgagaccaccatcgagatcagcaagggccgcacaggcctgggcctgagcatcgtgggcggcagtgacaccctgctgggcgccatcatcatccacgaggtgtatgaggagggcgccgcctgcaaggatggccgcctgtgggccggggaccagatcctggaggtgaatggaattgacctgaggaaggccacccatgatgaggccatcaacgtgctgcggcagaccccccagagggtgcggctgaccctgtacagagatgaggccccctacaaggaggaggaggtgtgtgacaccctgaccatcgagctgcagaagaagccaggcaagggcctgggcctgagcatcgtgggcaagagaaatgacacaggagtgtttgtgtctgacatcgtgaagggcggcattgctgatgctgatggccgcctgatgcagggcgaccagatcctgatggtgaatggagaagatgtgagaaatgccacccaggaggccgtggccgccctgctgaaggtgtctgagggcagcctgagcagcttcaccttccccctgagcggcagcagcaccagcgagagcctggagagcagcagcaagaagaatgccctggccagcgagatccagggcctgaggacagtggagatgaagaagggccccacagacagcctgggcatcagcattgctggaggagtgggcagccccctgggagatgtgcccatcttcatcgccatgatgcaccccactggagtggccgcccagacccagaagctgcgggtgggggaccgcatcgtgaccatctgtggcaccagcacagagggcatgacccacacccaggccgtgaacctgctgaagaatgccagcggcagcattgagatgcaggtggtggccggaggagatgtgtctgtggtgacaggccaccagcaggagcccgccagcagcagcctgtccttcaccggcctgaccagcagcagcatcttccaggatgacctgggccccccccagtgcaagagcatcaccctggagcggggcccagatggcctgggcttcagcatcgtgggcggctacggcagcccccacggggacctgcccatctacgtgaagacagtgtttgccaagggagctgcctctgaagatggccgcctgaagagaggagaccagatcatcgctgtgaatggccagagcctggagggcgtgacccatgaggaggccgtggccatcctgaagaggaccaagggcaccgtgaccctgatggtgctgtcctag

SEQ ID NO: 160391 - DNA, 5853 bp, synthetic construct
  misc_feature 1..5853: note = Description of Artificial Sequence: Synthetic coding sequence
  source 1..5853: mol_type = other DNA
atgctggaggccatcgacaagaacagagccctgcatgctgctgagcggctgcagaccaagctgcgggagagaggagatgtggccaatgaagacaagctgagcctgctgaagtctgtgctgcagagccccctcttcagccagatcctgagcctgcagacctctgtgcagcagctgaaggaccaggtgaacatcgccaccagcgccaccagcaacatcgagtatgcccacgtgccccacctgagccctgctgtgatccccaccctgcagaatgaaagcttcctgctgagccccaacaatggaaacctggaggccctgaccggccctggcatcccccacatcaacgggaagccagcctgtgatgaatttgaccagctgatcaagaacatggcccagggccgccacgtggaggtgtttgagctgctgaagcccccatctgggggcctgggcttctctgtggtgggcctgcggtctgagaacagaggagagctgggcatctttgtgcaggagatccaggagggctctgtggcccacagagatggccgcctgaaggagacagaccagatcctggccatcaatggccaggccctggaccagaccatcacccaccagcaggccatcagcatcctgcagaaggccaaggacacagtgcagctggtgattgcccggggcagcctgccccagctggtgagccccatcgtgagccgcagccccagcgctgccagcaccatcagcgcccacagcaaccctgtgcactggcagcacatggagaccatcgagctggtgaatgatggcagcggcctgggcttcggcatcatcggcggcaaggccactggagtcatcgtgaagaccatcctgcccggcggcgtggccgaccagcacggccgcctgtgcagcggggaccacatcctgaagattggagacacagacctggccggcatgagcagcgagcaggtggcccaggtgctgcggcagtgtggcaacagagtgaagctgatgattgcccggggggccatcgaggagaggacagcccccacagccctgggcatcaccctgagcagcagccccaccagcaccccagagctgcgggtggatgccagcacccagaagggggaggagagcgagacctttgatgtggagctgaccaagaatgtgcagggcctgggcatcaccatcgccggctacatcggggacaagaagctggagcccagcggcatctttgtgaagagcatcaccaagagcagcgctgtggagcatgatggccgcatccagatcggggaccagatcatcgctgtggatggcaccaacctgcagggcttcaccaaccagcaggccgtggaggtgctgcggcacacaggccagacagtgctgctgaccctgatgagaagaggcatgaagcaggaggccgagctgatgagccgggaggatgtgaccaaggatgctgacctgagccctgtgaatgccagcatcatcaaggagaactatgagaaggatgaggacttcctgagcagcaccaggaacaccaacatcctgcccacagaggaggagggctaccccctgctgtctgctgagattgaggagattgaagatgcccagaagcaggaggccgccctgctgaccaagtggcagaggatcatgggcatcaactatgaaattgtggtggcccacgtgtccaagttctctgaaaattctggcctgggcatcagcctggaggccaccgtgggccaccacttcatccgctctgtgctgcctgagggccctgtgggccacagcggcaagctgttctctggagatgagctgctggaggtgaatggcatcaccctgctgggggagaaccaccaggatgtggtgaacatcctgaaggagctgcccatcgaggtgaccatggtgtgctgcagaagaacagtgccccccaccacccagagcgagctggacagcctgggcatccagcacatcgagctggagaagggcagcaagggcctgggcttcagcatcctggactaccaggaccccattgatcctgccagcaccgtcatcatcatccgcagcctggtgcctgggggcattgctgagaaggatggccgcctgctgcccggggaccggctgatgtttgtgaatgatgtgaacctggagaacagcagcctggaggaggccgtggaggccctgaagggggcccccagcggcaccgtgagaattggagtggccaagcccctgcccctgagccctgaggagggctacgtgtctgccaaggaggacagcttcctgtacccaccccacagctgtgaggaggccggcctggccgacaagcccctcttccgggctgacctggccctggtgggcaccaatgatgctgacctggtggatgagagcacctttgagagcccctacagcccagaaaatgacagcatctacagcacccaggccagcatcctgagcctgcacggcagcagctgtggagatggcctgaactacggcagcagcctgcccagcagcccccccaaggatgtgattgagaacagctgtgaccctgtgctggacctgcacatgagcctggaggagctgtacacccagaacctgctgcagaggcaggatgagaacacccccagcgtggacatctccatgggccctgccagcggcttcaccatcaatgactacaccccagccaatgccatcgagcagcagtatgaatgtgagaacaccatcgtgtggacagagagccacctgcccagcgaggtgatcagcagcgctgagctgcccagcgtgctgcctgacagcgctggaaaaggaagtgagtacctgctggagcagagcagcctggcctgcaatgcagaatgtgtgatgctgcagaatgtgtccaaggagagctttgagaggaccatcaacatcgccaagggcaacagcagcctgggcatgacagtgtctgccaacaaggatggcctgggcatgattgtgcgcagcatcatccacggcggggccatcagcagagatggccgcatcgccatcggggactgcatcctgagcatcaatgaggagagcaccatctctgtgaccaatgcccaggcccgggccatgctgcggcggcacagcctcatcggccctgacatcaagatcacctacgtgcctgctgagcacctggaggagttcaagatcagcctgggccagcagagcggccgggtgatggccctggacatcttcagcagctacacaggccgggacatccctgagctgcctgagcgggaggagggggagggggaggagagcgagctgcagaacacagcctacagcaactggaaccagccccggcgggtggagctgtggagggagcccagcaagagcctgggcatcagcatcgtgggcggccggggcatgggcagccggctgagcaatggagaggtgatgaggggcatcttcatcaagcacgtgctggaggacagccctgctgggaagaatggcaccctgaagccaggggaccgcatcgtggaggcccccagccagagcgagagcgagcctgagaaggcccccctgtgcagcgtgcccccacctcctccttctgcctttgctgagatgggcagtgaccacacccagagcagcgccagcaagatcagccaggatgtggacaaggaggatgaatttggctacagctggaagaacatccgggagagatatggcaccctgactggagagctgcacatgattgagctggagaagggccacagcggcctgggcctgagcctggccggcaacaaggacaggagcaggatgtctgtgttcatcgtgggcatcgaccccaatggagctgctgggaaggatggccgcctgcagattgctgatgagctgctggagatcaatggccagatcctgtatggccgcagccaccagaatgccagcagcatcatcaagtgtgcccccagcaaggtgaagatcatcttcatccggaacaaggatgctgtgaaccagatggctgtgtgccctggaaatgctgtggagcccctgcccagcaacagcgagaacctgcagaacaaggagacagagcccaccgtgaccaccagtgatgctgctgtggacctgagcagcttcaagaatgtgcagcacctggagctgcccaaggaccagggcggcctgggcatcgccatcagcgaggaggacaccctgagcggggtcatcatcaagagcctgacagagcacggcgtggccgccacagatggccgcctgaaggtgggggaccagatcctggccgtggatgatgagatcgtggtgggctaccccatcgagaagttcatcagcctgctgaagacagccaagatgacagtgaagctgaccatccacgcagaaaatccagacagccaggccgtgcccagcgctgctggggccgccagcggggagaagaagaacagcagccagagcctgatggtgccccagagcggcagccctgagcctgagagcatccggaacaccagccgcagcagcaccccagccatctttgccagtgaccctgccacctgccccatcatccctggctgtgagaccaccatcgagatcagcaagggccgcacaggcctgggcctgagcatcgtgggcggcagtgacaccctgctgggcgccatcatcatccacgaggtgtatgaggagggcgccgcctgcaaggatggccgcctgtgggccggggaccagatcctggaggtgaatggaattgacctgaggaaggccacccatgatgaggccatcaacgtgctgcggcagaccccccagagggtgcggctgaccctgtacagagatgaggccccctacaaggaggaggaggtgtgtgacaccctgaccatcgagctgcagaagaagccaggcaagggcctgggcctgagcatcgtgggcaagagaaatgacacaggagtgtttgtgtctgacatcgtgaagggcggcattgctgatgctgatggccgcctgatgcagggcgaccagatcctgatggtgaatggagaagatgtgagaaatgccacccaggaggccgtggccgccctgctgaagtgcagcctgggcaccgtgaccctggaggtgggccgcatcaaggccggccccttccacagcgagcggcggcccagccagagcagccaggtgtctgagggcagcctgagcagcttcaccttccccctgagcggcagcagcaccagcgagagcctggagagcagcagcaagaagaatgccctggccagcgagatccagggcctgaggacagtggagatgaagaagggccccacagacagcctgggcatcagcattgctgggggcgtgggcagccccctgggagatgtgcccatcttcatcgccatgatgcaccccaccggggtggccgcccagacccagaagctgcgggtgggggacagaattgtgaccatctgtggcaccagcacagagggcatgacccacacccaggccgtgaacctgctgaagaatgccagcggcagcattgagatgcaggtggtggccggaggagatgtgtctgtggtgacaggccaccagcaggagcccgccagcagcagcctgtccttcaccggcctgaccagcagcagcatcttccaggatgacctgggccccccccagtgcaagagcatcaccctggagcggggcccagatggcctgggcttcagcatcgtgggcggctacggcagcccccatggagacctgcccatctacgtgaagacagtgtttgccaagggggccgcctctgaagatggccgcctgaagagaggagaccagatcatcgctgtgaatggccagagcctggagggcgtgacccatgaggaggccgtggccatcctgaagaggaccaagggcaccgtgaccctgatggtgctgtcctag

SEQ ID NO: 160392 - DNA, 915 bp, synthetic construct
  misc_feature 1..915: note = Description of Artificial Sequence: Synthetic coding sequence
  source 1..915: mol_type = other DNA
atgcagggcgaccagatcctgatggtgaatggagaagatgtgagaaatgccacccaggaggccgtggccgccctgctgaagtgcagcctgggcaccgtgaccctggaggtgggccgcatcaaggccggccccttccacagcgagcggcggcccagccagagcagccaggtgtctgagggcagcctgagcagcttcaccttccccctgagcggcagcagcaccagcgagagcctggagagcagcagcaagaagaatgccctggccagcgagatccagggcctgaggacagtggagatgaagaagggccccacagacagcctgggcatcagcattgctgggggcgtgggcagccccctgggagatgtgcccatcttcatcgccatgatgcaccccaccggggtggccgcccagacccagaagctgcgggtgggggacagaattgtgaccatctgtggcaccagcacagagggcatgacccacacccaggccgtgaacctgctgaagaatgccagcggcagcattgagatgcaggtggtggccggaggagatgtgtctgtggtgacaggccaccagcaggagcccgccagcagcagcctgtccttcaccggcctgaccagcagcagcatcttccaggatgacctgggccccccccagtgcaagagcatcaccctggagcggggcccagatggcctgggcttcagcatcgtgggcggctacggcagcccccatggagacctgcccatctacgtgaagacagtgtttgccaagggggccgcctctgaagatggccgcctgaagagaggagaccagatcatcgctgtgaatggccagagcctggagggcgtgacccatgaggaggccgtggccatcctgaagaggaccaagggcaccgtgaccctgatggtgctgtcctag

SEQ ID NO: 160393 - DNA, 6126 bp, synthetic construct; identical to SEQ ID NO: 160390
  misc_feature 1..6126: note = Description of Artificial Sequence: Synthetic coding sequence
  source 1..6126: mol_type = other DNA

SEQ ID NO: 160394 - DNA, 6114 bp, synthetic construct
  misc_feature 1..6114: note = Description of Artificial Sequence: Synthetic coding sequence
  source 1..6114: mol_type = other DNA
atgctggaggccatcgacaagaacagagccctgcatgctgctgagcggctgcagaccaagctgcgggagagaggagatgtggccaatgaagacaagctgagcctgctgaagtctgtgctgcagagccccctcttcagccagatcctgagcctgcagacctctgtgcagcagctgaaggaccaggtgaacatcgccaccagcgccaccagcaacatcgagtatgcccacgtgccccacctgagccctgctgtgatccccaccctgcagaatgaaagcttcctgctgagccccaacaatggaaacctggaggccctgaccggccctggcatcccccacatcaacgggaagccagcctgtgatgaatttgaccagctgatcaagaacatggcccagggccgccacgtggaggtgtttgagctgctgaagcccccatctgggggcctgggcttctctgtggtgggcctgcggtctgagaacagaggagagctgggcatctttgtgcaggagatccaggagggctctgtggcccacagagatggccgcctgaaggagacagaccagatcctggccatcaatggccaggccctggaccagaccatcacccaccagcaggccatcagcatcctgcagaaggccaaggacacagtgcagctggtgattgcccggggcagcctgccccagctggtgagccccatcgtgagccgcagccccagcgctgccagcaccatcagcgcccacagcaaccctgtgcactggcagcacatggagaccatcgagctggtgaatgatggcagcggcctgggcttcggcatcatcggcggcaaggccactggagtcatcgtgaagaccatcctgcccggcggcgtggccgaccagcacggccgcctgtgcagcggggaccacatcctgaagattggagacacagacctggccggcatgagcagcgagcaggtggcccaggtgctgcggcagtgtggcaacagagtgaagctgatgattgcccggggggccatcgaggagaggacagcccccacagccctgggcatcaccctgagcagcagccccaccagcaccccagagctgcgggtggatgccagcacccagaagggggaggagagcgagacctttgatgtggagctgaccaagaatgtgcagggcctgggcatcaccatcgccggctacatcggggacaagaagctggagcccagcggcatctttgtgaagagcatcaccaagagcagcgctgtggagcatgatggccgcatccagatcggggaccagatcatcgctgtggatggcaccaacctgcagggcttcaccaaccagcaggccgtggaggtgctgcggcacacaggccagacagtgctgctgaccctgatgagaagaggcatgaagcaggaggccgagctgatgagccgggaggatgtgaccaaggatgctgacctgagccctgtgaatgccagcatcatcaaggagaactatgagaaggatgaggacttcctgagcagcaccaggaacaccaacatcctgcccacagaggaggagggctaccccctgctgtctgctgagattgaggagattgaagatgcccagaagcaggaggccgccctgctgaccaagtggcagaggatcatgggcatcaactatgaaattgtggtggcccacgtgtccaagttctctgaaaattctggcctgggcatcagcctggaggccaccgtgggccaccacttcatccgctctgtgctgcctgagggccctgtgggccacagcggcaagctgttctctggagatgagctgctggaggtgaatggcatcaccctgctgggggagaaccaccaggatgtggtgaacatcctgaaggagctgcccatcgaggtgaccatggtgtgctgcagaagaacagtgccccccaccacccagagcgagctggacagcctggacctgtgtgacatcgagctgacagagaagccccacgtggacctgggggagttcatcggcagcagcgagacagaagatcctgtgctggccatgacagatgctggccagagcacagaggaggtgcaggcccccctggccatgtgggaggccggcatccagcacatcgagctggagaagggcagcaagggcctgggcttcagcatcctggactaccaggaccccattgatcctgccagcaccgtcatcatcatccgcagcctggtgcctgggggcattgctgagaaggatggccgcctgctgcccggggaccggctgatgtttgtgaatgatgtgaacctggagaacagcagcctggaggaggccgtggaggccctgaagggggcccccagcggcaccgtgagaattggagtggccaagcccctgcccctgagccctgaggagggctacgtgtctgccaaggaggacagcttcctgtacccaccccacagctgtgaggaggccggcctggccgacaagcccctcttccgggctgacctggccctggtgggcaccaatgatgctgacctggtggatgagagcacctttgagagcccctacagcccagaaaatgacagcatctacagcacccaggccagcatcctgagcctgcacggcagcagctgtggagatggcctgaactacggcagcagcctgcccagcagcccccccaaggatgtgattgagaacagctgtgaccctgtgctggacctgcacatgagcctggaggagctgtacacccagaacctgctgcagaggcaggatgagaacacccccagcgtggacatctccatgggccctgccagcggcttcaccatcaatgactacaccccagccaatgccatcgagcagcagtatgaatgtgagaacaccatcgtgtggacagagagccacctgcccagcgaggtgatcagcagcgctgagctgcccagcgtgctgcctgacagcgctggaaaaggaagtgagtacctgctggagcagagcagcctggcctgcaatgcagaatgtgtgatgctgcagaatgtgtccaaggagagctttgagaggaccatcaacatcgccaagggcaacagcagcctgggcatgacagtgtctgccaacaaggatggcctgggcatgattgtgcgcagcatcatccacggcggggccatcagcagagatggccgcatcgccatcggggactgcatcctgagcatcaatgaggagagcaccatctctgtgaccaatgcccaggcccgggccatgctgcggcggcacagcctcatcggccctgacatcaagatcacctacgtgcctgctgagcacctggaggagttcaagatcagcctgggccagcagagcggccgggtgatggccctggacatcttcagcagctacacaggccgggacatccctgagctgcctgagcgggaggagggggagggggaggagagcgagctgcagaacacagcctacagcaactggaaccagccccggcgggtggagctgtggagggagcccagcaagagcctgggcatcagcatcgtgggcggccggggcatgggcagccggctgagcaatggagaggtgatgaggggcatcttcatcaagcacgtgctggaggacagccctgctgggaagaatggcaccctgaagccaggggaccgcatcgtggaggtggatggcatggacctgagagatgccagccatgagcaggccgtggaggccatcaggaaggccggcaaccctgtggtgttcatggtgcagagcatcatcaaccggccccgggcccccagccagagcgagagcgagcctgagaaggcccccctgtgcagcgtgcccccacctccacccagcgcctttgctgagatgggcagtgaccacacccagagcagcgccagcaagatcagccaggatgtggacaaggaggatgaatttggctacagctggaagaacatccgggagagatatggcaccctgaccggggagctgcacatgattgagctggagaagggccacagcggcctgggcctgagcctggccggcaacaaggacaggagcaggatgtctgtgttcatcgtgggcatcgaccccaacggggctgctgggaaggatggccgcctgcagattgctgatgagctgctggagatcaatggccagatcctgtatggccgcagccaccagaatgccagcagcatcatcaagtgtgcccccagcaaggtgaagatcatcttcatccggaacaaggatgctgtgaaccagatggctgtgtgccctggaaatgctgtggagcccctgcccagcaacagcgagaacctgcagaacaaggagacagagcccaccgtgaccaccagtgatgctgctgtggacctgagcagcttcaagaatgtgcagcacctggagctgcccaaggaccagggcggcctgggcatcgccatcagcgaggaggacaccctgtctggagtcatcatcaagagcctgacagaacatggagtggccgccacagatggccgcctgaaggtgggggaccagatcctggccgtggatgatgaaattgtggtgggctaccccatcgagaagttcatcagcctgctgaagacagccaagatgacagtgaagctgaccatccatgctgagaacccagacagccaggccgtgcccagcgctgctggagctgccagcggggagaagaagaacagcagccagagcctgatggtgccccagagcggcagccctgagcctgagagcatccggaacaccagccgcagcagcaccccagccatctttgccagtgaccctgccacctgccccatcatccctggctgtgagaccaccatcgagatcagcaaaggaagaacaggcctgggcctgagcatcgtgggcggcagtgacaccctgctgggcgccatcatcatccacgaggtgtatgaggagggcgccgcctgcaaggatggccgcctgtgggccggggaccagatcctggaggtgaatggcatcgacctgaggaaggccacccatgatgaggccatcaacgtgctgcggcagaccccccagagggtgcggctgaccctgtacagagatgaggccccctacaaggaggaggaggtgtgtgacaccctgaccatcgagctgcagaagaagccaggcaagggcctgggcctgagcatcgtgggcaagagaaatgacaccggggtgtttgtgtctgacatcgtgaagggcggcattgctgatgctgatggccgcctgatgcagggcgaccagatcctgatggtgaatggagaagatgtgagaaatgccacccaggaggccgtggccgccctgctgaagtgcagcctgggcaccgtgaccctggaggtgggccgcatcaaggccggccccttccacagcgagcggcggcccagccagagcagccaggtgtctgagggcagcctgagcagcttcaccttccccctgagcggcagcagcaccagcgagagcctggagagcagcagcaagaagaatgccctggccagcgagatccagggcctgaggacagtggagatgaagaagggccccacagacagcctgggcatcagcattgctggaggagtgggcagccccctgggagatgtgcccatcttcatcgccatgatgcaccccactggagtggccgcccagacccagaagctgcgggtgggggaccgcatcgtgaccatctgtggcaccagcacagagggcatgacccacacccaggccgtgaacctgctgaagaatgccagcggcagcattgagatgcaggtggtggccggaggagatgtgtctgtggtgacaggccaccagcaggagcccgccagcagcagcctgtccttcaccggcctgaccagcagcagcatcttccaggatgacctgggccccccccagtgcaagagcatcaccctggagcggggcccagatggcctgggcttcagcatcgtgggcggctacggcagcccccacggggacctgcccatctacgtgaagacagtgtttgccaagggagctgcctctgaagatggccgcctgaagagaggagaccagatcatcgctgtgaatggccagagcctggagggcgtgacccatgaggaggccgtggccatcctgaagaggaccaagggcaccgtgaccctgatggtgctgtcctag

SEQ ID NO: 160395 - DNA, 6027 bp, synthetic construct
  misc_feature 1..6027: note = Description of Artificial Sequence: Synthetic coding sequence
  source 1..6027: mol_type = other DNA
atgctggaggccatcgacaagaacagagccctgcatgctgctgagcggctgcagaccaagctgcgggagagaggagatgtggccaatgaagacaagctgagcctgctgaagtctgtgctgcagagccccctcttcagccagatcctgagcctgcagacctctgtgcagcagctgaaggaccaggtgaacatcgccaccagcgccaccagcaacatcgagtatgcccacgtgccccacctgagccctgctgtgatccccaccctgcagaatgaaagcttcctgctgagccccaacaatggaaacctggaggccctgaccggccctggcatcccccacatcaacgggaagccagcctgtgatgaatttgaccagctgatcaagaacatggcccagggccgccacgtggaggtgtttgagctgctgaagcccccatctgggggcctgggcttctctgtggtgggcctgcggtctgagaacagaggagagctgggcatctttgtgcaggagatccaggagggctctgtggcccacagagatggccgcctgaaggagacagaccagatcctggccatcaatggccaggccctggaccagaccatcacccaccagcaggccatcagcatcctgcagaaggccaaggacacagtgcagctggtgattgcccggggcagcctgccccagctggtgagccccatcgtgagccgcagccccagcgctgccagcaccatcagcgcccacagcaaccctgtgcactggcagcacatggagaccatcgagctggtgaatgatggcagcggcctgggcttcggcatcatcggcggcaaggccactggagtcatcgtgaagaccatcctgcccggcggcgtggccgaccagcacggccgcctgtgcagcggggaccacatcctgaagattggagacacagacctggccggcatgagcagcgagcaggtggcccaggtgctgcggcagtgtggcaacagagtgaagctgatgattgcccggggggccatcgaggagaggacagcccccacagccctgggcatcaccctgagcagcagccccaccagcaccccagagctgcgggtggatgccagcacccagaagggggaggagagcgagacctttgatgtggagctgaccaagaatgtgcagggcctgggcatcaccatcgccggctacatcggggacaagaagctggagcccagcggcatctttgtgaagagcatcaccaagagcagcgctgtggagcatgatggccgcatccagatcggggaccagatcatcgctgtggatggcaccaacctgcagggcttcaccaaccagcaggccgtggaggtgctgcggcacacaggccagacagtgctgctgaccctgatgagaagaggcatgaagcaggaggccgagctgatgagccgggaggatgtgaccaaggatgctgacctgagccctgtgaatgccagcatcatcaaggagaactatgagaaggatgaggacttcctgagcagcaccaggaacaccaacatcctgcccacagaggaggagggctaccccctgctgtctgctgagattgaggagattgaagatgcccagaagcaggaggccgccctgctgaccaagtggcagaggatcatgggcatcaactatgaaattgtggtggcccacgtgtccaagttctctgaaaattctggcctgggcatcagcctggaggccaccgtgggccaccacttcatccgctctgtgctgcctgagggccctgtgggccacagcggcaagctgttctctggagatgagctgctggaggtgaatggcatcaccctgctgggggagaaccaccaggatgtggtgaacatcctgaaggagctgcccatcgaggtgaccatggtgtgctgcagaagaacagtgccccccaccacccagagcgagctggacagcctggacctgtgtgacatcgagctgacagagaagccccacgtggacctgggggagttcatcggcagcagcgagacagaagatcctgtgctggccatgacagatgctggccagagcacagaggaggtgcaggcccccctggccatgtgggaggccggcatccagcacatcgagctggagaagggcagcaagggcctgggcttcagcatcctggactaccaggaccccattgatcctgccagcaccgtcatcatcatccgcagcctggtgcctgggggcattgctgagaaggatggccgcctgctgcccggggaccggctgatgtttgtgaatgatgtgaacctggagaacagcagcctggaggaggccgtggaggccctgaagggggcccccagcggcaccgtgagaattggagtggccaagcccctgcccctgagccctgaggagggctacgtgtctgccaaggaggacagcttcctgtacccaccccacagctgtgaggaggccggcctggccgacaagcccctcttccgggctgacctggccctggtgggcaccaatgatgctgacctggtggatgagagcacctttgagagcccctacagcccagaaaatgacagcatctacagcacccaggccagcatcctgagcctgcacggcagcagctgtggagatggcctgaactacggcagcagcctgcccagcagcccccccaaggatgtgattgagaacagctgtgaccctgtgctggacctgcacatgagcctggaggagctgtacacccagaacctgctgcagaggcaggatgagaacacccccagcgtggacatctccatgggccctgccagcggcttcaccatcaatgactacaccccagccaatgccatcgagcagcagtatgaatgtgagaacaccatcgtgtggacagagagccacctgcccagcgaggtgatcagcagcgctgagctgcccagcgtgctgcctgacagcgctggaaaaggaagtgagtacctgctggagcagagcagcctggcctgcaatgcagaatgtgtgatgctgcagaatgtgtccaaggagagctttgagaggaccatcaacatcgccaagggcaacagcagcctgggcatgacagtgtctgccaacaaggatggcctgggcatgattgtgcgcagcatcatccacggcggggccatcagcagagatggccgcatcgccatcggggactgcatcctgagcatcaatgaggagagcaccatctctgtgaccaatgcccaggcccgggccatgctgcggcggcacagcctcatcggccctgacatcaagatcacctacgtgcctgctgagcacctggaggagttcaagatcagcctgggccagcagagcggccgggtgatggccctggacatcttcagcagctacacaggccgggacatccctgagctgcctgagcgggaggagggggagggggaggagagcgagctgcagaacacagcctacagcaactggaaccagccccggcgggtggagctgtggagggagcccagcaagagcctgggcatcagcatcgtgggcggccggggcatgggcagccggctgagcaatggagaggtgatgaggggcatcttcatcaagcacgtgctggaggacagccctgctgggaagaatggcaccctgaagccaggggaccgcatcgtggaggtggatggcatggacctgagagatgccagccatgagcaggccgtggaggccatcaggaaggccggcaaccctgtggtgttcatggtgcagagcatcatcaaccggccccgggcccccagccagagcgagagcgagcctgagaaggcccccctgtgcagcgtgcccccacctccacccagcgcctttgctgagatgggcagtgaccacacccagagcagcgccagcaagatcagccaggatgtggacaaggaggatgaatttggctacagctggaagaacatccgggagagatatggcaccctgaccggggagctgcacatgattgagctggagaagggccacagcggcctgggcctgagcctggccggcaacaaggacaggagcaggatgtctgtgttcatcgtgggcatcgaccccaacggggctgctgggaaggatggccgcctgcagattgctgatgagctgctggagatcaatggccagatcctgtatggccgcagccaccagaatgccagcagcatcatcaagtgtgcccccagcaaggtgaagatcatcttcatccggaacaaggatgctgtgaaccagatggctgtgtgccctggaaatgctgtggagcccctgcccagcaacagcgagaacctgcagaacaaggagacagagcccaccgtgaccaccagtgatgctgctgtggacctgagcagcttcaagaatgtgcagcacctggagctgcccaaggaccagggcggcctgggcatcgccatcagcgaggaggacaccctgtctggagtcatcatcaagagcctgacagaacatggagtggccgccacagatggccgcctgaaggtgggggaccagatcctggccgtggatgatgaaattgtggtgggctaccccatcgagaagttcatcagcctgctgaagacagccaagatgacagtgaagctgaccatccatgctgagaacccagacagccaggccgtgcccagcgctgctggagctgccagcggggagaagaagaacagcagccagagcctgatggtgccccagagcggcagccctgagcctgagagcatccggaacaccagccgcagcagcaccccagccatctttgccagtgaccctgccacctgccccatcatccctggctgtgagaccaccatcgagatcagcaaaggaagaacaggcctgggcctgagcatcgtgggcggcagtgacaccctgctgggcgccatcatcatccacgaggtgtatgaggagggcgccgcctgcaaggatggccgcctgtgggccggggaccagatcctggaggtgaatggcatcgacctgaggaaggccacccatgatgaggccatcaacgtgctgcggcagaccccccagagggtgcggctgaccctgtacagagatgaggccccctacaaggaggaggaggtgtgtgacaccctgaccatcgagctgcagaagaagccaggcaagggcctgggcctgagcatcgtgggcaagagaaatgacaccggggtgtttgtgtctgacatcgtgaagggcggcattgctgatgctgatggccgcctgatgcagggcgaccagatcctgatggtgaatggagaagatgtgagaaatgccacccaggaggccgtggccgccctgctgaaggtgtctgagggcagcctgagcagcttcaccttccccctgagcggcagcagcaccagcgagagcctggagagcagcagcaagaagaatgccctggccagcgagatccagggcctgaggacagtggagatgaagaagggccccacagacagcctgggcatcagcattgctgggggcgtgggcagccccctgggagatgtgcccatcttcatcgccatgatgcaccccaccggggtggccgcccagacccagaagctgcgggtgggggacagaattgtgaccatctgtggcaccagcacagagggcatgacccacacccaggccgtgaacctgctgaagaatgccagcggcagcattgagatgcaggtggtggccggaggagatgtgtctgtggtgacaggccaccagcaggagcccgccagcagcagcctgtccttcaccggcctgaccagcagcagcatcttccaggatgacctgggccccccccagtgcaagagcatcaccctggagcggggcccagatggcctgggcttcagcatcgtgggcggctacggcagcccccatggagacctgcccatctacgtgaagacagtgtttgccaagggggccgcctctgaagatggccgcctgaagagaggagaccagatcatcgctgtgaatggccagagcctggagggcgtgacccatgaggaggccgtggccatcctgaagaggaccaagggcaccgtgaccctgatggtgctgtcctag

SEQ ID NO: 160396 - DNA, 1089 bp, synthetic construct
  misc_feature 1..1089: note = Description of Artificial Sequence: Synthetic coding sequence
  source 1..1089: mol_type = other DNA
atggagacagatgccccccagcccggcctggccagcccagacagcccccatgacccctgcaagatgttcatcggcggcctgtcctggcagaccacccaggagggcctgcgggagtacttcggccagtttggagaggtgaaggagtgcctggtgatgagggaccccctgaccaagaggagccggggctttggatttgtgaccttcatggaccaggccggcgtggacaaggtgctggcccagagcagacatgagctggacagcaagaccatcgaccccaaggtggccttcccccggcgggcccagcccaagatggtgaccaggaccaagaagatctttgtgggcggcctgtctgtgaacaccaccgtggaggatgtgaagcagtactttgagcagtttgggaaggtggatgatgccatgctgatgtttgacaagaccaccaacagacaccggggcttcggctttgtgacctttgaaagtgaggacatcgtggagaaggtgtgtgagatccacttccacgagatcaacaacaagatggtggagtgcaagaaggcccagcccaaggaggtgatgagccccactggaagtgcccggggccgcagccgggtgatgccctacggcatggatgccttcatgctgggcatcggcatgctgggctacccaggcttccaggccaccacctacgccagccgcagctacacaggcctggcccctggctacacctaccagtttcctgagttccgggtggagaggacccccctgcccagcgcccctgtgctgcctgagctgacagccatccccctgacagcctacggccccatggctgctgctgctgctgctgctgctgtggtgcggggcaccggcagccacccctggaccatggcccctcctcctggcagcacccccagcaggactggaggcttcctgggcaccaccagccctggccccatggccgagctgtatggagctgccaaccaggacagcggcgtgtcctcctacatctctgctgccagccctgcccccagcacaggcttcggccacagcctgggcggccccctgattgccacagccttcaccaacggctaccactag

SEQ ID NO: 160397 - DNA, 627 bp, synthetic construct
  misc_feature 1..627: note = Description of Artificial Sequence: Synthetic coding sequence
  source 1..627: mol_type = other DNA
atggccaccagcgctgtgcccagcgacaacctgcccacctacaagctggtggtggtgggagatggaggagtgggcaagagcgccctgaccatccagttcttccagaagatctttgtgcctgactatgaccccaccattgaagattcctacctgaagcacacagaaattgacaaccagtgggccatcctggatgtgctggacacagctggccaggaggagttcagcgccatgagggagcagtacatgaggactggagatggcttcctgattgtgtacagcgtgacagacaaggccagctttgagcacgtggaccgcttccaccagctgatcctgcgggtgaaggaccgggagagcttccccatgatcctggtggccaacaaggtggacctgatgcacctgaggaagatcacccgggagcagggcaaggagatggccaccaagcacaacatcccctacatcgagaccagcgccaaggacccccccctgaatgtggacaaggccttccatgacctggtgcgggtcatccggcagcagatccctgagaagagccagaagaagaagaagaagaccaagtggaggggggaccgggccaccggcacccacaagctgcagtgtgtgatcctgtag

SEQ ID NO: 160398 - DNA, 627 bp, synthetic construct; identical to SEQ ID NO: 160397
  misc_feature 1..627: note = Description of Artificial Sequence: Synthetic coding sequence
  source 1..627: mol_type = other DNA

SEQ ID NO: 160399 - DNA, 399 bp, synthetic construct
  misc_feature 1..399: note = Description of Artificial Sequence: Synthetic coding sequence
  source 1..399: mol_type = other DNA
atgagggagcagtacatgaggactggagatggcttcctgattgtgtacagcgtgacagacaaggccagctttgagcacgtggaccgcttccaccagctgatcctgcgggtgaaggaccgggagagcttccccatgatcctggtggccaacaaggtggacctgatgcacctgaggaagatcacccgggagcagggcaaggagatggccaccaagcacaacatcccctacatcgagaccagcgccaaggacccccccctgaatgtggacaaggccttccatgacctggtgcgggtcatccggcagcagatccctgagaagagccagaagaagaagaagaagaccaagtggaggggggaccgggccaccggcacccacaagctgcagtgtgtgatcctgtag

SEQ ID NO: 160400 - DNA, 627 bp, synthetic construct; identical to SEQ ID NO: 160397
  misc_feature 1..627: note = Description of Artificial Sequence: Synthetic coding sequence
  source 1..627: mol_type = other DNA

SEQ ID NO: 160401 - DNA, 72 bp, synthetic construct
  misc_feature 1..72: note = Description of Artificial Sequence: Synthetic coding sequence
  source 1..72: mol_type = other DNA
atggccaccagcgctgtgcccagcgacaacctgcccacctacaagctggtggtggtgggagatggcggctag

SEQ ID NO: 160402 - DNA, 2628 bp, synthetic construct
  misc_feature 1..2628: note = Description of Artificial Sequence: Synthetic coding sequence
  source 1..2628: mol_type = other DNA
atgagggagctggtgaacatccccctggtgcacatcctgaccctggtggccttctctggaacagagaagctgcccaaggcccctgtgatcaccacccccctggagaccgtggatgccctggtggaggaggtggccaccttcatgtgtgctgtggagagctacccccagcctgagatctcctggaccaggaacaagatcctgatcaagctgtttgacacccgctacagcatcagagaaaatggccagctgctgaccatcctgtctgtggaggacagtgatgatggcatctactgctgcacagccaacaatggagtgggcggcgctgtggagagctgtggggccctgcaggtgaagatgaagcccaagatcacccggccccccatcaacgtgaagatcatcgagggcctgaaggctgtgctgccctgcaccaccatgggcaaccccaagcccagcgtgtcctggatcaagggggacagccccctgcgggagaacagcagaattgctgtgctggagagcggcagcctgcgcatccacaacgtgcagaaggaggatgctggccagtaccgctgtgtggccaagaacagcctgggcacagcctacagcaaggtggtgaagctggaggtggaggtgtttgcccgcatcctgcgggcccctgagagccacaacgtgaccttcggcagctttgtgaccctgcactgcacagccaccggcatccctgtgcccaccatcacctggattgaaaatggaaatgctgtgagcagcggcagcatccaggagagcgtgaaggacagagtcatcgacagccggctgcagctgttcatcaccaagccaggcctgtacacctgcatcgccaccaacaagcacggggagaagttcagcacagccaaggccgccgccaccatcagcattgctgagatgctgttcatcagcagcttcagcaagccccagaaggacaacaagggctactgtgcccagtacagaggagaggtgtgcaatgctgtgctggccaaggatgccctggtgttcctgaacaccagctatgctgaccctgaggaggcccaggagctgctggtgcacacagcctggaatgagctgaaggtggtgtcccctgtgtgcaggcctgctgctgaggccctgctgtgcaaccacatcttccaggagtgcagccctggggtggtgcccacccccatccccatctgccgggagtactgcctggccgtgaaggagctgttctgtgccaaggagtggctggtgatggaggagaagacccaccggggcctgtacagaagtgagatgcacctgctgtctgtgcctgaatgttccaagctgcccagcatgcactgggaccccacagcctgtgcccggctgccccacctggactacaacaaggagaacctgaagaccttcccccccatgaccagcagcaagcccagcgtggacatccccaacctgcccagcagcagcagcagcagcttctctgtgagccccacctacagcatgaccgtcatcatcagcatcatgagcagctttgccatctttgtgctgctgaccatcaccaccctgtactgctgcagaagaaggaagcagtggaagaacaagaagcgggagagcgctgctgtgaccctgaccaccctgcccagcgagctgctgctggaccggctgcaccccaaccccatgtaccagaggatgcccctgctgctgaaccccaagctgctgagcctggagtaccccaggaacaacattgaatatgtgcgggacattggagagggcgccttcggccgggtcttccaggcccgggcccctggcctgctgccctatgagcccttcaccatggtggccgtgaagatgctgaaggaggaggccagcgctgacatgcaggccgacttccagcgggaggccgccctgatggccgagtttgacaaccccaacatcgtgaagctgctgggcgtgtgtgctgtgggcaagcccatgtgcctgctgtttgagtacatggcctacggggacctgaatgagttcctgcgctccatgagcccccacacagtgtgcagcctgagccacagcgacctgtccatgagggcccaggtgagcagccctggccccccacccctgagctgtgccgagcagctgtgcatcgcccggcaggtggccgccggcatggcctacctgtctgagaggaagtttgtgcaccgggacctggccaccaggaactgcctggtgggggagaacatggtggtgaagattgctgactttggcctgagcaggaacatctacagcgctgactactacaaggccaatgaaaatgatgccatccccatccgctggatgcctcctgagagcatcttctacaaccgctacaccacagaaagtgatgtgtgggcctacggcgtggtgctgtgggagatcttctcctatggcctgcagccctactacggcatggcccacgaggaggtgatctactacgtgagagatggcaacatcctgagctgcccagagaactgccctgtggagctgtacaacctgatgaggctgtgctggagcaagctgcctgctgaccggcccagcttcaccagcatccaccgcatcctggagaggatgtgtgaaagagctgagggcaccgtgtctgtgtag

SEQ ID NO: 160403 - DNA, 570 bp, synthetic construct
  misc_feature 1..570: note = Description of Artificial Sequence: Synthetic coding sequence
  source 1..570: mol_type = other DNA
atggctggaaatggaagagaggacccccagaggaccctgcagatcagagatgcctttgctgtgcgggccaggatgcagcaggccagccagcacgccctgggcccccacggcctgtgccagacagccaccagccgggagagcgctgctgtgaccctgaccaccctgcccagcgagctgctgctggaccggctgcaccccaaccccatgtaccagaggatgcccctgctgctgaaccccaagctgctgagcctggagtaccccaggaacaacattgaatatgtgcgggacattggagagggcgccttcggccgggtcttccaggcccgggcccctggcctgctgccctatgagcccttcaccatggtggccgtgaagatgctgaaggaggaggccagcgctgacatgcaggccgacttccagcgggaggccgccctgatggccgagtttgacaaccccaacatcgtgaagctgctgggcatgaagatccaggtgcgcatctgcatcagcagtgaaaatagaggcttccccagcttcagccccctggtgcgggccttctccttcagcccctag

SEQ ID NO: 160404 - DNA, 351 bp, synthetic construct
  misc_feature 1..351: note = Description of Artificial Sequence: Synthetic coding sequence
  source 1..351: mol_type = other DNA
atgaagcccaagatcacccggccccccatcaacgtgaagatcatcgagggcctgaaggctgtgctgccctgcaccaccatgggcaaccccaagcccagcgtgtcctggatcaagggggacagccccctgcgggagaacagcagaattgctgtgctggagagcggcagcctgcgcatccacaacgtgcagaaggaggatgctggccagtaccgctgtgtggccaagaacagcctgggcacagcctacagcaaggtggtgaagctggaggtggagggcgccaagggcatccacacccagtttgtggccagcgccctgcagctgcgctccttcctgagctgcccccagatctag

SEQ ID NO: 160405 - DNA, 351 bp, synthetic construct; identical to SEQ ID NO: 160404
  misc_feature 1..351: note = Description of Artificial Sequence: Synthetic coding sequence
  source 1..351: mol_type = other DNA

SEQ ID NO: 160406 - DNA, 570 bp, synthetic construct; identical to SEQ ID NO: 160403
  misc_feature 1..570: note = Description of Artificial Sequence: Synthetic coding sequence
  source 1..570: mol_type = other DNA

SEQ ID NO: 160407 - DNA, 2352 bp, synthetic construct
  misc_feature 1..2352: note = Description of Artificial Sequence: Synthetic coding sequence
  source 1..2352: mol_type = other DNA
atgagggagctggtgaacatccccctggtgcacatcctgaccctggtggccttctctggaacagagaagctgcccaaggcccctgtgatcaccacccccctggagaccgtggatgccctggtggaggaggtggccaccttcatgtgtgctgtggagagctacccccagcctgagatctcctggaccaggaacaagatcctgatcaagctgtttgacacccgctacagcatcagagaaaatggccagctgctgaccatcctgtctgtggaggacagtgatgatggcatctactgctgcacagccaacaatggagtgggcggcgctgtggagagctgtggggccctgcaggtgaagatgaagcccaagatcacccggccccccatcaacgtgaagatcatcgagggcctgaaggctgtgctgccctgcaccaccatgggcaaccccaagcccagcgtgtcctggatcaagggggacagccccctgcgggagaacagcagaattgctgtgctggagagcggcagcctgcgcatccacaacgtgcagaaggaggatgctggccagtaccgctgtgtggccaagaacagcctgggcacagcctacagcaaggtggtgaagctggaggtggaggaggagagcgagcctgagcaggacaccaaggtgtttgcccgcatcctgcgggcccctgagagccacaacgtgaccttcggcagctttgtgaccctgcactgcacagccaccggcatccctgtgcccaccatcacctggattgaaaatggaaatgctgtgagcagcggcagcatccaggagagcgtgaaggacagagtcatcgacagccggctgcagctgttcatcaccaagccaggcctgtacacctgcatcgccaccaacaagcacggggagaagttcagcacagccaaggccgccgccaccatcagcattgctgacttccgggagtactgcctggccgtgaaggagctgttctgtgccaaggagtggctggtgatggaggagaagacccaccggggcctgtacagaagtgagatgcacctgctgtctgtgcctgaatgttccaagctgcccagcatgcactgggaccccacagcctgtgcccggctgccccacctggccttcccccccatgaccagcagcaagcccagcgtggacatccccaacctgcccagcagcagcagcagcagcttctctgtgagccccacctacagcatgaccgtcatcatcagcatcatgagcagctttgccatctttgtgctgctgaccatcaccaccctgtactgctgcagaagaaggaagcagtggaagaacaagaagcgggagagcgctgctgtgaccctgaccaccctgcccagcgagctgctgctggaccggctgcaccccaaccccatgtaccagaggatgcccctgctgctgaaccccaagctgctgagcctggagtaccccaggaacaacattgaatatgtgcgggacattggagagggcgccttcggccgggtcttccaggcccgggcccctggcctgctgccctatgagcccttcaccatggtggccgtgaagatgctgaaggaggaggccagcgctgacatgcaggccgacttccagcgggaggccgccctgatggccgagtttgacaaccccaacatcgtgaagctgctgggcgtgtgtgctgtgggcaagcccatgtgcctgctgtttgagtacatggcctacggggacctgaatgagttcctgcgctccatgagcccccacacagtgtgcagcctgagccacagcgacctgtccatgagggcccaggtgagcagccctggccccccacccctgagctgtgccgagcagctgtgcatcgcccggcaggtggccgccggcatggcctacctgtctgagaggaagtttgtgcaccgggacctggccaccaggaactgcctggtgggggagaacatggtggtgaagattgctgactttggcctgagcaggaacatctacagcgctgactactacaaggccaatgaaaatgatgccatccccatccgctggatgcctcctgagagcatcttctacaaccgctacaccacagaaagtgatgtgtgggcctacggcgtggtgctgtgggagatcttctcctatggcctgcagccctactacggcatggcccacgaggaggtgatctactacgtgagagatggcaacatcctgagctgcccagagaactgccctgtggagctgtacaacctgatgaggctgtgctggagcaagctgcctgctgaccggcccagcttcaccagcatccaccgcatcctggagaggatgtgtgaaagagctgagggcaccgtgtctgtgtag

SEQ ID NO: 160408 - DNA, 2610 bp, synthetic construct
  misc_feature 1..2610: note = Description of Artificial Sequence: Synthetic coding sequence
  source 1..2610: mol_type = other DNA
atgagggagctggtgaacatccccctggtgcacatcctgaccctggtggccttctctggaacagagaagctgcccaaggcccctgtgatcaccacccccctggagaccgtggatgccctggtggaggaggtggccaccttcatgtgtgctgtggagagctacccccagcctgagatctcctggaccaggaacaagatcctgatcaagctgtttgacacccgctacagcatcagagaaaatggccagctgctgaccatcctgtctgtggaggacagtgatgatggcatctactgctgcacagccaacaatggagtgggcggcgctgtggagagctgtggggccctgcaggtgaagatgaagcccaagatcacccggccccccatcaacgtgaagatcatcgagggcctgaaggctgtgctgccctgcaccaccatgggcaaccccaagcccagcgtgtcctggatcaagggggacagccccctgcgggagaacagcagaattgctgtgctggagagcggcagcctgcgcatccacaacgtgcagaaggaggatgctggccagtaccgctgtgtggccaagaacagcctgggcacagcctacagcaaggtggtgaagctggaggtggaggtgtttgcccgcatcctgcgggcccctgagagccacaacgtgaccttcggcagctttgtgaccctgcactgcacagccaccggcatccctgtgcccaccatcacctggattgaaaatggaaatgctgtgagcagcggcagcatccaggagagcgtgaaggacagagtcatcgacagccggctgcagctgttcatcaccaagccaggcctgtacacctgcatcgccaccaacaagcacggggagaagttcagcacagccaaggccgccgccaccatcagcattgctgagtggagcaagccccagaaggacaacaagggctactgtgcccagtacagaggagaggtgtgcaatgctgtgctggccaaggatgccctggtgttcctgaacaccagctatgctgaccctgaggaggcccaggagctgctggtgcacacagcctggaatgagctgaaggtggtgtcccctgtgtgcaggcctgctgctgaggccctgctgtgcaaccacatcttccaggagtgcagccctggggtggtgcccacccccatccccatctgccgggagtactgcctggccgtgaaggagctgttctgtgccaaggagtggctggtgatggaggagaagacccaccggggcctgtacagaagtgagatgcacctgctgtctgtgcctgaatgttccaagctgcccagcatgcactgggaccccacagcctgtgcccggctgccccacctggactacaacaaggagaacctgaagaccttcccccccatgaccagcagcaagcccagcgtggacatccccaacctgcccagcagcagcagcagcagcttctctgtgagccccacctacagcatgaccgtcatcatcagcatcatgagcagctttgccatctttgtgctgctgaccatcaccaccctgtactgctgcagaagaaggaagcagtggaagaacaagaagcgggagagcgctgctgtgaccctgaccaccctgcccagcgagctgctgctggaccggctgcaccccaaccccatgtaccagaggatgcccctgctgctgaaccccaagctgctgagcctggagtaccccaggaacaacattgaatatgtgcgggacattggagagggcgccttcggccgggtcttccaggcccgggcccctggcctgctgccctatgagcccttcaccatggtggccgtgaagatgctgaaggaggaggccagcgctgacatgcaggccgacttccagcgggaggccgccctgatggccgagtttgacaaccccaacatcgtgaagctgctgggcgtgtgtgctgtgggcaagcccatgtgcctgctgtttgagtacatggcctacggggacctgaatgagttcctgcgctccatgagcccccacacagtgtgcagcctgagccacagcgacctgtccatgagggcccaggtgagcagccctggccccccacccctgagctgtgccgagcagctgtgcatcgcccggcaggtggccgccggcatggcctacctgtctgagaggaagtttgtgcaccgggacctggccaccaggaactgcctggtgggggagaacatggtggtgaagattgctgactttggcctgagcaggaacatctacagcgctgactactacaaggccaatgaaaatgatgccatccccatccgctggatgcctcctgagagcatcttctacaaccgctacaccacagaaagtgatgtgtgggcctacggcgtggtgctgtgggagatcttctcctatggcctgcagccctactacggcatggcccacgaggaggtgatctactacgtgagagatggcaacatcctgagctgcccagagaactgccctgtggagctgtacaacctgatgaggctgtgctggagcaagctgcctgctgaccggcccagcttcaccagcatccaccgcatcctggagaggatgtgtgaaagagctgagggcaccgtgtctgtgtag

SEQ ID NO: 160409 - DNA, 2604 bp, synthetic construct
  misc_feature 1..2604: note = Description of Artificial Sequence: Synthetic coding sequence
  source 1..2604: mol_type = other DNA
atgagggagctggtgaacatccccctggtgcacatcctgaccctggtggccttctctggaacagagaagctgcccaaggcccctgtgatcaccacccccctggagaccgtggatgccctggtggaggaggtggccaccttcatgtgtgctgtggagagctacccccagcctgagatctcctggaccaggaacaagatcctgatcaagctgtttgacacccgctacagcatcagagaaaatggccagctgctgaccatcctgtctgtggaggacagtgatgatggcatctactgctgcacagccaacaatggagtgggcggcgctgtggagagctgtggggccctgcaggtgaagatgaagcccaagatcacccggccccccatcaacgtgaagatcatcgagggcctgaaggctgtgctgccctgcaccaccatgggcaaccccaagcccagcgtgtcctggatcaagggggacagccccctgcgggagaacagcagaattgctgtgctggagagcggcagcctgcgcatccacaacgtgcagaaggaggatgctggccagtaccgctgtgtggccaagaacagcctgggcacagcctacagcaaggtggtgaagctggaggtggaggtgtttgcccgcatcctgcgggcccctgagagccacaacgtgaccttcggcagctttgtgaccctgcactgcacagccaccggcatccctgtgcccaccatcacctggattgaaaatggaaatgctgtgagcagcggcagcatccaggagagcgtgaaggacagagtcatcgacagccggctgcagctgttcatcaccaagccaggcctgtacacctgcatcgccaccaacaagcacggggagaagttcagcacagccaaggccgccgccaccatcagcattgctgagatgctgttcatcagcagcttcagcaagccccagaaggacaacaagggctactgtgcccagtacagaggagaggtgtgcaatgctgtgctggccaaggatgccctggtgttcctgaacaccagctatgctgaccctgaggaggcccaggagctgctggtgcacacagcctggaatgagctgaaggtggtgtcccctgtgtgcaggcctgctgctgaggccctgctgtgcaaccacatcttccaggagtgcagccctggggtggtgcccacccccatccccatctgccgggagtactgcctggccgtgaaggagctgttctgtgccaaggagtggctggtgatggaggagaagacccaccggggcctgtacagaagtgagatgcacctgctgtctgtgcctgaatgttccaagctgcccagcatgcactgggaccccacagcctgtgcccggctgccccacctggccttcccccccatgaccagcagcaagcccagcgtggacatccccaacctgcccagcagcagcagcagcagcttctctgtgagccccacctacagcatgaccgtcatcatcagcatcatgagcagctttgccatctttgtgctgctgaccatcaccaccctgtactgctgcagaagaaggaagcagtggaagaacaagaagcgggagagcgctgctgtgaccctgaccaccctgcccagcgagctgctgctggaccggctgcaccccaaccccatgtaccagaggatgcccctgctgctgaaccccaagctgctgagcctggagtaccccaggaacaacattgaatatgtgcgggacattggagagggcgccttcggccgggtcttccaggcccgggcccctggcctgctgccctatgagcccttcaccatggtggccgtgaagatgctgaaggaggaggccagcgctgacatgcaggccgacttccagcgggaggccgccctgatggccgagtttgacaaccccaacatcgtgaagctgctgggcgtgtgtgctgtgggcaagcccatgtgcctgctgtttgagtacatggcctacggggacctgaatgagttcctgcgctccatgagcccccacacagtgtgcagcctgagccacagcgacctgtccatgagggcccaggtgagcagccctggccccccacccctgagctgtgccgagcagctgtgcatcgcccggcaggtggccgccggcatggcctacctgtctgagaggaagtttgtgcaccgggacctggccaccaggaactgcctggtgggggagaacatggtggtgaagattgctgactttggcctgagcaggaacatctacagcgctgactactacaaggccaatgaaaatgatgccatccccatccgctggatgcctcctgagagcatcttctacaaccgctacaccacagaaagtgatgtgtgggcctacggcgtggtgctgtgggagatcttctcctatggcctgcagccctactacggcatggcccacgaggaggtgatctactacgtgagagatggcaacatcctgagctgcccagagaactgccctgtggagctgtacaacctgatgaggctgtgctggagcaagctgcctgctgaccggcccagcttcaccagcatccaccgcatcctggagaggatgtgtgaaagagctgagggcaccgtgtctgtgtag

SEQ ID NO: 160410 - DNA, 2610 bp, synthetic construct
  misc_feature 1..2610: note = Description of Artificial Sequence: Synthetic coding sequence
  source 1..2610: mol_type = other DNA
atgagggagctggtgaacatccccctggtgcacatcctgaccctggtggccttctctggaacagagaagctgcccaaggcccctgtgatcaccacccccctggagaccgtggatgccctggtggaggaggtggccaccttcatgtgtgctgtggagagctacccccagcctgagatctcctggaccaggaacaagatcctgatcaagctgtttgacacccgctacagcatcagagaaaatggccagctgctgaccatcctgtctgtggaggacagtgatgatggcatctactgctgcacagccaacaatggagtgggcggcgctgtggagagctgtggggccctgcaggtgaagatgaagcccaagatcacccggccccccatcaacgtgaagatcatcgagggcctgaaggctgtgctgccctgcaccaccatgggcaaccccaagcccagcgtgtcctggatcaagggggacagccccctgcgggagaacagcagaattgctgtgctggagagcggcagcctgcgcatccacaacgtgcagaaggaggatgctggccagtaccgctgtgtggccaagaacagcctgggcacagcctacagcaaggtggtgaagctggaggtggaggtgtttgcccgcatcctgcgggcccctgagagccacaacgtgaccttcggcagctttgtgaccctgcactgcacagccaccggcatccctgtgcccaccatcacctggattgaaaatggaaatgctgtgagcagcggcagcatccaggagagcgtgaaggacagagtcatcgacagccggctgcagctgttcatcaccaagccaggcctgtacacctgcatcgccaccaacaagcacggggagaagttcagcacagccaaggccgccgccaccatcagcattgctgccttcagcaagccccagaaggacaacaagggctactgtgcccagtacagaggagaggtgtgcaatgctgtgctggccaaggatgccctggtgttcctgaacaccagctatgctgaccctgaggaggcccaggagctgctggtgcacacagcctggaatgagctgaaggtggtgtcccctgtgtgcaggcctgctgctgaggccctgctgtgcaaccacatcttccaggagtgcagccctggggtggtgcccacccccatccccatctgccgggagtactgcctggccgtgaaggagctgttctgtgccaaggagtggctggtgatggaggagaagacccaccggggcctgtacagaagtgagatgcacctgctgtctgtgcctgaatgttccaagctgcccagcatgcactgggaccccacagcctgtgcccggctgccccacctggactacaacaaggagaacctgaagaccttcccccccatgaccagcagcaagcccagcgtggacatccccaacctgcccagcagcagcagcagcagcttctctgtgagccccacctacagcatgaccgtcatcatcagcatcatgagcagctttgccatctttgtgctgctgaccatcaccaccctgtactgctgcagaagaaggaagcagtggaagaacaagaagcgggagagcgctgctgtgaccctgaccaccctgcccagcgagctgctgctggaccggctgcaccccaaccccatgtaccagaggatgcccctgctgctgaaccccaagctgctgagcctggagtaccccaggaacaacattgaatatgtgcgggacattggagagggcgccttcggccgggtcttccaggcccgggcccctggcctgctgccctatgagcccttcaccatggtggccgtgaagatgctgaaggaggaggccagcgctgacatgcaggccgacttccagcgggaggccgccctgatggccgagtttgacaaccccaacatcgtgaagctgctgggcgtgtgtgctgtgggcaagcccatgtgcctgctgtttgagtacatggcctacggggacctgaatgagttcctgcgctccatgagcccccacacagtgtgcagcctgagccacagcgacctgtccatgagggcccaggtgagcagccctggccccccacccctgagctgtgccgagcagctgtgcatcgcccggcaggtggccgccggcatggcctacctgtctgagaggaagtttgtgcaccgggacctggccaccaggaactgcctggtgggggagaacatggtggtgaagattgctgactttggcctgagcaggaacatctacagcgctgactactacaaggccaatgaaaatgatgccatccccatccgctggatgcctcctgagagcatcttctacaaccgctacaccacagaaagtgatgtgtgggcctacggcgtggtgctgtgggagatcttctcctatggcctgcagccctactacggcatggcccacgaggaggtgatctactacgtgagagatggcaacatcctgagctgcccagagaactgccctgtggagctgtacaacctgatgaggctgtgctggagcaagctgcctgctgaccggcccagcttcaccagcatccaccgcatcctggagaggatgtgtgaaagagctgagggcaccgtgtctgtgtag

SEQ ID NO: 160411 - DNA, 2352 bp, synthetic construct
  misc_feature 1..2352: note = Description of Artificial Sequence: Synthetic coding sequence
  source 1..2352: mol_type = other DNA
atgagggagctggtgaacatccccctggtgcacatcctgaccctggtggccttctctggaacagagaagctgcccaaggcccctgtgatcaccacccccctggagaccgtggatgccctggtggaggaggtggccaccttcatgtgtgctgtggagagctacccccagcctgagatctcctggaccaggaacaagatcctgatcaagctgtttgacacccgctacagcatcagagaaaatggccagctgctgaccatcctgtctgtggaggacagtgatgatggcatctactgctgcacagccaacaatggagtgggcggcgctgtggagagctgtggggccctgcaggtgaagatgaagcccaagatcacccggccccccatcaacgtgaagatcatcgagggcctgaaggctgtgctgccctgcaccaccatgggcaaccccaagcccagcgtgtcctggatcaagggggacagccccctgcgggagaacagcagaattgctgtgctggagagcggcagcctgcgcatccacaacgtgcagaaggaggatgctggccagtaccgctgtgtggccaagaacagcctgggcacagcctacagcaaggtggtgaagctggaggtggaggaggagagcgagcctgagcaggacaccaaggtgtttgcccgcatcctgcgggcccctgagagccacaacgtgaccttcggcagctttgtgaccctgcactgcacagccaccggcatccctgtgcccaccatcacctggattgaaaatggaaatgctgtgagcagcggcagcatccaggagagcgtgaaggacagagtcatcgacagccggctgcagctgttcatcaccaagccaggcctgtacacctgcatcgccaccaacaagcacggggagaagttcagcacagccaaggccgccgccaccatcagcattgctgcctggaagaagtactgcctggccgtgaaggagctgttctgtgccaaggagtggctggtgatggaggagaagacccaccggggcctgtacagaagtgagatgcacctgctgtctgtgcctgaatgttccaagctgcccagcatgcactgggaccccacagcctgtgcccggctgccccacctggccttcccccccatgaccagcagcaagcccagcgtggacatccccaacctgcccagcagcagcagcagcagcttctctgtgagccccacctacagcatgaccgtcatcatcagcatcatgagcagctttgccatctttgtgctgctgaccatcaccaccctgtactgctgcagaagaaggaagcagtggaagaacaagaagcgggagagcgctgctgtgaccctgaccaccctgcccagcgagctgctgctggaccggctgcaccccaaccccatgtaccagaggatgcccctgctgctgaaccccaagctgctgagcctggagtaccccaggaacaacattgaatatgtgcgggacattggagagggcgccttcggccgggtcttccaggcccgggcccctggcctgctgccctatgagcccttcaccatggtggccgtgaagatgctgaaggaggaggccagcgctgacatgcaggccgacttccagcgggaggccgccctgatggccgagtttgacaaccccaacatcgtgaagctgctgggcgtgtgtgctgtgggcaagcccatgtgcctgctgtttgagtacatggcctacggggacctgaatgagttcctgcgctccatgagcccccacacagtgtgcagcctgagccacagcgacctgtccatgagggcccaggtgagcagccctggccccccacccctgagctgtgccgagcagctgtgcatcgcccggcaggtggccgccggcatggcctacctgtctgagaggaagtttgtgcaccgggacctggccaccaggaactgcctggtgggggagaacatggtggtgaagattgctgactttggcctgagcaggaacatctacagcgctgactactacaaggccaatgaaaatgatgccatccccatccgctggatgcctcctgagagcatcttctacaaccgctacaccacagaaagtgatgtgtgggcctacggcgtggtgctgtgggagatcttctcctatggcctgcagccctactacggcatggcccacgaggaggtgatctactacgtgagagatggcaacatcctgagctgcccagagaactgccctgtggagctgtacaacctgatgaggctgtgctggagcaagctgcctgctgaccggcccagcttcaccagcatccaccgcatcctggagaggatgtgtgaaagagctgagggcaccgtgtctgtgtag

SEQ ID NO: 160412 - DNA, 1167 bp, synthetic construct
  misc_feature 1..1167: note = Description of Artificial Sequence: Synthetic coding sequence
  source 1..1167: mol_type = other DNA
atggctgtgtctgtgacccccatccgggacaccaagtggctgaccctggaggtgtgccgggagttccagaggggcacctgcagcaggccagacacagagtgcaagtttgcccaccccagcaagagctgccaggtggagaatggccgggtgattgcctgctttgacagcctgaagggccgctgcagccgggagaactgcaagtacctgcaccccccaccccacctgaagacccagctggagatcaatggaagaaacaacctgatccagcagaagaacatggccatgctggcccagcagatgcagctggccaatgccatgatgcctggggcccccctgcagcctgtgcccatgttttctgtggcccccagcctggccaccaatgccagcgctgctgccttcaacccctacctgggccctgtgagccccagcctggtgcctgctgagatcctgcccacagcccccatgctggtgacaggcaaccctggggtgcctgtgcctgctgctgctgctgctgctgcccagaagctgatgaggacagaccggctggaggtgtgccgggagtaccagaggggcaactgcaacagaggagaaaatgactgccgctttgcccaccctgctgacagcaccatgattgacaccaatgacaacacagtgacagtgtgcatggactacatcaagggccgctgcagccgggagaagtgcaagtacttccaccccccagcccacctgcaggccaagatcaaggccgcccagtaccaggtgaaccaggccgctgctgcccaggccgccgccacagctgctgccatgacccagagcgctgtgaagagcctgaagaggcccctggaggccacctttgacctgggcatcccccaggccgtgctgccccccctgcccaagaggcctgccctggagaagaccaatggagccacagctgtgttcaacacaggcatcttccagtaccagcaggccctggccaacatgcagctgcagcagcacacagccttcctgccccctgtgcccatggtgcatggagccaccccagccaccgtgtctgctgccaccaccagcgccacctctgtgccctttgctgccacagccacagccaaccagatccccatcatctctgctgagcacctgaccagccacaagtatgtgacccagatgtag

SEQ ID NO: 160413 - DNA, 909 bp, synthetic construct
  misc_feature 1..909: note = Description of Artificial Sequence: Synthetic coding sequence
  source 1..909: mol_type = other DNA
atggctgtgtctgtgacccccatccgggacaccaagtggctgaccctggaggtgtgccgggagttccagaggggcacctgcagcaggccagacacagagtgcaagtttgcccaccccagcaagagctgccaggtggagaatggccgggtgattgcctgctttgacagcctgaagggccgctgcagccgggagaactgcaagtacctgcaccccccaccccacctgaagacccagctggagatcaatggaagaaacaacctgatccagcagaagaacatggccatgctggcccagcagatgcagctggccaatgccatgatgcctggggcccccctgcagcctgtggtgtgccgggagtaccagaggggcaactgcaacagaggagaaaatgactgccgctttgcccaccctgctgacagcaccatgattgacaccaatgacaacacagtgacagtgtgcatggactacatcaagggccgctgcagccgggagaagtgcaagtacttccaccccccagcccacctgcaggccaagatcaaggccgcccagtaccaggtgaaccaggccgctgctgcccaggccgccgccacagctgctgccatgggcatcccccaggccgtgctgccccccctgcccaagaggcctgccctggagaagaccaatggagccacagctgtgttcaacacaggcatcttccagtaccagcaggccctggccaacatgcagctgcagcagcacacagccttcctgccccctgtgcccatggtgcatggagccaccccagccaccgtgtctgctgccaccaccagcgccacctctgtgccctttgctgccacagccacagccaaccagatccccatcatctctgctgagcacctgaccagccacaagtatgtgacccagatgtag

SEQ ID NO: 160414 - DNA, 1023 bp, synthetic construct
  misc_feature 1..1023: note = Description of Artificial Sequence: Synthetic coding sequence
  source 1..1023: mol_type = other DNA
atggctgtgtctgtgacccccatccgggacaccaagtggctgaccctggaggtgtgccgggagttccagaggggcacctgcagcaggccagacacagagtgcaagtttgcccaccccagcaagagctgccaggtggagaatggccgggtgattgcctgctttgacagcctgaagggccgctgcagccgggagaactgcaagtacctgcaccccccaccccacctgaagacccagctggagatcaatggaagaaacaacctgatccagcagaagaacatggccatgctggcccagcagatgcagctggccaatgccatgatgcctggggcccccctgcagcctgtgcccatgttttctgtggcccccagcctggccaccaatgccagcgctgctgccttcaacccctacctgggccctgtgagccccagcctggtgcctgctgagatcctgcccacagcccccatgctggtgacaggcaaccctggggtgcctgtgcctgctgctgctgctgctgctgcccagaagctgatgaggacagaccggctggaggtgtgccgggagtaccagaggggcaactgcaacagaggagaaaatgactgccgctttgcccaccctgctgacagcaccatgattgacaccaatgacaacacagtgacagtgtgcatggactacatcaagggccgctgcagccgggagaagtgcaagtacttccaccccccagcccacctgcaggccaagatcaaggccgcccagtaccaggtgaaccaggccgctgctgcccaggccgccgccacagctgctgccatgttcccctggtgcaccgtgctgcggcagcccctgtgcccccagcagcagcacctgccccaggtgttccccagcctgcagcagccccagcccaccagccccatcctggatgccagcaccctgctgggcgccaccagctgcccagctgctgctgggaagatgatccccatcatctctgctgagcacctgaccagccacaagtatgtgacccagatgtag

SEQ ID NO: 160415 - DNA, 1149 bp, synthetic construct
  misc_feature 1..1149: note = Description of Artificial Sequence: Synthetic coding sequence
  source 1..1149: mol_type = other DNA
atggctgtgtctgtgacccccatccgggacaccaagtggctgaccctggaggtgtgccgggagttccagaggggcacctgcagcaggccagacacagagtgcaagtttgcccaccccagcaagagctgccaggtggagaatggccgggtgattgcctgctttgacagcctgaagggccgctgcagccgggagaactgcaagtacctgcaccccccaccccacctgaagacccagctggagatcaatggaagaaacaacctgatccagcagaagaacatggccatgctggcccagcagatgcagctggccaatgccatgatgcctggggcccccctgcagcctgtgcccatgttttctgtggcccccagcctggccaccaatgccagcgctgctgccttcaacccctacctgggccctgtgagccccagcctggtgcctgctgagatcctgcccacagcccccatgctggtgacaggcaaccctggggtgcctgtgcctgctgctgctgctgctgctgcccagaagctgatgaggacagaccggctggaggtgtgccgggagtaccagaggggcaactgcaacagaggagaaaatgactgccgctttgcccaccctgctgacagcaccatgattgacaccaatgacaacacagtgacagtgtgcatggactacatcaagggccgctgcagccgggagaagtgcaagtacttccaccccccagcccacctgcaggccaagatcaaggccgcccagtaccaggtgaaccaggccgctgctgcccaggccgccgccacagctgctgccatgggcatcccccaggccgtgctgccccccctgcccaagaggcctgccctggagaagaccaatggagccacagctgtgttcaacacaggcatcttccagtaccagcaggccctggccaacatgcagctgcagcagcacacagccttcctgcccccaggcagcatcctgtgcatgaccccagccacctctgtggtgcccatggtgcatggagccaccccagccaccgtgtctgctgccaccaccagcgccacctctgtgccctttgctgccacagccacagccaaccagatccccatcatctctgctgagcacctgaccagccacaagtatgtgacccagatgtag

SEQ ID NO: 160416 - DNA, 1113 bp, synthetic construct
  misc_feature 1..1113: note = Description of Artificial Sequence: Synthetic coding sequence
  source 1..1113: mol_type = other DNA
atggctgtgtctgtgacccccatccgggacaccaagtggctgaccctggaggtgtgccgggagttccagaggggcacctgcagcaggccagacacagagtgcaagtttgcccaccccagcaagagctgccaggtggagaatggccgggtgattgcctgctttgacagcctgaagggccgctgcagccgggagaactgcaagtacctgcaccccccaccccacctgaagacccagctggagatcaatggaagaaacaacctgatccagcagaagaacatggccatgctggcccagcagatgcagctggccaatgccatgatgcctggggcccccctgcagcctgtgcccatgttttctgtggcccccagcctggccaccaatgccagcgctgctgccttcaacccctacctgggccctgtgagccccagcctggtgcctgctgagatcctgcccacagcccccatgctggtgacaggcaaccctggggtgcctgtgcctgctgctgctgctgctgctgcccagaagctgatgaggacagaccggctggaggtgtgccgggagtaccagaggggcaactgcaacagaggagaaaatgactgccgctttgcccaccctgctgacagcaccatgattgacaccaatgacaacacagtgacagtgtgcatggactacatcaagggccgctgcagccgggagaagtgcaagtacttccaccccccagcccacctgcaggccaagatcaaggccgcccagtaccaggtgaaccaggccgctgctgcccaggccgccgccacagctgctgccatgggcatcccccaggccgtgctgccccccctgcccaagaggcctgccctggagaagaccaatggagccacagctgtgttcaacacaggcatcttccagtaccagcaggccctggccaacatgcagctgcagcagcacacagccttcctgccccctgtgcccatggtgcatggagccaccccagccaccgtgtctgctgccaccaccagcgccacctctgtgccctttgctgccacagccacagccaaccagatccccatcatctctgctgagcacctgaccagccacaagtatgtgacccagatgtag

SEQ ID NO: 160417 - DNA, 1029 bp, synthetic construct
  misc_feature 1..1029: note = Description of Artificial Sequence: Synthetic coding sequence
  source 1..1029: mol_type = other DNA
atggctgtgtctgtgacccccatccgggacaccaagtggctgaccctggaggtgtgccgggagttccagaggggcacctgcagcaggccagacacagagtgcaagtttgcccaccccagcaagagctgccaggtggagaatggccgggtgattgcctgctttgacagcctgaagggccgctgcagccgggagaactgcaagtacctgcaccccccaccccacctgaagacccagctggagatcaatggaagaaacaacctgatccagcagaagaacatggccatgctggcccagcagatgcagctggccaatgccatgatgcctggggcccccctgcagcctgtgcccatgttttctgtggcccccagcctggccaccaatgccagcgctgctgccttcaacccctacctgggccctgtgagccccagcctggtgcctgctgagatcctgcccacagcccccatgctggtgacaggcaaccctggggtgcctgtgcctgctgctgctgctgctgctgcccagaagctgatgaggacagaccggctggaggtgtgccgggagtaccagaggggcaactgcaacagaggagaaaatgactgccgctttgcccaccctgctgacagcaccatgattgacaccaatgacaacacagtgacagtgtgcatggactacatcaagggccgctgcagccgggagaagtgcaagtacttccaccccccagcccacctgcaggccaagatcaaggccgcccagtaccaggtgaaccaggccgctgctgcccaggccgccgccacagctgctgccatgggcatcccccaggccgtgctgccccccctgcccaagaggcctgccctggagaagaccaatggagccacagctgtgttcaacacaggcatcttccagtaccagcaggccctggccaacatgcagctgcagcagcacacagccttcctgcccccaggcagcatcctgtgcatgaccccagccacctctgtggacacccacaacatctgcaggaccagtgactag

SEQ ID NO: 160418 - DNA, 1167 bp, synthetic construct; identical to SEQ ID NO: 160412
  misc_feature 1..1167: note = Description of Artificial Sequence: Synthetic coding sequence
  source 1..1167: mol_type = other DNA

SEQ ID NO: 160419 - DNA, 1023 bp, synthetic construct; identical to SEQ ID NO: 160414
  misc_feature 1..1023: note = Description of Artificial Sequence: Synthetic coding sequence
  source 1..1023: mol_type = other DNA

SEQ ID NO: 160420 - DNA, 909 bp, synthetic construct; identical to SEQ ID NO: 160413
  misc_feature 1..909: note = Description of Artificial Sequence: Synthetic coding sequence
  source 1..909: mol_type = other DNA

SEQ ID NO: 160421 - DNA, 1029 bp, synthetic construct; identical to SEQ ID NO: 160417
  misc_feature 1..1029: note = Description of Artificial Sequence: Synthetic coding sequence
  source 1..1029: mol_type = other DNA

SEQ ID NO: 160422 - DNA, 1032 bp, synthetic construct
  misc_feature 1..1032: note = Description of Artificial Sequence: Synthetic coding sequence
  source 1..1032: mol_type = other DNA
atgggccgctgcagccgggagaactgcaagtacctgcaccccccaccccacctgaagacccagctggagatcaatggaagaaacaacctgatccagcagaagaacatggccatgctggcccagcagatgcagctggccaatgccatgatgcctggggcccccctgcagcctgtgcccatgttttctgtggcccccagcctggccaccaatgccagcgctgctgccttcaacccctacctgggccctgtgagccccagcctggtgcctgctgagatcctgcccacagcccccatgctggtgactggaaatcctggggtgcctgtgcctgctgctgctgctgctgctgcccagaagctgatgaggacagaccggctggaggtgtgccgggagtaccagaggggcaactgcaacagaggagaaaatgactgccgctttgcccaccctgctgacagcaccatgattgacaccaatgacaacacagtgacagtgtgcatggactacatcaagggccgctgcagccgggagaagtgcaagtacttccaccccccagcccacctgcaggccaagatcaaggccgcccagtaccaggtgaaccaggccgccgccgcccaggccgccgccacagctgctgccatgacccagagcgctgtgaagagcctgaagaggcccctggaggccacctttgacctgggcatcccccaggccgtgctgccccccctgcccaagaggcctgccctggagaagaccaacggggccacagctgtgttcaacacaggcatcttccagtaccagcaggccctggccaacatgcagctgcagcagcacacagccttcctgcccccaggcagcatcctgtgcatgaccccagccacctctgtggtgcccatggtgcacggggccaccccagccaccgtgtctgctgccaccaccagcgccacctctgtgccctttgctgccacagccacagccaaccagatccccatcatctctgctgagcacctgaccagccacaagtatgtgacccagatgtag

SEQ ID NO: 160423 - DNA, 945 bp, synthetic construct
  misc_feature 1..945: note = Description of Artificial Sequence: Synthetic coding sequence
  source 1..945: mol_type = other DNA
atggctgtgtctgtgacccccatccgggacaccaagtggctgaccctggaggtgtgccgggagttccagaggggcacctgcagcaggccagacacagagtgcaagtttgcccaccccagcaagagctgccaggtggagaatggccgggtgattgcctgctttgacagcctgaagggccgctgcagccgggagaactgcaagtacctgcaccccccaccccacctgaagacccagctggagatcaatggaagaaacaacctgatccagcagaagaacatggccatgctggcccagcagatgcagctggccaatgccatgatgcctggggcccccctgcagcctgtggtgtgccgggagtaccagaggggcaactgcaacagaggagaaaatgactgccgctttgcccaccctgctgacagcaccatgattgacaccaatgacaacacagtgacagtgtgcatggactacatcaagggccgctgcagccgggagaagtgcaagtacttccaccccccagcccacctgcaggccaagatcaaggccgcccagtaccaggtgaaccaggccgctgctgcccaggccgccgccacagctgctgccatgggcatcccccaggccgtgctgccccccctgcccaagaggcctgccctggagaagaccaatggagccacagctgtgttcaacacaggcatcttccagtaccagcaggccctggccaacatgcagctgcagcagcacacagccttcctgcccccaggcagcatcctgtgcatgaccccagccacctctgtggtgcccatggtgcatggagccaccccagccaccgtgtctgctgccaccaccagcgccacctctgtgccctttgctgccacagccacagccaaccagatccccatcatctctgctgagcacctgaccagccacaagtatgtgacccagatgtag

SEQ ID NO: 160424 - DNA, 1005 bp, synthetic construct
  misc_feature 1..1005: note = Description of Artificial Sequence: Synthetic coding sequence
  source 1..1005: mol_type = other DNA
atgacagctgtgaatgtggccctgatccgggacaccaagtggctgaccctggaggtgtgccgggagttccagaggggcacctgcagcagagcagatgctgactgcaagtttgcccaccccccccgggtgtgccacgtggagaatggccgggtggtggcctgctttgacagcctgaagggccgctgcacccgggagaactgcaagtacctgcaccccccaccccacctgaagacccagctggagatcaatggaagaaacaacctgatccagcagaagacagctgctgccatgtttgcccagcagatgcagctgatgctgcagaatgcccagatgagcagcctgggcagcttccccatgacccccagcatcccagccaacccccccatggccttcaacccctacatcccccaccctggcatgggcctggtgcctgctgagctggtgcccaacacccctgtgctgatccctggcaacccccccctggccatgcctggagctgtgggccccaagctgatgagaagtgacaagctggaggtgtgccgggagttccagaggggcaactgcaccagaggagaaaatgactgccgctatgcccaccccacagatgcctccatgattgaggccagtgacaacacagtgaccatctgcatggactacatcaagggccgctgcagccgggagaagtgcaagtacttccaccccccagcccacctgcaggcccggctgaaggccgcccaccaccagatgaaccacagcgctgccagcgccatggccctgaccaacctgcagctgccccagcctgccttcatcccagctggccccatcctgtgcatggccccagccagcaacatcgtgcccatgatgcatggagccacccccaccaccgtgtctgctgccaccaccccagccacctctgtgccctttgctgcccccaccactggaaaccagatcccccagctgagcattgatgagctgaacagctccatgtttgtgtcccagatgtag

SEQ ID NO: 160425 - DNA, 777 bp, synthetic construct
  misc_feature 1..777: note = Description of Artificial Sequence: Synthetic coding sequence
  source 1..777: mol_type = other DNA
atgtttgcccagcagatgcagctgatgctgcagaatgcccagatgagcagcctgggcagcttccccatgacccccagcatcccagccaacccccccatggccttcaacccctacatcccccaccctggcatgggcctggtgcctgctgagctggtgcccaacacccctgtgctgatccctggcaacccccccctggccatgcctggagctgtgggccccaagctgatgagaagtgacaagctggaggtgtgccgggagttccagaggggcaactgcaccagaggagaaaatgactgccgctatgcccaccccacagatgcctccatgattgaggccagtgacaacacagtgaccatctgcatggactacatcaagggccgctgcagccgggagaagtgcaagtacttccaccccccagcccacctgcaggcccggctgaaggccgcccaccaccagatgaaccacagcgctgccagcgccatggccctgcagcccggcaccctgcagctgatccccaagaggtctgccctggagaagcccaatggagccacccctgtgttcaaccccaccgtcttccactgccagcaggccctgaccaacctgcagctgccccagcctgccttcatcccagctggccccatcctgtgcatggccccagccagcaacatcgtgcccatgatgcacggggccacccccaccaccgtgtctgctgccaccaccccagccacctctgtgccctttgctgcccccaccaccggcaaccagctgaagttctag

SEQ ID NO: 160426 - DNA, 915 bp, synthetic construct
  misc_feature 1..915: note = Description of Artificial Sequence: Synthetic coding sequence
  source 1..915: mol_type = other DNA
atggagcgggccagcaagaacctgaagggccgctgcacccgggagaactgcaagtacctgcaccccccaccccacctgaagacccagctggagatcaatggaagaaacaacctgatccagcagaagacagctgctgccatgtttgcccagcagatgcagctgatgctgcagaatgcccagatgagcagcctgggcagcttccccatgacccccagcatcccagccaacccccccatggccttcaacccctacatcccccaccctggcatgggcctggtgcctgctgagctggtgcccaacacccctgtgctgatccctggcaacccccccctggccatgcctggagctgtgggccccaagctgatgagaagtgacaagctggaggtgtgccgggagttccagaggggcaactgcaccagaggagaaaatgactgccgctatgcccaccccacagatgcctccatgattgaggccagtgacaacacagtgaccatctgcatggactacatcaagggccgctgcagccgggagaagtgcaagtacttccaccccccagcccacctgcaggcccggctgaaggccgcccaccaccagatgaaccacagcgctgccagcgccatggccctgcagcccggcaccctgcagctgatccccaagaggtctgccctggagaagcccaatggagccacccctgtgttcaaccccaccgtcttccactgccagcaggccctgaccaacctgcagctgccccagcctgccttcatcccagctggccccatcctgtgcatggccccagccagcaacatcgtgcccatgatgcacggggccacccccaccaccgtgtctgctgccaccaccccagccacctctgtgccctttgctgcccccaccaccggcaaccagctgaagttctag

SEQ ID NO: 160427 - DNA, 1065 bp, synthetic construct
  misc_feature 1..1065: note = Description of Artificial Sequence: Synthetic coding sequence
  source 1..1065: mol_type = other DNA
atgacagctgtgaatgtggccctgatccgggacaccaagtggctgaccctggaggtgtgccgggagttccagaggggcacctgcagcagagcagatgctgactgcaagtttgcccaccccccccgggtgtgccacgtggagaatggccgggtggtggcctgctttgacagcctgaagggccgctgcacccgggagaactgcaagtacctgcaccccccaccccacctgaagacccagctggagatcaatggaagaaacaacctgatccagcagaagacagctgctgccatgtttgcccagcagatgcagctgatgctgcagaatgcccagatgagcagcctgggcagcttccccatgacccccagcatcccagccaacccccccatggccttcaacccctacatcccccaccctggcatgggcctggtgcctgctgagctggtgcccaacacccctgtgctgatccctggcaacccccccctggccatgcctggagctgtgggccccaagctgatgagaagtgacaagctggaggtgtgccgggagttccagaggggcaactgcaccagaggagaaaatgactgccgctatgcccaccccacagatgcctccatgattgaggccagtgacaacacagtgaccatctgcatggactacatcaagggccgctgcagccgggagaagtgcaagtacttccaccccccagcccacctgcaggcccggctgaaggccgcccaccaccagatgaaccacagcgctgccagcgccatggccctgcagcccggcaccctgcagctgatccccaagaggtctgccctggagaagcccaatggagccacccctgtgttcaaccccaccgtcttccactgccagcaggccctgaccaacctgcagctgccccagcctgccttcatcccagctggccccatcctgtgcatggccccagccagcaacatcgtgcccatgatgcacggggccacccccaccaccgtgtctgctgccaccaccccagccacctctgtgccctttgctgcccccaccaccggcaaccagctgaagttctag

SEQ ID NO: 160428 - DNA, 1029 bp, synthetic construct
  misc_feature 1..1029: note = Description of Artificial Sequence: Synthetic coding sequence
  source 1..1029: mol_type = other DNA
atgacagctgtgaatgtggccctgatccgggacaccaagtggctgaccctggaggtgtgccgggagttccagaggggcacctgcagcagagcagatgctgactgcaagtttgcccaccccccccgggtgtgccacgtggagaatggccgggtggtggcctgctttgacagcctgaagggccgctgcacccgggagaactgcaagtacctgcaccccccaccccacctgaagacccagctggagatcaatggaagaaacaacctgatccagcagaagacagctgctgccatgtttgcccagcagatgcagctgatgctgcagaatgcccagatgagcagcctgggcagcttccccatgacccccagcatcccagccaacccccccatggccttcaacccctacatcccccaccctggcatgggcctggtgcctgctgagctggtgcccaacacccctgtgctgatccctggcaacccccccctggccatgcctggagctgtgggccccaagctgatgagaagtgacaagctggaggtgtgccgggagttccagaggggcaactgcaccagaggagaaaatgactgccgctatgcccaccccacagatgcctccatgattgaggccagtgacaacacagtgaccatctgcatggactacatcaagggccgctgcagccgggagaagtgcaagtacttccaccccccagcccacctgcaggcccggctgaaggccgcccaccaccagatgaaccacagcgctgccagcgccatggccctgcagcccggcaccctgcagctgatccccaagaggtctgccctggagaagcccaatggagccacccctgtgttcaaccccaccgtcttccactgccagcaggccctgaccaacctgcagctgccccagcctgccttcatcccagctgtgcccatgatgcacggggccacccccaccaccgtgtctgctgccaccaccccagccacctctgtgccctttgctgcccccaccaccggcaaccagctgaagttctag

SEQ ID NO: 160429 - DNA, 777 bp, synthetic construct; identical to SEQ ID NO: 160425
  misc_feature 1..777: note = Description of Artificial Sequence: Synthetic coding sequence
  source 1..777: mol_type = other DNA

SEQ ID NO: 160430 - DNA, 672 bp, synthetic construct
  misc_feature 1..672: note = Description of Artificial Sequence: Synthetic coding sequence
  source 1..672: mol_type = other DNA
atgtttgcccagcagatgcagctgatgctgcagaatgcccagatgagcagcctgggcagcttccccatgacccccagcatcccagccaacccccccatggccttcaacccctacatcccccaccctggcatgggcctggtgcctgctgagctggtgcccaacacccctgtgctgatccctggcaacccccccctggccatgcctggagctgtgggccccaagctgatgagaagtgacaagctggaggtgtgccgggagttccagaggggcaactgcaccagaggagaaaatgactgccgctatgcccaccccacagatgcctccatgattgaggccagtgacaacacagtgaccatctgcatggactacatcaagggccgctgcagccgggagaagtgcaagtacttccaccccccagcccacctgcaggcccggctgaaggccgcccaccaccagatgaaccacagcgctgccagcgccatggccctgcagcccggcaccctgcagctgatccccaagaggtctgccctggagaagcccaatggagccacccctgtgttcaaccccaccgtcttccactgccagcaggccctgaccaacctgcagctgccccagcctgccttcatcccagctggccccatcctgtgcatggccccagccagcaacatctag

SEQ ID NO: 160431 - DNA, 729 bp, synthetic construct
  misc_feature 1..729: note = Description of Artificial Sequence: Synthetic coding sequence
  source 1..729: mol_type = other DNA
atgtttgcccagcagatgcagctgatgctgcagaatgcccagatgagcagcctgggcagcttccccatgacccccagcatcccagccaacccccccatggccttcaacccctacatcccccaccctggcatgggcctggtgcctgctgagctggtgcccaacacccctgtgctgatccctggcaacccccccctggccatgcctggagctgtgggccccaagctgatgagaagtgacaagctggaggtgtgccgggagttccagaggggcaactgcaccagaggagaaaatgactgccgctatgcccaccccacagatgcctccatgattgaggccagtgacaacacagtgaccatctgcatggactacatcaagggccgctgcagccgggagaagtgcaagtacttccaccccccagcccacctgcaggcccggctgaaggccgcccaccaccagatgaaccacagcgctgccagcgccatggccctgcagcccggcaccctgcagctgatccccaagaggtctgccctggagaagcccaatggagccacccctgtgttcaaccccaccgtcttccactgccagcaggccctgaccaacctgcagctgccccagcctgccttcatcccagctggccccatcctgtgcatggccccagccagcaacatcgtgcccatgatgcacggggccacccccaccaccgtgtctgctgccaccaccccagcctag

SEQ ID NO: 160432 - DNA, 453 bp, synthetic construct
  misc_feature 1..453: note = Description of Artificial Sequence: Synthetic coding sequence
  source 1..453: mol_type = other DNA
atcaagggccgctgcagccgggagaagtgcaagtacttccaccccccagcccacctgcaggcccggctgaaggccgcccaccaccagatgaaccacagcgctgccagcgccatggccctgcagcccggcaccctgcagctgatccccaagaggtctgccctggagaagcccaacggggccacccctgtgttcaaccccaccgtcttccactgccagcaggccctgaccaacctgcagctgccccagcctgccttcatcccagctggccccatcctgtgcatggccccagccagcaacatcgtgcccatgatgcatggagccacccccaccaccgtgtctgctgccaccaccccagccacctctgtgccctttgctgcccccaccactggaaaccagatcccccagctgagcattgatgagctgaacagctccatgtttgtgtcccagatgtag

SEQ ID NO: 160433 - DNA, 879 bp, synthetic construct
  misc_feature 1..879: note = Description of Artificial Sequence: Synthetic coding sequence
  source 1..879: mol_type = other DNA
atggagcgggccagcaagaacctgaagggccgctgcacccgggagaactgcaagtacctgcaccccccaccccacctgaagacccagctggagatcaatggaagaaacaacctgatccagcagaagacagctgctgccatgtttgcccagcagatgcagctgatgctgcagaatgcccagatgagcagcctgggcagcttccccatgacccccagcatcccagccaacccccccatggccttcaacccctacatcccccaccctggcatgggcctggtgcctgctgagctggtgcccaacacccctgtgctgatccctggcaacccccccctggccatgcctggagctgtgggccccaagctgatgagaagtgacaagctggaggtgtgccgggagttccagaggggcaactgcaccagaggagaaaatgactgccgctatgcccaccccacagatgcctccatgattgaggccagtgacaacacagtgaccatctgcatggactacatcaagggccgctgcagccgggagaagtgcaagtacttccaccccccagcccacctgcaggcccggctgaaggccgcccaccaccagatgaaccacagcgctgccagcgccatggccctgcagcccggcaccctgcagctgatccccaagaggtctgccctggagaagcccaatggagccacccctgtgttcaaccccaccgtcttccactgccagcaggccctgaccaacctgcagctgccccagcctgccttcatcccagctgtgcccatgatgcacggggccacccccaccaccgtgtctgctgccaccaccccagccacctctgtgccctttgctgcccccaccaccggcaaccagctgaagttctag

SEQ ID NO: 160434 - DNA, 1377 bp, synthetic construct
  misc_feature 1..1377: note = Description of Artificial Sequence: Synthetic coding sequence
  source 1..1377: mol_type = other DNA
atggagctggagaagcgggagaagaggagcctgctgaacaagaacctggaggagaagctgactgtgtctgctgggggcagcgaggccaagcccctcatcttcacctttgtgcccaccgtgcggcggctgcccacccacacccagctggccgacaccagcaagttcctggtgaagatccctgaggagagcagtgacaagagccctgagaccgtgaacagaagcaagagcaatgactacctgaccctgaatgccggcagccagcaggagcgggaccaggccaagctgacctgccccagcgaggtgtctggcaccatcctgcaggagcgggagtttgaggccaacaagctgcagggcatgcagcagagcgacctcttcaaggccgagtatgtgctgattgtggacagcgagggggaggatgaagctgccagcaggaaggtggagcagggccccccaggcggcatcggcacagctgctgtgcggcccaagagcctggccatcagcagcagcctggtgtctgatgtggtgcggcccaagacccagggcacagacctgaagaccagcagccaccctgagatgctgcacggcatggccccccagcagaagcacggccagcagtacaagaccaagagcagctacaaggcctttgctgccatccccaccaacaccctgctgctggagcagaaggccctggatgagcccgccaagacagagagcgtgtccaaggacaacaccctggagccccctgtggagctgtacttccctgcccagctgcggcagcagacagaggagctgtgtgccaccatcgacaaggtgctgcaggacagcctgtccatgcacagcagtgacagccccagccgcagccccaagaccctgctgggcagtgacacagtgaagacccccaccaccctgcccagggctgctggccgggagaccaagtatgccaacctgagcagccccagcagcacagtgtctgagagccagctgaccaagccaggagtcatccggcctgtgcctgtgaagagccgcatcctgctgaagaaggaggaggaggtgtatgagcccaaccccttcagcaagtacctggaggacaacagcgacctcttcagcgagcaggatgtgacagtgccccccaagcctgtgtccctgcaccccctgtaccagaccaagctgtaccccccagccaagagcctgctgcacccccagaccctgagccacgccgactgcctggcccctggccccttcagccacctgtccttcagcctgagtgatgagcaggagaacagccacaccctgctgagccacaatgcctgcaacaagctgagccaccccatggtggccatccctgagcacgaggccctggacagcaaggagcagtag

SEQ ID NO: 160435 - DNA, 873 bp, synthetic construct
  misc_feature 1..873: note = Description of Artificial Sequence: Synthetic coding sequence
  source 1..873: mol_type = other DNA
atgaccagctgcatcctgagcggcagcatccagaccaccccccaggtgtctgctgggggcagcgaggccaagcccctcatcttcacctttgtgcccaccgtgcggcggctgcccacccacacccagctggccgacaccagcaagttcctggtgaagatccctgaggagagcagtgacaagagccctgagaccgtgaacagaagcaagagcaatgactacctgaccctgaatgccggcagccagcaggagcgggaccaggccaagctgacctgccccagcgaggtgtctggcaccatcctgcaggagcgggagtttgaggccaacaagctgcagggcatgcagcagagcgacctcttcaaggccgagtatgtgctgattgtggacagcgagggggaggatgaagctgccagcaggaaggtggagcagggccccccaggcggcatcggcacagctgctgtgcggcccaagagcctggccatcagcagcagcctggtgtctgatgtggtgcggcccaagacccagggcacagacctgaagaccagcagccaccctgagatgctgcacggcatggccccccagcagaagcacggccagacccccaccaccctgcccagggctgctggccgggagaccaagtatgccaacctgagcagccccagcagcacagtgtctgagagccagctgaccaagccaggagtcatccggcctgtgcctgtgaagagccgcatcctgctgaagaaggaggaggaggtgtatgagcccaaccccttcagcaagtacctggaggacaacagcgacctcttcagcgagcagctgagccaccccatggtggccatccctgagcacgaggccctggacagcaaggagcagtag

SEQ ID NO: 160436 - DNA, 705 bp, synthetic construct
  misc_feature 1..705: note = Description of Artificial Sequence: Synthetic coding sequence
  source 1..705: mol_type = other DNA
atgtgctcctggtacctgggctttgaatgtagcagcaagagcaatgactacctgaccctgaatgccggcagccagcaggagcgggaccaggccaagctgacctgccccagcgaggtgtctggcaccatcctgcaggagcgggagtttgaggccaacaagctgcagggcatgcagcagagcgacctcttcaaggccgagtatgtgctgattgtggacagcgagggggaggatgaagctgccagcaggaaggtggagcagggccccccaggcggcatcggcacagctgctgtgcggcccaagagcctggccatcagcagcagcctggtgtctgatgtggtgcggcccaagacccagggcacagacctgaagaccagcagccaccctgagatgctgcacggcatggccccccagcagaagcacggccagacccccaccaccctgcccagggctgctggccgggagaccaagtatgccaacctgagcagccccagcagcacagtgtctgagagccagctgaccaagccaggagtcatccggcctgtgcctgtgaagagccgcatcctgctgaagaaggaggaggaggtgtatgagcccaaccccttcagcaagtacctggaggacaacagcgacctcttcagcgagcagctgagccaccccatggtggccatccctgagcacgaggccctggacagcaaggagcagtag

SEQ ID NO: 160437 - DNA, 489 bp, synthetic construct
  misc_feature 1..489: note = Description of Artificial Sequence: Synthetic coding sequence
  source 1..489: mol_type = other DNA
atgcagcagagcgacctcttcaaggccgagtatgtgctgattgtggacagcgagggggaggatgaagctgccagcaggaaggtggagcagggccccccaggcggcatcggcacagctgctgtgcggcccaagagcctggccatcagcagcagcctggtgtctgatgtggtgcggcccaagacccagggcacagacctgaagaccagcagccaccctgagatgctgcacggcatggccccccagcagaagcacggccagcagtacaagaccaagagcagctacaaggcctttgctgccatccccaccaacaccctgctgctggagcagaaggccctggatgagcccgccaagacagagagcgtgtccaaggacaacaccctggagccccctgtggagacccccaccaccctgcccagggctgctggccgggagaccaagtatgccaacctgagcagccccagcagcacagtgtctgagagccagctgtag

SEQ ID NO: 160438 - DNA, 2208 bp, synthetic construct
  misc_feature 1..2208: note = Description of Artificial Sequence: Synthetic coding sequence
  source 1..2208: mol_type = other DNA
atggctgctggaggagctgtggccgccgcccctgagtgccgcctgctgccctatgccctgcacaagtggagcagcttcagcagcacctacctgcctgagaacatcctggtggacaagcccaatgaccagagcagccgctggagcagcgagagcaactacccaccccagtacctgatcctgaagctggagaggcctgccatcgtgcagaacatcaccttcggcaagtatgagaagacccacgtgtgcaacctgaagaagttcaaggtgtttggaggcatgaatgaggagaacatgacagagctgctgagcagcggcctgaagaatgactacaacaaggagaccttcaccctgaagcacaagattgatgagcagatgttcccctgccgcttcatcaagatcgtgcccctgctgtcctggggccccagcttcaacttcagcatctggtacgtggagctgtctggaattgatgatcctgacatcgtgcagccctgcctgaactggtacagcaagtaccgggagcaggaggccatccggctgtgcctgaagcacttccggcagcacaactacacagaggcctttgagagcctgcagaagaagaccaagatcgccctggagcaccccatgctgacagacatccatgacaagctggtgctgaagggggactttgatgcctgtgaggagctgattgagaaggctgtgaatgatggcctcttcaaccagtacatcagccagcaggagtacaagccccgctggagccagatcatccccaagagcaccaagggagatggagaggacaaccggcccggcatgaggggcggccaccagatggtgattgatgtgcagacagagaccgtgtacctgtttggaggctgggatggcacccaggacctggccgacttctgggcctacagcgtgaaggagaaccagtggacctgcatcagccgggacacagagaaggaaaatggccccagcgcccggagctgccacaagatgtgcatcgacatccagaggcggcagatctacaccctgggccgctacctggacagctctgtgaggaacagcaagagcctgaagagtgacttctaccgctatgacatcgacaccaacacctggatgctgctgtctgaggacacagctgctgatggcggccccaagctggtgtttgaccaccagatgtgcatggacagcgagaagcacatgatctacaccttcggcggccgcatcctgacctgcaatggatctgtggatgacagccgggccagcgagccccagttcagcggcctgtttgccttcaactgccagtgccagacctggaagctgctgcgggaggacagctgcaatgccggccctgaggacatccagagcagaattggccactgcatgctgttccacagcaagaaccgctgcctgtatgtgtttggaggccagaggagcaagacctacctgaatgacttcttctcctatgatgtggacagcgaccacgtggacatcatcagtgatggcaccaagaaggacagcggcatggtgcccatgacaggcttcacccagagggccaccatcgaccctgagctgaatgagatccacgtgctgagcggcctgagcaaggacaaggagaagcgggaggagaatgtgagaaattccttctggatctatgacatcgtgagaaattcctggagctgtgtgtacaagaatgaccaggccgccaaggacaaccccaccaagagcctgcaggaggaggagccctgccccaggtttgcccaccagctggtgtatgatgagctgcacaaggtgcactacctgtttggaggcaaccctgggaagagctgcagccccaagatgaggctggatgacttctggagcctgaagctgtgccggcccagcaaggactacctgctgcggcactgcaagtacctgatcaggaagcacagatttgaggagaaggcccaggtggaccccctgagcgccctgaagtacctgcagaatgacctgtacatcaccgtggaccacagcgaccctgaggagaccaaggagttccagctgctggccagcgccctcttcaagagcggcagtgacttcaccgccctgggcttcagtgatgtggaccacacctacgcccagaggacccagctgtttgacaccctggtgaacttcttcccagacagcatgaccccacccaagggcaacctggtggacctgatcaccctgtag

SEQ ID NO: 160439 - DNA, 558 bp, synthetic construct
  misc_feature 1..558: note = Description of Artificial Sequence: Synthetic coding sequence
  source 1..558: mol_type = other DNA
atgacaggcttcacccagagggccaccatcgaccctgagctgaatgagatccacgtgctgagcggcctgagcaaggacaaggagaagcgggaggagaatgtgagaaattccttctggatctatgacatcgtgagaaattcctggagctgtgtgtacaagaatgaccaggccgccaaggacaaccccaccaagagcctgcaggaggaggagccctgccccaggtttgcccaccagctggtgtatgatgagctgcacaaggtgcactacctgtttggaggcaaccctgggaagagctgcagccccaagatgaggctggatgacttctggagcctgaagctgtgccggcccagcaaggactacctgctgcggcactgcaagtacctgatcaggaagcacagatttgaggagaaggcccaggtggaccccctgagcgccctgaagtacctgcagaatgacctgtacatcaccgtggaccacagcgaccctgaggagaccaaggaggccttcctgatgtggatcacccccatgctgaaggagctgagcagcctgaccccctag

SEQ ID NO: 160440 - DNA, 3060 bp, synthetic construct
  misc_feature 1..3060: note = Description of Artificial Sequence: Synthetic coding sequence
  source 1..3060: mol_type = other DNA
atgatggctgctgctgctgctgctgctgctggcagcagcagcagcggcggcggcggcggcggcagcggcagcagcagcagcagcagtgacaccagcagcactggagaggaggagaggatgagaagactcttccagacctgtgatggagatggagatggctacatcagcagaaatgacctgctgatggtgtgccggcagctgaacatggaggagagcgtggccgagatcatgaaccagctgggcgcagatgaaaatggcaagatctccttccaggacttcacccgctgcaggatgcagctggtgcgggagatcaggaaggaggaggtggacctgagcgccaagagtgacaacagctgcaccaagaagctgcgggacagaattgcctcctggcccaccagcagtgacaacagcctgggcgccctgtctgctgcccgggagagctgggagtatgacagcggggcccgggacctgcagagcccagatgtgcagagccagagcgccctgcagaagctgctggagtatggaggcagcagcctgcaccagcaggccgccctgcacaagctgctgacccagagcccccacatcggcaacagcgtgggcggcagctacctggagctggccaacaccctgcacagcgctgccctggccagcctgaagggggacatcgtggagctgaacaagaggctgcagcagacagagcgggagcgggacctgctggagaagaagctggccaaggcccagtgtgagcagagccacctgatgagggagcatgaagatgtgcaggagaggaccaccctgcgctatgaggagcgcatcacagagctgcacagcgtgattgctgagctgaacaagaagattgaccggctgcagggcaccaccatccgggaggaggatgagtacagcgagctgcggtctgagctgagccagagccagcacgaggtgaatgaagacagccgctccatggaccaggaccagacctctgtgtccatccctgagaaccagagcaccatggtgacagctgacatggacaactgcagcgacctgaacagcgagctgcagagggtgctgaccggcctggagaatgtggtgtgtggcaggaagaagagcagctgcagcctgtctgtggccgaggtggacaagcacatcgagcagctgaccacagccagcgagcactgtgacctggccatcaagacagtggaggagattgagggcgtgctgggccgggacctgtaccccaacctggccgaggagaggagccgctgggagaaggagctggccggcctgcgggaggagaatgaaagcctgacagccatgctgtgcagcaaggaggaggagctgaacagaaccaaggccaccatgaatgccatccgggaggagcgggaccggctgcggaggagagtgcgggagctgcagacccggctgcagagcgtgcaggccaccggccccagcagccctggccgcctgaccagcaccaaccggcccatcaaccccagcactggagagctgagcaccagcagcagcagcaatgacatccccatcgccaagattgctgagcgggtgaagctgagcaagaccaggtctgagagcagcagcagtgacaggcctgtgctgggcagcgagatcagcagcattggagtgagcagctctgtggccgagcacctggcccacagcctgcaggactgcagcaacatccaggagatcttccagaccctgtacagccacggcagcgccatcagcgagagcaagatccgggagtttgaggtggagacagagcggctgaacagcagaattgagcacctgaagagccagaatgacctgctgaccatcaccctggaggagtgcaagagcaatgctgagaggatgtccatgctggtgggcaagtatgagagcaatgccacagccctgcggctggccctgcagtacagcgagcagtgcatcgaggcctatgagctgctgctggccctggccgagagcgagcagagcctcatcctgggccagttccgggccgccggcgtgggcagcagccctggggaccagagcggagatgagaacatcacccagatgctgaagagggcccatgactgcaggaagacagcagaaaatgctgccaaggccctgctgatgaagctggatggcagctgtggcggggcctttgctgtggccggctgcagcgtgcagccctgggagagcctgagcagcaacagccacaccagcaccaccagcagcacagccagcagctgtgacacagagttcaccaaggaggatgagcagaggctgaaggactacatccagcagctgaagaatgacagagctgctgtgaagctgaccatgctggagctggagagcatccacatcgaccccctgtcctatgatgtgaagcccaggggggacagccagaggctggacctggagaatgctgtgctgatgcaggagctgatggccatgaaggaggagatggccgagctgaaggcccagctgtacctgctggagaaggagaagaaggccctggagctgaagctgagcacccgggaggcccaggagcaggcctacctggtgcacatcgagcacctgaagtctgaggtggaggagcagaaggagcagaggatgaggagcctgagcagcaccagcagcggcagcaaggacaagccaggcaaggaatgtgctgatgctgccagccctgccctgagcctggccgagctgcggaccacctgcagtgaaaatgagctggccgctgagttcaccaatgccatccggcgggagaagaagctgaaggcccgggtgcaggagctggtgtctgccctggagcggctgaccaagagcagcgagatccgccaccagcagagcgctgagtttgtgaatgacctgaagagggccaacagcaacctggtggccgcctatgagaaggccaagaagaagcaccagaacaagctgaagaagctggagagccagatgatggccatggtggagagacatgagacccaggtgaggatgctgaagcagagaattgccctgctggaggaggagaacagccggccccacaccaatgagaccagcctgtag

SEQ ID NO: 160441 - DNA, 564 bp, synthetic construct
  misc_feature 1..564: note = Description of Artificial Sequence: Synthetic coding sequence
  source 1..564: mol_type = other DNA
atgtctgggggcggcacagagacccctgtgggctgtgaggccgcccctgggggcggcagcaagaagagggacagcctgggcacagctggcagcgcccacctgatcatcaaggacctgggggagatccacagccggctgctggaccacaggcctgtgatccagggcgagacccgctactttgtgaaggagtttgaggagaagaggggcctgcgggagatgagggtgctggagaacctgaagaacatgatccacgagaccaatgagcacaccctgcccaagtgccgggacaccatgagggacagcctgagccaggtgctgcagaggctgcaggccgccaatgattctgtgtgccgcctgcagcagcgggagcaggagaggaagaagatccacagcgaccacctggtggccagcgagaagcagcacatgctgcagtgggacaacttcatgaaggagcagcccaacaagagagctgaggtggatgaggagcacaggaaggccatggagcggctgaaggagcagtatgcagagatggagaaggacctggccaagttcagcaccttctag

SEQ ID NO: 160442 - DNA, 372 bp, synthetic construct
  misc_feature 1..372: note = Description of Artificial Sequence: Synthetic coding sequence
  source 1..372: mol_type = other DNA
atggagaagaggggcctgcgggagatgagggtgctggagaacctgaagaacatgatccacgagaccaatgagcacaccctgcccaagtgccgggacaccatgagggacagcctgagccaggtgctgcagaggctgcaggccgccaatgattctgtgtgccgcctgcagcagcgggagcaggagaggaagaagatccacagcgaccacctggtggccagcgagaagcagcacatgctgcagtgggacaacttcatgaaggagcagcccaacaagagagctgaggtggatgaggagcacaggaaggccatggagcggctgaaggagcagtatgcagagatggagaaggacctggccaagttcagcaccttctag

SEQ ID NO: 160443 - DNA, 3987 bp, synthetic construct
  misc_feature 1..3987: note = Description of Artificial Sequence: Synthetic coding sequence
  source 1..3987: mol_type = other DNA
atggagagccgggaccctgcccagcccatgagccctggagaggccacccagagcggggcccggcctgctgacagatatggcctgctgaagcacagccgggagttcctggacttcttctgggacatcgccaagccagagcaggagacccggctggccgccacagagaagctgctggagtacctgcggggccggcccaagggcagcgagatgaagtatgccctgaagaggctcatcaccggcctgggcgtgggccgggagacagcccggccctgctacagcctggccctggcccagctgctgcagagctttgaggacctgcccctgtgcagcatcctgcagcagatccaggagaagtatgacctgcaccaggtgaagaaggccatgctgcggcctgccctgtttgccaacctgtttggagtgctggccctcttccagagcggccgcctggtgaaggaccaggaggccctgatgaagtctgtgaagctgctgcaggccctggcccagtaccagaaccacctgcaggagcagcccaggaaggccctggtggacatcctgtctgaggtgtccaaggccaccctgcaggagatcctgcctgaggtgctgaaggctgacctgaacatcatcctgagcagccctgagcagctggagctgttcctgctggcccagcagaaggtgcccagcaagctgaagaagctggtgggctctgtgaacctcttcagtgatgaaaatgtgccccggctggtgaatgtgctgaagatggccgccagctctgtgaagaaggacaggaagctgcctgccatcgccctggacctgctgcggctggccctgaaggaggacaagttcccccgcttctggaaggaggtggtggagcagggcctgctgaagatgcagttctggccagccagctacctgtgcttccggctgctgggcgccgccctgcccctgctgaccaaggagcagctgcacctggtgatgcagggagatgtgatccgccactatggagagcacgtgtgcacagccaagctgcccaagcagttcaagtttgcccctgagatggatgattatgtgggcaccttcctggagggctgccaggatgatcctgagcggcagctggccgtgctggtggccttcagctctgtgaccaaccagggcctgcctgtgacccccaccttctggagggtggtgcgcttcctgagccccccagccctgcagggctacgtggcctggctgcgggccatgttcctgcagcctgacctggacagcctggtggacttcagcaccaacaaccagaagaaggcccaggacagcagcctgcacatgcctgagagagctgtgttccggctgaggaagtggatcatcttccggctggtgtccatcgtggacagcctgcacctggagatggaggaggccctgacagagcaggtggcccgcttctgcctcttccacagcttctttgtgaccaagaagcccaccagccagatccctgagaccaagcaccccttctccttccccctggagaaccaggcccgggaggccgtgtcctctgccttcttcagcctgctgcagaccctgagcacccagttcaagcaggcccctggccagacccagggcggccagccctggacctaccacctggtgcagtttgctgacctgctgctgaaccacagccacaacgtgaccaccgtgacccccttcaccgcccagcagaggcaggcctgggacaggatgctgcagaccctgaaggagctggaggcccacagcgctgaggcccgggctgctgccttccagcacctgctgctgctggtgggcatccacctgctgaagagccctgctgagagctgtgacctgctgggggacatccagacctgcatcaggaagagcctgggggagaagcccaggaggagcaggaccaagaccatcgacccccaggagcccccctgggtggaggtgctggtggagatcctgctggccctgctggcccagcccagccacctgatgaggcaggtggcccggtctgtgtttggccacatctgcagccacctgaccccccgggccctgcagctgatcctggatgtgctgaaccctgagaccagtgaagatgaaaatgacagagtggtggtgacagatgacagtgatgagcggcggctgaagggagctgaggacaagtctgaggagggggaggacaacagaagcagcgagagcgaggaggagagcgagggggaggagagcgaggaggaggagagagatggagatgtggaccagggcttccgggagcagctgatgacagtgctgcaggccggcaaggccctgggcggagaagattctgaaaatgaggaggagctgggagatgaggccatgatggccctggaccagagcctggccagcctgtttgctgagcagaagctgcgcatccaggccaggagagatgagaagaacaagctgcagaaggagaaggccctgcggcgggacttccagatccgggtgctggacctggtggaggtgctggtgaccaagcagccagaaaatgccctggtgctggagctgctggagcccctgctgagcatcatcagaagaagcctgcggagcagcagcagcaagcaggagcaggacctgctgcacaagacagcccgcatcttcacccaccacctgtgccgggcccggcgctactgccacgacctgggggagagagctggggccctgcacgcccaggtggagcggctggtgcagcaggccggccggcagcctgacagccccacagccctgtaccacttcaatgccagcctgtacctgctgcgggtgctgaagggcaacacagctgagggctgtgtgcatgagacccaggagaagcagaaggccggcacagaccccagccacatgcccaccggcccccaggccgccagctgcctggacctgaacctggtgaccagggtgtacagcacagccctgagcagcttcctgaccaagaggaacagccccctgactgtgcccatgttcctgagcctcttcagccgccaccctgtgctgtgccagagcctgctgcccatcctggtgcagcacatcactggacctgtgcggcccaggcaccaggcctgcctgctgctgcagaagaccctgtccatgagggaggtgcgcagctgctttgaggaccctgagtggaagcagctgatgggccaggtgctggccaaggtgacagagaacctgcgggtgctgggggaggcccagaccaaggcccagcaccagcaggccctgagcagcctggagctgctgaatgtgctcttccgcacctgcaagcatgagaagctgaccctggacctgactgtgctgctgggcgtgctgcagggccagcagcagagcctgcagcagggcgcccacagcacaggcagcagccggctgcatgacctgtactggcaggccatgaagaccctgggcgtgcagaggcccaagctggagaagaaggatgccaaggagatccccagcgccacccagagccccatcagcaagaagaggaagaagaagggcttcctgcctgagaccaagaagaggaagaagaggaagtcagaagatggcaccccagcagaagatggcaccccagctgccaccggcggcagccagcccccatccatgggcaggaagaagaggaacagaaccaaggccaaggtgcctgcccaggccaacggcacccccaccaccaagagccctgcccctggggcccccaccaggagccccagcaccccagccaagagccccaagctgcagaagaagaaccagaagcccagccaggtgaatggagcccctggcagccccacagagcccgccggccagaagcagcaccagaaggccctgcccaagaagggcgtgctgggcaagagccccctgagcgccctggccaggaagaaggcccggctgagcctggtgatccgcagccccagcctgctgcagagcggggccaagaagaaggcccaggtgaggaaggccggcaagccctag

SEQ ID NO: 160444 - DNA, 3999 bp, synthetic construct
  misc_feature 1..3999: note = Description of Artificial Sequence: Synthetic coding sequence
  source 1..3999: mol_type = other DNA
atggagagccgggaccctgcccagcccatgagccctggagaggccacccagagcggggcccggcctgctgacagatatggcctgctgaagcacagccgggagttcctggacttcttctgggacatcgccaagccagagcaggagacccggctggccgccacagagaagctgctggagtacctgcggggccggcccaagggcagcgagatgaagtatgccctgaagaggctcatcaccggcctgggcgtgggccgggagacagcccggccctgctacagcctggccctggcccagctgctgcagagctttgaggacctgcccctgtgcagcatcctgcagcagatccaggagaagtatgacctgcaccaggtgaagaaggccatgctgcggcctgccctgtttgccaacctgtttggagtgctggccctcttccagagcggccgcctggtgaaggaccaggaggccctgatgaagtctgtgaagctgctgcaggccctggcccagtaccagaaccacctgcaggagcagcccaggaaggccctggtggacatcctgtctgaggtgtccaaggccaccctgcaggagatcctgcctgaggtgctgaaggctgacctgaacatcatcctgagcagccctgagcagctggagctgttcctgctggcccagcagaaggtgcccagcaagctgaagaagctggtgggctctgtgaacctcttcagtgatgaaaatgtgccccggctggtgaatgtgctgaagatggccgccagctctgtgaagaaggacaggaagctgcctgccatcgccctggacctgctgcggctggccctgaaggaggacaagttcccccgcttctggaaggaggtggtggagcagggcctgctgaagatgcagttctggccagccagctacctgtgcttccggctgctgggcgccgccctgcccctgctgaccaaggagcagctgcacctggtgatgcagggagatgtgatccgccactatggagagcacgtgtgcacagccaagctgcccaagcagttcaagtttgcccctgagatggatgattatgtgggcaccttcctggagggctgccaggatgatcctgagcggcagctggccgtgctggtggccttcagctctgtgaccaaccagggcctgcctgtgacccccaccttctggagggtggtgcgcttcctgagccccccagccctgcagggctacgtggcctggctgcgggccatgttcctgcagcctgacctggacagcctggtggacttcagcaccaacaaccagaagaaggcccaggacagcagcctgcacatgcctgagagagctgtgttccggctgaggaagtggatcatcttccggctggtgtccatcgtggacagcctgcacctggagatggaggaggccctgacagagcaggtggcccgcttctgcctcttccacagcttctttgtgaccaagaagcccaccagccagatccctgagaccaagcaccccttctccttccccctggagaaccaggcccgggaggccgtgtcctctgccttcttcagcctgctgcagaccctgagcacccagttcaagcaggcccctggccagacccagggcggccagccctggacctaccacctggtgcagtttgctgacctgctgctgaaccacagccacaacgtgaccaccgtgacccccttcaccgcccagcagaggcaggcctgggacaggatgctgcagaccctgaaggagctggaggcccacagcgctgaggcccgggctgctgccttccagcacctgctgctgctggtgggcatccacctgctgaagagccctgctgagagctgtgacctgctgggggacatccagacctgcatcaggaagagcctgggggagaagcccaggaggagcaggaccaagaccatcgacccccaggagcccccctgggtggaggtgctggtggagatcctgctggccctgctggcccagcccagccacctgatgaggcaggtggcccggtctgtgtttggccacatctgcagccacctgaccccccgggccctgcagctgatcctggatgtgctgaaccctgagaccagtgaagatgaaaatgacagagtggtggtgacagatgacagtgatgagcggcggctgaagggagctgaggacaagtctgaggagggggaggacaacagaagcagcgagagcgaggaggagagcgagggggaggagagcgaggaggaggagagagatggagatgtggaccagggcttccgggagcagctgatgacagtgctgcaggccggcaaggccctgggcggagaagattctgaaaatgaggaggagctgggagatgaggccatgatggccctggaccagagcctggccagcctgtttgctgagcagaagctgcgcatccaggccaggagagatgagaagaacaagctgcagaaggagaaggccctgcggcgggacttccagatccgggtgctggacctggtggaggtgctggtgaccaagcagccagaaaatgccctggtgctggagctgctggagcccctgctgagcatcatcagaagaagcctgcggagcagcagcagcaagcaggagcaggacctgctgcacaagacagcccgcatcttcacccaccacctgtgccgggcccggcgctactgccacgacctgggggagagagctggggccctgcacgcccaggtggagcggctggtgcagcaggccggccggcagcctgacagccccacagccctgtaccacttcaatgccagcctgtacctgctgcgggtgctgaagggcaacacagctgagggctgtgtgcatgagacccaggagaagcagaaggccggcacagaccccagccacatgcccaccggcccccaggccgccagctgcctggacctgaacctggtgaccagggtgtacagcacagccctgagcagcttcctgaccaagaggaacagccccctgactgtgcccatgttcctgagcctcttcagccgccaccctgtgctgtgccagagcctgctgcccatcctggtgcagcacatcactggacctgtgcggcccaggcaccaggcctgcctgctgctgcagaagaccctgtccatgagggaggtgcgcagctgctttgaggaccctgagtggaagcagctgatgggccaggtgctggccaaggtgacagagaacctgcgggtgctgggggaggcccagaccaaggcccagcaccagcaggccctgagcagcctggagctgctgaatgtgctcttccgcacctgcaagcatgagaagctgaccctggacctgactgtgctgctgggcgtgctgcagggccagcagcagagcctgcagcagggcgcccacagcacaggcagcagccggctgcatgacctgtactggcaggccatgaagaccctgggcgtgcagaggcccaagctggagaagaaggatgccaaggagatccccagcgccacccagagccccatcagcaagaagaggaagaagaagggcttcctgcctgagaccaagaagaggaagaagaggaagtcagaagatggcaccccagcagaagatggcaccccagctgccaccggcggcagccagcccccatccatgggcaggaagaagaggaacagaaccaaggccaaggtgcctgcccaggccaacggcacccccaccaccaagagccctgcccctggggcccccaccaggagccccagcaccccagccaagagccccaagctgcagaagaagaaccagaagcccagccaggtgaatggagcccctggcagccccacagagcccgccggccagaagcagcaccagaaggccctgcccaagaagggcgtgctgggcaagagccccctgagcgccctggccaggaagaaggcccggctgagcctggtgatccgcagccccagcctgctgcagagcggggccaagaagaaggcccagaccctgcgcttcaccatcagcagcagcaagaagtag

SEQ ID NO: 160445 - DNA, 1812 bp, synthetic construct
  misc_feature 1..1812: note = Description of Artificial Sequence: Synthetic coding sequence
  source 1..1812: mol_type = other DNA
atggagagccgggaccctgcccagcccatgagccctggagaggccacccagagcggggcccggcctgctgacagatatggcctgctgaagcacagccgggagttcctggacttcttctgggacatcgccaagccagagcaggagacccggctggccgccacagagaagctgctggagtacctgcggggccggcccaagggcagcgagatgaagtatgccctgaagaggctcatcaccggcctgggcgtgggccgggagacagcccggccctgctacagcctggccctggcccagctgctgcagagctttgaggacctgcccctgtgcagcatcctgcagcagatccaggagaagtatgacctgcaccaggtgaagaaggccatgctgcggcctgccctgtttgccaacctgtttggagtgctggccctcttccagagcggccgcctggtgaaggaccaggaggccctgatgaagtctgtgaagctgctgcaggccctggcccagtaccagaaccacctgcaggagcagcccaggaaggccctggtggacatcctgtctgaggtgtccaaggccaccctgcaggagatcctgcctgaggtgctgaaggctgacctgaacatcatcctgagcagccctgagcagctggagctgttcctgctggcccagcagaaggtgcccagcaagctgaagaagctggtgggctctgtgaacctcttcagtgatgaaaatgtgccccggctggtgaatgtgctgaagatggccgccagctctgtgaagaaggacaggaagctgcctgccatcgccctggacctgctgcggctggccctgaaggaggacaagttcccccgcttctggaaggaggtggtggagcagggcctgctgaagatgcagttctggccagccagctacctgtgcttccggctgctgggcgccgccctgcccctgctgaccaaggagcagctgcacctggtgatgcagggagatgtgatccgccactatggagagcacgtgtgcacagccaagctgcccaagcagttcaagtttgcccctgagatggatgattatgtgggcaccttcctggagggctgccaggatgatcctgagcggcagctggccgtgctggtggccttcagctctgtgaccaaccagggcctgcctgtgacccccaccttctggagggtggtgcgcttcctgagccccccagccctgcagggctacgtggcctggctgcgggccatgttcctgcagcctgacctggacagcctggtggacttcagcaccaacaaccagaagaaggcccaggacagcagcctgcacatgcctgagagagctgtgttccggctgaggaagtggatcatcttccggctggtgtccatcgtggacagcctgcacctggagatggaggaggccctgacagagcaggtggcccgcttctgcctcttccacagcttctttgtgaccaagaagcccaccagccagatccctgagaccaagccccaggagaggtctgagggccctgcccagccccctcatgcccctgggggccctgagcggcccaagctggagaagaaggatgccaaggagatccccagcgcagaagatggcaccccagctgccaccggcggcagccagcccccatccatgggcaggaagaagaggaacagaaccaaggccaaggtgcctgcccaggccaacggcacccccaccaccaagagccctgcccctggggcccccaccaggagccccagcaccccagccaagagccccaagctgcagaagaaggcccaggtgaggaaggccggcaagccctag

SEQ ID NO: 160446 - DNA, 2487 bp, synthetic construct
  misc_feature 1..2487: note = Description of Artificial Sequence: Synthetic coding sequence
  source 1..2487: mol_type = other DNA
atggctgctgaggaggctgatgtggacatcgagggagatgtggtggccgccgccggggcccagcccggcagcggggagaacacagcctctgtgctgcagaaggaccactacctggacagctcctggaggacagaaaatggcctcatcccctggaccctggacaacaccatcagcgaggagaacagagctgtgattgagaagatgctgctggaggaggagtactacctgagcaagaagagccagcctgagaaggtgtggctggaccagaaggaggatgacaagaagtacatgaagagcctgcagaagacagccaagatcatggtgcacagccccaccaagccagccagctacagcgtgaagtggaccatcgaggagaaggagctgtttgagcagggcctggccaagtttggccgccgctggaccaagatcagcaagctgattggcagcaggacagtgctgcaggtgaagagctatgcccggcagtacttcaagaacaaggtgaagtgtggcctggacaaggagacccccaaccagaagacaggccacaacctgcaggtgaagaatgaagataaaggcaccaaggcctggacccccagctgcctgcggggccgggctgaccccaacctgaatgctgtgaagattgagaagctgagtgatgatgaggaggtggacatcacagatgaggtggatgagctgagcagccagaccccccagaagaacagcagcagtgacctgctgctggacttccccaacagcaagatgcatgagaccaaccagggcgagttcatcaccagtgacagccaggaggccctcttcagcaagagcagccggggctgcctgcagaatgagaagcaggatgagaccctgagcagcagcgagatcaccctgtggacagagaagcagagcaatggagacaagaagagcattgagctgaatgaccagaagttcaatgaactcatcaagaactgcaacaagcatgatggccggggcatcatcgtggatgcccggcagctgcccagccctgagccctgtgagatccagaagaacctgaatgacaatgagatgctgttccacagctgccagatggtggaggagagccatgaggaggaggagctgaagcccccagagcaggagattgaaattgacaggaacatcatccaggaggaggagaagcaggccatccctgagttctttgagggccggcaggccaagaccccagagcgctacctgaagatccggaactacatcctggaccagtgggagatctgcaagcccaagtacctgaacaagacctctgtgcggcccggcctgaagaactgtggagatgtgaactgcatcggccgcatccacacctacctggagctgattggagccatcaactttggctgtgagcaggccgtgtacaaccggccccagacagtggacaaggtgcgcatccgggacaggaaggatgctgtggaggcctaccagctggcccagaggctgcagagcatgaggaccaggagaagaagagtgcgggacccctggggcaactggtgtgatgccaaggacctggagggccagacctttgagcacctgtctgctgaggagctggccaagaggcgggaggaggagaagggccggcctgtgaagagcctgaaggtgccccggcccaccaagagcagctttgaccccttccagctgatcccctgcaacttcttcagcgaggagaagcaggagcccttccaggtgaaggtggccagcgaggccctgctgatcatggacctgcacgcccacgtgtccatggccgaggtgattggcctgctgggcggccgctacagcgaggtggacaaggtggtggaggtgtgtgccgctgagccctgcaacagcctgagcacaggcctgcagtgtgagatggaccctgtgtcccagacccaggccagcgagaccctggccgtgcggggcttcagcgtcatcggctggtaccacagccacccagcctttgaccccaaccccagcctgcgggacatcgacacccaggccaagtaccagagctacttcagcagaggaggagccaagttcatcggcatgattgtgagcccctacaacagaaacaaccccctgccctacagccagatcacctgcctggtgatcagcgaggagatcagcccagatggcagctaccgcctgccctacaagtttgaggtgcagcagatgctggaggagccccagtggggcctggtgtttgagaagacccgctggatcatcgagaagtaccgcctgagccacagctctgtgcccatggacaagatcttccggcgggacagcgacctgacctgcctgcagaagctgctggagtgcatgaggaagaccctgagcaaggtgaccaactgcttcatggccgaggagttcctgacagaaattgagaacctcttcctgagcaactacaagagcaaccaggagaatggagtgacagaggagaactgcaccaaggagctgctgatgtag

SEQ ID NO: 160447 - DNA, 843 bp, synthetic construct
  misc_feature 1..843: note = Description of Artificial Sequence: Synthetic coding sequence
  source 1..843: mol_type = other DNA
atgcccaagaaggccaagcccaccggcagcggcaaggaggagggccctgccccctgcaagcagatgaagctggaggccgccggcggccccagcgccctgaactttgacagccccagcagcctgtttgagagcctcatcagccccatcaagacagagaccttcttcaaggagttctgggagcagaagcccctgctgatccagagagatgatcctgccctggccacctactacggcagcctcttcaagctgacagacctgaagagcctgtgcagccggggcatgtactacggcagagatgtgaatgtgtgccgctgtgtgaatggcaagaagaaggtgctgaacaaggatggcaaggcccacttcctgcagctgaggaaggactttgaccagaagagggccaccatccagttccaccagccccagcgcttcaaggatgagctgtggaggatccaggagaagctggagtgctacttcggcagcctggtgggcagcaatgtgtacatcaccccagctggcagccagggcctgcccccccactatgatgatgtggaggtgttcatcctgcagctggagggggagaagcactggaggctgtaccaccccaccgtgcccctggcccgggagtacagcgtggaggccgaggagagaattggccggcctgtgcatgagttcatgctgaagccaggggacctgctgtacttcccccggggcaccatccaccaggccgacaccccagctggcctggcccacagcacccacgtgaccatcagcacctaccagaacaatgatgctggggccaggatgagaagatgtgacctgcgggccatcgccccccagaagtag

SEQ ID NO: 160448 - DNA, 1398 bp, synthetic construct
  misc_feature 1..1398: note = Description of Artificial Sequence: Synthetic coding sequence
  source 1..1398: mol_type = other DNA
atgcccaagaaggccaagcccaccggcagcggcaaggaggagggccctgccccctgcaagcagatgaagctggaggccgccggcggccccagcgccctgaactttgacagccccagcagcctgtttgagagcctcatcagccccatcaagacagagaccttcttcaaggagttctgggagcagaagcccctgctgatccagagagatgatcctgccctggccacctactacggcagcctcttcaagctgacagacctgaagagcctgtgcagccggggcatgtactacggcagagatgtgaatgtgtgccgctgtgtgaatggcaagaagaaggtgctgaacaaggatggcaaggcccacttcctgcagctgaggaaggactttgaccagaagagggccaccatccagttccaccagccccagcgcttcaaggatgagctgtggaggatccaggagaagctggagtgctacttcggcagcctggtgggcagcaatgtgtacatcaccccagctggcagccagggcctgcccccccactatgatgatgtggaggtgttcatcctgcagctggagggggagaagcactggaggctgtaccaccccaccgtgcccctggcccgggagtacagcgtggaggccgaggagagaattggccggcctgtgcatgagttcatgctgaagccaggggacctgctgtacttcccccggggcaccatccaccaggccgacaccccagctggcctggcccacagcacccacgtgaccatcagcacctaccagaacaacagctggggagacttcctgctggacaccatcagcggcctggtgtttgacacagccaaggaggatgtggagctgaggacaggcatcccccggcagctgctgctgcaggtggagagcaccaccgtggccacccggcggctgagcggcttcctgcggaccctggccgaccggctggagggcaccaaggagctgctgagcagtgacatgaagaaggacttcatcatgcaccggctgcccccctacagcgctggagatggagctgagctgagcaccccaggcggcaagctgccccggctggacagcgtggtgcggctgcagttcaaggaccacatcgtgctgactgtgctgcctgaccaggaccagagtgatgaggcccaggagaagatggtgtacatctaccacagcctgaagaacagccgggagacccacatgatgggaaatgaggaggagacagagttccacggcctgcgcttccccctgagccacctggatgccctgaagcagatctggaacagccctgccatctctgtgaaggacctgaagctgaccacagatgaggagaaggagagcctggtgctgagcctgtggacagaatgtctcatccaggtggtgtag

SEQ ID NO: 160449 - DNA, 1395 bp, synthetic construct
  misc_feature 1..1395: note = Description of Artificial Sequence: Synthetic coding sequence
  source 1..1395: mol_type = other DNA
atgcccaagaaggccaagcccaccggcagcggcaaggaggagggccctgccccctgcaagcagatgaagctggaggccgccggcggccccagcgccctgaactttgacagccccagcagcctgtttgagagcctcatcagccccatcaagacagagaccttcttcaaggagttctgggagcagaagcccctgctgatccagagagatgatcctgccctggccacctactacggcagcctcttcaagctgacagacctgaagagcctgtgcagccggggcatgtactacggcagagatgtgaatgtgtgccgctgtgtgaatggcaagaagaaggtgctgaacaaggatggcaaggcccacttcctgcagctgaggaaggactttgaccagaagagggccaccatccagttccaccagccccagcgcttcaaggatgagctgtggaggatccaggagaagctggagtgctacttcggcagcctggtgggcagcaatgtgtacatcaccccagctggcagccagggcctgcccccccactatgatgatgtggaggtgttcatcctgcagctggagggggagaagcactggaggctgtaccaccccaccgtgcccctggcccgggagtacagcgtggaggccgaggagagaattggccggcctgtgcatgagttcatgctgaagccaggggacctgctgtacttcccccggggcaccatccaccaggccgacaccccagctggcctggcccacagcacccacgtgaccatcagcacctaccagaacaacagctggggagacttcctgctggacaccatcagcggcctggtgtttgacacagccaaggaggatgtggagctgaggacaggcatcccccggcagctgctgctggtggagagcaccaccgtggccacccggcggctgagcggcttcctgcggaccctggccgaccggctggagggcaccaaggagctgctgagcagtgacatgaagaaggacttcatcatgcaccggctgcccccctacagcgctggagatggagctgagctgagcacccctgggggcaagctgccccggctggacagcgtggtgcggctgcagttcaaggaccacatcgtgctgactgtgctgcctgaccaggaccagagtgatgaggcccaggagaagatggtgtacatctaccacagcctgaagaacagccgggagacccacatgatgggaaatgaggaggagacagagttccacggcctgcgcttccccctgagccacctggatgccctgaagcagatctggaacagccctgccatctctgtgaaggacctgaagctgaccacagatgaggagaaggagagcctggtgctgagcctgtggacagagtgcctgatccaggtggtgtag

SEQ ID NO: 160450 - DNA, 1398 bp, synthetic construct; identical to SEQ ID NO: 160448
  misc_feature 1..1398: note = Description of Artificial Sequence: Synthetic coding sequence
  source 1..1398: mol_type = other DNA

SEQ ID NO: 160451 - DNA, 636 bp, synthetic construct
  misc_feature 1..636: note = Description of Artificial Sequence: Synthetic coding sequence
  source 1..636: mol_type = other DNA
atgctgctgcaggtgccctgcaacagctggggagacttcctgctggacaccatcagcggcctggtgtttgacacagccaaggaggatgtggagctgaggacaggcatcccccggcagctgctgctgcaggtggagagcaccaccgtggccacccggcggctgagcggcttcctgcggaccctggccgaccggctggagggcaccaaggagctgctgagcagtgacatgaagaaggacttcatcatgcaccggctgcccccctacagcgctggagatggagctgagctgagcaccccaggcggcaagctgccccggctggacagcgtggtgcggctgcagttcaaggaccacatcgtgctgactgtgctgcctgaccaggaccagagtgatgaggcccaggagaagatggtgtacatctaccacagcctgaagaacagccgggagacccacatgatgggaaatgaggaggagacagagttccacggcctgcgcttccccctgagccacctggatgccctgaagcagatctggaacagccctgccatctctgtgaaggacctgaagctgaccacagatgaggagaaggagagcctggtgctgagcctgtggacagaatgtctcatccaggtggtgtag

SEQ ID NO: 160452 - DNA, 339 bp, synthetic construct
  misc_feature 1..339: note = Description of Artificial Sequence: Synthetic coding sequence
  source 1..339: mol_type = other DNA
atgcccaagaaggccaagcccaccggcagcggcaaggaggagggccctgccccctgcaagcagatgaagctggaggccgccggcggccccagcgccctgaactttgacagccccagcagcctgtttgagagcctcatcagccccatcaagacagagaccttcttcaaggagttctgggagcagaagcccctgctgatccagagagatgatcctgccctggccacctactacggcagcctcttcaagctgacagacctgaagagcctgtgcagccggggcatgtactacggcagagatgtgaatgtgtgccgctgtgtgaatggcaagaagaaggtgtag

SEQ ID NO: 160453 - DNA, 459 bp, synthetic construct
  misc_feature 1..459: note = Description of Artificial Sequence: Synthetic coding sequence
  source 1..459: mol_type = other DNA
atgggcccccccagcctgcacagccccacccccagcctgggccccctgggcgccctggtgctgagcagccagcacaccagcccagacagctgcaagagcccctggaccctgaaggctgtgcgggccgcccggcaggccgctgacttcaccctgaaggtggaggtggagtgcagcagcctgcaggaggccgtgcaggccgctgaggccggggctgacctggtgctgctggacaacttcaagccagaggagctgcaccccacagccaccgtgctgaaggcccagttccccagcgtggccgtggaggccagcggcggcatcaccctggacaacctgccccagttctgtggcccccacattgatgtgatctccatgggcatgctgacccaggccgccccagccctggacttcagcctgaagctgtttgccaaggaggtggcccctgtgcccaagatccactag

SEQ ID NO: 160454 - DNA, 1434 bp, synthetic construct
  misc_feature 1..1434: note = Description of Artificial Sequence: Synthetic coding sequence
  source 1..1434: mol_type = other DNA
atgtttcctgtgttcccctgcaccctgctggccccacccttccctgtgctgggcctggacagcagaggagtgggcggcctgatgaacagcttccccccaccccagggccacgcccagaaccccctgcaggtgggcgctgagctgcagagccgcttctttgccagccagggctgtgcccagagccccttccaggccgccccagcccccccacccaccccccaggccccagctgctgagcccctgcaggtggacctgctgcctgtgctggccgccgcccaggagagcgctgctgctgctgctgctgctgctgctgctgctgctgctgtggccgccgcccccccagccccagctgctgccagcacagtggacacagctgccctgaagcagcccccagcccctcctcctcctcctcctcctgtgtctgccccagctgctgaggccgcccccccagccagcgctgccaccatcgctgctgctgctgccacagctgtggtggcccccaccagcacagtggccgtggcccctgtggccagcgccctggagaagaagaccaagagcaagggcccctacatctgtgccctgtgtgccaaggagttcaagaatggctacaacctgcggagacatgaggccatccacactggagccaaggccggccgggtgcccagcggggccatgaagatgcccaccatggtgcccctgagcctgctgtctgtgccccagctgagcggggccggcggcggcggcggggaggccggggccggcggcggcgctgctgctgtggccgccggcggcgtggtgaccaccacagccagcggcaagaggatcaggaagaaccacgcctgtgagatgtgtgggaaggccttcagagatgtgtaccacctgaacagacacaagctgagccacagtgatgagaagccctaccagtgccctgtgtgccagcagcgcttcaagaggaaggacaggatgagctaccacgtgcgcagccatgatggagctgtgcacaagccctacaactgcagccactgtgggaagagcttcagcaggccagaccacctgaacagccacgtgcggcaggtgcacagcacagagcggcccttcaagtgtgagaagtgtgaggccgcctttgccaccaaggaccggctgcgggcccacacagtgagacatgaggagaaggtgccctgccacgtgtgtgggaagatgctgagcagcgcctacatcagtgaccacatgaaggtgcacagccagggcccccaccacgtgtgtgagctgtgcaacaagggcaccggggaggtgtgccccatggctgctgctgctgctgctgctgctgctgctgctgctgctgctgtggccgccccacccacagctgtgggcagcctgagcggggctgagggcgtgcctgtgagcagccagcccctgcccagccagccctggtag

SEQ ID NO: 160455 - DNA, 759 bp, synthetic construct
  misc_feature 1..759: note = Description of Artificial Sequence: Synthetic coding sequence
  source 1..759: mol_type = other DNA
atgaagatgcccaccatggtgcccctgagcctgctgtctgtgccccagctgagcggggccggcggcggcggcggggaggccggggccggcggcggcgctgctgctgtggccgccggcggcgtggtgaccaccacagccagcggcaagaggatcaggaagaaccacgcctgtgagatgtgtgggaaggccttcagagatgtgtaccacctgaacagacacaagctgagccacagtgatgagaagccctaccagtgccctgtgtgccagcagcgcttcaagaggaaggacaggatgagctaccacgtgcgcagccaccggcgctgtgccaagccctacaactgcagccactgcggcaagagcttcagcaggccagaccacctgaacagccacgtgcggcaggtgcacagcacagagcggcccttcaagtgtgagaagtgtgaggccgcctttgccaccaaggaccggctgcgggcccacacagtgagacatgaggagaaggtgccctgccacgtgtgtgggaagatgctgagcagcgcctacatcagtgaccacatgaaggtgcacagccagggcccccaccacgtgtgtgagctgtgcaacaagggcactggagaggtgtgccccatggctgctgctgctgctgctgctgctgctgctgctgctgctgctgtggccgccccacccacagctgtgggcagcctgtctggagctgagggcgtgcctgtgagcagccagcccctgcccagccagccctggtag

SEQ ID NO: 160456 - DNA, 1365 bp, synthetic construct
  misc_feature 1..1365: note = Description of Artificial Sequence: Synthetic coding sequence
  source 1..1365: mol_type = other DNA
atggaccccagcaactggagcagcttcatcttccagggccacgcccagaaccccctgcaggtgggcgctgagctgcagagccgcttctttgccagccagggctgtgcccagagccccttccaggccgccccagcccccccacccaccccccaggccccagctgctgagcccctgcaggtggacctgctgcctgtgctggccgccgcccaggagagcgctgctgctgctgctgctgctgctgctgctgctgctgctgtggccgccgcccccccagccccagctgctgccagcacagtggacacagctgccctgaagcagcccccagcccctcctcctcctcctcctcctgtgtctgccccagctgctgaggccgcccccccagccagcgctgccaccatcgctgctgctgctgccacagctgtggtggcccccaccagcacagtggccgtggcccctgtggccagcgccctggagaagaagaccaagagcaagggcccctacatctgtgccctgtgtgccaaggagttcaagaatggctacaacctgcggagacatgaggccatccacactggagccaaggccggccgggtgcccagcggggccatgaagatgcccaccatggtgcccctgagcctgctgtctgtgccccagctgtctggagctgggggcggcggcggggaggccggggccggcggcggcgctgctgctgtggccgccggcggcgtggtgaccaccacagccagcggcaagaggatcaggaagaaccacgcctgtgagatgtgtgggaaggccttcagagatgtgtaccacctgaacagacacaagctgagccacagtgatgagaagccctaccagtgccctgtgtgccagcagcgcttcaagaggaaggacaggatgagctaccacgtgcgcagccatgatggagctgtgcacaagccctacaactgcagccactgcggcaagagcttcagcaggccagaccacctgaacagccacgtgcggcaggtgcacagcacagagcggcccttcaagtgtgagaagtgtgaggccgcctttgccaccaaggaccggctgcgggcccacacagtgagacatgaggagaaggtgccctgccacgtgtgtgggaagatgctgagcagcgcctacatcagtgaccacatgaaggtgcacagccagggcccccaccacgtgtgtgagctgtgcaacaagggcactggagaggtgtgccccatggctgctgctgctgctgctgctgctgctgctgctgctgctgctgtggccgccccacccacagctgtgggcagcctgtctggagctgagggcgtgcctgtgagcagccagcccctgcccagccagccctggtag

SEQ ID NO: 160457 - DNA, 2955 bp, synthetic construct
  misc_feature 1..2955: note = Description of Artificial Sequence: Synthetic coding sequence
  source 1..2955: mol_type = other DNA
atgagggccccagcccggggcaccggctgctgcggccgcagcggcggccgctggctggccggggccgcccagccccgctgcctgtgggccggcggggccggccagcgcttcatggtgcctgggggcaccatgaagagcctgaagaaggacagccggctgcgcatcacccccacccggctgctggaggcctctgaaaatgtgaaggagaagaagagggccaagggccctgagcagcccacccccaccatccaggaggagcctgagcctgtgtccaatgtgctgcagggagatgacatcctggccctggccatcaagaaggaggacctgaaggagcagcacatcccccggctgacagagaaggaggacaagagggtcatcacccagaagttcatcatcaggaagctgaagcccatggaccccaggaggaaggtgtgccacctggtggcccggcctgccaacccagatgaggccaccaagcccctggactacagcggccctggggacagctttgatggcagtgaccagatcctgccccaccacatcctgggcagcctgcaggacttcaagagaattgccctggcccggggcaacacccagctggccgagcgcatccccaccagcccctgcctgatgaccctcatctctgctgagggggagagcaagcagaaggcccccaaggaggagaagaggcctccctgggcccccccaccccagcacaacttcctgaagaactggcagaggaacacagccctgaggaagaagcagcaggaggccctgtctgagcacctgaagaagcctgtgtctgagctgctgatgcacactggagagacctaccgccgcatccaggaggagcgggagctgattgactgcaccctgcccacccggcgggacaggaagtcctgggagaacagcggcttctggagccggctggagtacctgggagatgagatgacaggcctggtgatgaccaagaccaagacccagaggggcctgatggagcccatcacccacatcaggaagccccacagcatccgggtggagaccggcctgcctgcccagagagatgccagctaccgctacacctgggacaggagcctcttcctgatctacagaaggaaggagctgcagaggatcatggaggagctggacttcagccagcaggacattgatggcctggaggtggtgggcaagggctggcccttctctgctgtgacagtggaggactacacagtgtttgagaggagccagggcagcagcagcgaggacacagcctacctgggcaccctggccagcagcagtgatgtgtccatgcccatcctgggccccagcctgctcttctgtgggaagccagcctgctggatccggggcagcaacccccaggacaagaggcaggtgggcattgctgcccacctgacctttgagaccctggagggggagaagaccagcagcgagctgactgtggtgaacaacggcaccgtggccatctggtatgactggaggcggcagcaccagcctgacaccttccaggacctgaagaagaacaggatgcagcgcttctactttgacaaccgggagggcgtcatcctgcccggggagatcaagaccttcaccttcttcttcaagagcctgacagctggggtcttccgggagttctgggagttccgcacccaccccaccctgctgggcggggccatcctgcaggtgaacctgcatgctgtgtccctgacccaggatgtgtttgaagatgagaggaaggtgctggagagcaagctgacagcccacgaggccgtgacagtggtgcgggaggtgctgcaggagctgctgatgggcgtgctgaccccagagaggacccccagccctgtggatgcctacctgacagaggaggacctcttccgccacaggaacccccccctgcactatgagcaccaggtggtgcagagcctgcaccagctgtggaggcagtacatgaccctgcctgccaaggccgaggaggcccggcctggggacaaggagcacgtgagccccatcgccacagagaaggcctctgtgaatgctgagctgctgccccgcttccgcagccccatcagcgagacccaggtgcccaggccagaaaatgaggccctgcgggagagcggcagccagaaggcccgggtgggcaccaagagcccccagaggaagagcatcatggaggagatcctggtggaggagagcccagatgtggacagcaccaagagcccctgggagccagatggcctgcccctgctggagtggaacctgtgcctggaggacttcaggaaggctgtgatggtgctgcctgatgagaaccaccgggaggatgccctgatgaggctgaacaaggccgccctggagctgtgccagaagccccggcccctgcagagcaacctgctgcaccagatgtgcctgcagctgtggagagatgtgattgacagcctggtgggccacagcatgtggctgcggtctgtgctgggcctgcctgagaaggagaccatctacctgaatgtgcctgaggagcaggaccagaagagcccccccatcatggaggtgaaggtgcctgtgggcaaggccggcaaggaggagaggaagggggccgcccaggagaagaagcagctgggcatcaaggacaaggaggacaagaagggggccaagctgctgggcaaggaggaccggcccaacagcaagaagcacaaggccaaggatgacaagaaggtgatcaagagcgccagccaggaccgcttcagcctggaggaccccaccccagacatcatcctgagcagccaggagcccatcgaccccctggtgatgggcaagtacacccagagcctgcacagcgaggtgcggggcctgctggacaccctggtgacagacctgatggtgctggctgatgagctgagccccatcaagaatgtggaggaggccctgcggctgtgcaggtag

SEQ ID NO: 160458 - DNA, 2829 bp, synthetic construct
  misc_feature 1..2829: note = Description of Artificial Sequence: Synthetic coding sequence
  source 1..2829: mol_type = other DNA
atggtgcctgggggcaccatgaagagcctgaagaaggacagccggctgcgcatcacccccacccggctgctggaggcctctgaaaatgtgaaggagaagaagagggccaagggccctgagcagcccacccccaccatccaggaggagcctgagcctgtgtccaatgtgctgcagggagatgacatcctggccctggccatcaagaaggaggacctgaaggagcagcacatcccccggctgacagagaaggaggacaagagggtcatcacccagaagttcatcatcaggaagctgaagcccatggaccccaggaggaaggtgtgccacctggtggcccggcctgccaacccagatgaggccaccaagcccctggactacagcggccctggggacagctttgatggcagtgaccagatcctgccccaccacatcctgggcagcctgcaggacttcaagagaattgccctggcccggggcaacacccagctggccgagcgcatccccaccagcccctgcctgatgaccctcatctctgctgagggggagagcaagcagaaggcccccaaggaggagaagaggcctccctgggcccccccaccccagcacaacttcctgaagaactggcagaggaacacagccctgaggaagaagcagcaggaggccctgtctgagcacctgaagaagcctgtgtctgagctgctgatgcacactggagagacctaccgccgcatccaggaggagcgggagctgattgactgcaccctgcccacccggcgggacaggaagtcctgggagaacagcggcttctggagccggctggagtacctgggagatgagatgacaggcctggtgatgaccaagaccaagacccagaggggcctgatggagcccatcacccacatcaggaagccccacagcatccgggtggagaccggcctgcctgcccagagagatgccagctaccgctacacctgggacaggagcctcttcctgatctacagaaggaaggagctgcagaggatcatggaggagctggacttcagccagcaggacattgatggcctggaggtggtgggcaagggctggcccttctctgctgtgacagtggaggactacacagtgtttgagaggagccagggcagcagcagcgaggacacagcctacctgggcaccctggccagcagcagtgatgtgtccatgcccatcctgggccccagcctgctcttctgtgggaagccagcctgctggatccggggcagcaacccccaggacaagaggcaggtgggcattgctgcccacctgacctttgagaccctggagggggagaagaccagcagcgagctgactgtggtgaacaatggaacagtggccatctggtatgactggaggcggcagcaccagcctgacaccttccaggacctgaagaagaacaggatgcagcgcttctactttgacaaccgggagggcgtcatcctgcctggagagatcaagaccttcaccttcttcttcaagagcctgacagctggggtcttccgggagttctgggagttccgcacccaccccaccctgctgggcggggccatcctgcaggtgaacctgcatgctgtgtccctgacccaggatgtgtttgaagatgagaggaaggtgctggagagcaagctgacagcccatgaagctgtgacagtggtgcgggaggtgctgcaggagctgctgatgggcgtgctgaccccagagaggacccccagccctgtggatgcctacctgacagaagaagatctcttccgccacagaaatccacccctgcactatgagcaccaggtggtgcagagcctgcaccagctgtggaggcagtacatgaccctgcctgccaaggccgaggaggcccggcctggggacaaggagcacgtgagccccatcgccacagagaaggcctctgtgaatgctgagctgctgccccgcttccgcagccccatcagcgagacccaggtgcccaggccagaaaatgaggccctgcgggagagcggcagccagaaggcccgggtgggcaccaagagcccccagaggaagagcatcatggaggagatcctggtggaggagagcccagatgtggacagcaccaagagcccctgggagccagatggcctgcccctgctggagtggaacctgtgcctggaggacttcaggaaggctgtgatggtgctgcctgatgagaaccacagagaagatgccctgatgaggctgaacaaggccgccctggagctgtgccagaagccccggcccctgcagagcaacctgctgcaccagatgtgcctgcagctgtggagagatgtgattgacagcctggtgggccacagcatgtggctgcggtctgtgctgggcctgcctgagaaggagaccatctacctgaatgtgcctgaggagcaggaccagaagagcccccccatcatggaggtgaaggtgcctgtgggcaaggccggcaaggaggagaggaaaggagctgcccaggagaagaagcagctgggcatcaaggacaaggaggacaagaagggggccaagctgctgggcaaggaggaccggcccaacagcaagaagcacaaggccaaggatgacaagaaggtgatcaagagcgccagccaggaccgcttcagcctggaggaccccaccccagacatcatcctgagcagccaggagcccatcgaccccctggtgatgggcaagtacacccagagcctgcacagcgaggtgcaccctggccgctgtgtgccctgggagaacaccatgcagggcgccttccccagcaccacccgctgtggcggcagctgcctgtag

SEQ ID NO: 160459 - DNA, 1992 bp, synthetic construct
  misc_feature 1..1992: note = Description of Artificial Sequence: Synthetic coding sequence
  source 1..1992: mol_type = other DNA
cgcagcagaggagctgaggccacagagagcaagctgagcggcggcttccgctggacccagaagaccagccccacccagggcgacagcgccatcacccacagcctgtacaggatgatcttcctgacagccctgcccctcttctggatcatgatcagcgccagccggggcggccactggggcgcctggatgcccagcagcatcagcgcctttgagggcacctgtgtgtccatcccctgccgctttgacttcccagatgagctgcggcctgctgtggtgcatggagtgtggtacttcaacagcccctaccccaagaactacccacctgtggtgttcaagagcaggacccaggtggtgcatgagagcttccagggccgcagccggctgctgggggacctgggcctgaggaactgcaccctgctgctgagcaatgtgtccccagagctgggcggcaagtactacttccggggggacctgggcggctacaaccagtacaccttcagcgagcacagcgtgctggacatcgtgaacacccccaacatcgtggtgcccccagaggtggtggccggcacagaggtggaggtgtcctgcatggtgcctgacaactgcccagagctgcggcctgagctgtcctggctgggccacgagggcctgggggagcctgctgtgctgggccgcctgcgggaggatgagggcacctgggtgcaggtgtccctgctgcactttgtgcccacccgggaggccaacggccaccggctgggctgccaggccagcttccccaacaccaccctgcagtttgagggctacgcctccatggatgtgaagtacccacctgtgattgtggagatgaacagctctgtggaggccatcgagggcagccacgtgtccctgctgtgtggggctgacagcaaccccccacccctgctgacctggatgagagatggcaccgtgctgcgggaggccgtggccgagagcctgctgctggagctggaggaggtgaccccagcagaagatggagtgtatgcctgcctggctgaaaatgcctacggccaggacaacagaacagtgggcctgtctgtgatgtatgccccctggaagcccaccgtgaatggcaccatggtggccgtggagggggagaccgtgtccatcctgtgcagcacccagagcaacccagaccccatcctgaccatcttcaaggagaagcagatcctgagcaccgtcatctatgagagcgagctgcagctggagctgcctgctgtgtccccagaagatgatggagagtactggtgtgtggccgagaaccagtatggccagagggccacagccttcaacctgtctgtggagtttgcccctgtgctgctgctggagagccactgtgccgccgcccgggacacagtgcagtgcctgtgtgtggtgaagagcaaccctgagcccagcgtggcctttgagctgcccagcagaaatgtgacagtgaatgaaagtgagcgggagtttgtgtacagcgagaggagcggcctggtgctgaccagcatcctgaccctgcggggccaggcccaggccccacccagggtcatctgcacagccaggaacctgtatggagccaagagcctggagctgcccttccagggcgcccaccggctgatgtgggccaagattggccctgtgggcgctgtggtggcctttgccatcctgattgccatcgtgtgctacatcacccagaccaggaggaagaagaatgtgacagagagccccagcttctctgctggggacaacccccctgtgctcttcagcagtgacttccgcatcagcggggcccctgagaagtatgagagcgagcggcggctgggcagcgagcggcggctgctgggcctgcggggggagcccccagagctggacctgagctacagccacagcgacctgggcaagaggcccaccaaggacagctacaccctgacagaggagctggccgagtatgcagagatccgggtgaagtag

SEQ ID NO: 160460 - DNA, 1749 bp, synthetic construct
  misc_feature 1..1749: note = Description of Artificial Sequence: Synthetic coding sequence
  source 1..1749: mol_type = other DNA
atgatcttcctgacagccctgcccctcttctggatcatgatcagcgccagcagaggaggccactggggcgcctggatgcccagcagcatcagcgcctttgagggcacctgtgtgtccatcccctgccgctttgacttcccagatgagctgcggcctgctgtggtgcacggcgtgtggtacttcaacagcccctaccccaagaactacccacctgtggtgttcaagagcaggacccaggtggtgcatgagagcttccagggccgcagccggctgctgggggacctgggcctgaggaactgcaccctgctgctgagcaatgtgtccccagagctgggcggcaagtactacttccggggggacctgggcggctacaaccagtacaccttcagcgagcacagcgtgctggacatcgtgaacacccccaacatcgtggtgcccccagaggtggtggccggcacagaggtggaggtgtcctgcatggtgcctgacaactgcccagagctgcggcctgagctgtcctggctgggccacgagggcctgggggagcctgctgtgctgggccgcctgagagaagatgagggcacctgggtgcaggtgtccctgctgcactttgtgcccacccgggaggccaacggccaccggctgggctgccaggccagcttccccaacaccaccctgcagtttgagggctacgcctccatggatgtgaagtacccacctgtgattgtggagatgaacagctctgtggaggccatcgagggcagccacgtgtccctgctgtgtggggctgacagcaaccccccacccctgctgacctggatgagagatggcaccgtgctgcgggaggccgtggccgagagcctgctgctggagctggaggaggtgaccccagcagaagatggagtgtatgcctgcctggccgagaatgcctacggccaggacaacagaacagtgggcctgtctgtgatgtatgccccctggaagcccaccgtgaatggcaccatggtggccgtggagggggagaccgtgtccatcctgtgcagcacccagagcaacccagaccccatcctgaccatcttcaaggagaagcagatcctgagcaccgtcatctatgaaagtgagctgcagctggagctgcctgctgtgtccccagaagatgatggagagtactggtgtgtggccgagaaccagtatggccagagggccacagccttcaacctgtctgtggagtttgcccctgtgctgctgctggagagccactgtgccgccgcccgggacacagtgcagtgcctgtgtgtggtgaagagcaaccctgagcccagcgtggcctttgagctgcccagcagaaatgtgacagtgaatgaaagtgagcgggagtttgtgtacagcgagaggagcggcctggtgctgaccagcatcctgaccctgcggggccaggcccaggccccacccagggtcatctgcacagccaggaacctgtatggagccaagagcctggagctgcccttccagggcgcccaccggctgatgtgggccaagattggccctgtgggcgctgtggtggcctttgccatcctgattgccatcgtgtgctacatcacccagaccaggaggaagaagaatgtgacagagagccccagcttctctgctggggacaacccccctgtgctcttcagcagtgacttccgcatcagcggggcccctgagaagtatgagagcaaggaggtgtccaccctggagagccactag

SEQ ID NO: 160461 - DNA, 1881 bp, synthetic construct
  misc_feature 1..1881: note = Description of Artificial Sequence: Synthetic coding sequence
  source 1..1881: mol_type = other DNA
atgatcttcctgacagccctgcccctcttctggatcatgatcagcgccagcagaggaggccactggggcgcctggatgcccagcagcatcagcgcctttgagggcacctgtgtgtccatcccctgccgctttgacttcccagatgagctgcggcctgctgtggtgcacggcgtgtggtacttcaacagcccctaccccaagaactacccacctgtggtgttcaagagcaggacccaggtggtgcatgagagcttccagggccgcagccggctgctgggggacctgggcctgaggaactgcaccctgctgctgagcaatgtgtccccagagctgggcggcaagtactacttccggggggacctgggcggctacaaccagtacaccttcagcgagcacagcgtgctggacatcgtgaacacccccaacatcgtggtgcccccagaggtggtggccggcacagaggtggaggtgtcctgcatggtgcctgacaactgcccagagctgcggcctgagctgtcctggctgggccacgagggcctgggggagcctgctgtgctgggccgcctgagagaagatgagggcacctgggtgcaggtgtccctgctgcactttgtgcccacccgggaggccaacggccaccggctgggctgccaggccagcttccccaacaccaccctgcagtttgagggctacgcctccatggatgtgaagtacccacctgtgattgtggagatgaacagctctgtggaggccatcgagggcagccacgtgtccctgctgtgtggggctgacagcaaccccccacccctgctgacctggatgagagatggcaccgtgctgcgggaggccgtggccgagagcctgctgctggagctggaggaggtgaccccagcagaagatggagtgtatgcctgcctggccgagaatgcctacggccaggacaacagaacagtgggcctgtctgtgatgtatgccccctggaagcccaccgtgaatggcaccatggtggccgtggagggggagaccgtgtccatcctgtgcagcacccagagcaacccagaccccatcctgaccatcttcaaggagaagcagatcctgagcaccgtcatctatgaaagtgagctgcagctggagctgcctgctgtgtccccagaagatgatggagagtactggtgtgtggccgagaaccagtatggccagagggccacagccttcaacctgtctgtggagtttgcccctgtgctgctgctggagagccactgtgccgccgcccgggacacagtgcagtgcctgtgtgtggtgaagagcaaccctgagcccagcgtggcctttgagctgcccagcagaaatgtgacagtgaatgaaagtgagcgggagtttgtgtacagcgagaggagcggcctggtgctgaccagcatcctgaccctgcggggccaggcccaggccccacccagggtcatctgcacagccaggaacctgtatggagccaagagcctggagctgcccttccagggcgcccaccggctgatgtgggccaagattggccctgtgggcgctgtggtggcctttgccatcctgattgccatcgtgtgctacatcacccagaccaggaggaagaagaatgtgacagagagccccagcttctctgctggggacaacccccctgtgctcttcagcagtgacttccgcatcagcggggcccctgagaagtatgaaagtgaaagaaggctgggcagcgagcggcggctgctgggcctgcggggggagcccccagagctggacctgagctacagccacagcgacctgggcaagaggcccaccaaggacagctacaccctgacagaggagctggccgagtatgcagagatccgggtgaagtag

SEQ ID NO: 160462 - DNA, 1806 bp, synthetic construct
  misc_feature 1..1806: note = Description of Artificial Sequence: Synthetic coding sequence
  source 1..1806: mol_type = other DNA
atgcccagcagcatcagcgcctttgagggcacctgtgtgtccatcccctgccgctttgacttcccagatgagctgcggcctgctgtggtgcatggagtgtggtacttcaacagcccctaccccaagaactacccacctgtggtgttcaagagcaggacccaggtggtgcatgagagcttccagggccgcagccggctgctgggggacctgggcctgaggaactgcaccctgctgctgagcaatgtgtccccagagctgggcggcaagtactacttccggggggacctgggcggctacaaccagtacaccttcagcgagcacagcgtgctggacatcgtgaacacccccaacatcgtggtgcccccagaggtggtggccggcacagaggtggaggtgtcctgcatggtgcctgacaactgcccagagctgcggcctgagctgtcctggctgggccacgagggcctgggggagcctgctgtgctgggccgcctgcgggaggatgagggcacctgggtgcaggtgtccctgctgcactttgtgcccacccgggaggccaacggccaccggctgggctgccaggccagcttccccaacaccaccctgcagtttgagggctacgcctccatggatgtgaagtacccacctgtgattgtggagatgaacagctctgtggaggccatcgagggcagccacgtgtccctgctgtgtggggctgacagcaaccccccacccctgctgacctggatgagagatggcaccgtgctgcgggaggccgtggccgagagcctgctgctggagctggaggaggtgaccccagcagaagatggagtgtatgcctgcctggctgaaaatgcctacggccaggacaacagaacagtgggcctgtctgtgatgtatgccccctggaagcccaccgtgaatggcaccatggtggccgtggagggggagaccgtgtccatcctgtgcagcacccagagcaacccagaccccatcctgaccatcttcaaggagaagcagatcctgagcaccgtcatctatgagagcgagctgcagctggagctgcctgctgtgtccccagaagatgatggagagtactggtgtgtggccgagaaccagtatggccagagggccacagccttcaacctgtctgtggagtttgcccctgtgctgctgctggagagccactgtgccgccgcccgggacacagtgcagtgcctgtgtgtggtgaagagcaaccctgagcccagcgtggcctttgagctgcccagcagaaatgtgacagtgaatgaaagtgagcgggagtttgtgtacagcgagaggagcggcctggtgctgaccagcatcctgaccctgcggggccaggcccaggccccacccagggtcatctgcacagccaggaacctgtatggagccaagagcctggagctgcccttccagggcgcccaccggctgatgtgggccaagattggccctgtgggcgctgtggtggcctttgccatcctgattgccatcgtgtgctacatcacccagaccaggaggaagaagaatgtgacagagagccccagcttctctgctggggacaacccccctgtgctcttcagcagtgacttccgcatcagcggggcccctgagaagtatgagagcgagcggcggctgggcagcgagcggcggctgctgggcctgcggggggagcccccagagctggacctgagctacagccacagcgacctgggcaagaggcccaccaaggacagctacaccctgacagaggagctggccgagtatgcagagatccgggtgaagtag

SEQ ID NO: 160463 - DNA, 915 bp, synthetic construct
  misc_feature 1..915: note = Description of Artificial Sequence: Synthetic coding sequence
  source 1..915: mol_type = other DNA
atgggcaaccacgccggcaagcgggagctgaatgctgagaaggccagcaccaacagcgagaccaacagaggagagagcgagaagaagaggaacctgggggagctgagcaggaccaccagtgaagataatgaggtgtttggagaggctgatgccaaccagaacaacggcaccagcagccaggacacagctgtgacagacagcaagaggacagctgaccccaagaatgcctggcaggatgcccaccctgctgaccccggcagccggccccacctgatccgcctcttcagcagagatgcccctggaagagaggacaacaccttcaaggaccggcccagcgagagtgatgagctgcagaccatccaggaggacagcgctgccaccagcgagagcctggatgtgatggccagccagaagaggcccagccagagacatggcagcaagtacctggccacagccagcaccatggaccacgcccggcacggcttcctgcccaggcaccgggacaccggcatcctggacagcatcggccgcttctttggaggagacagaggagcccccaagaggggcagcggcaaggacagccaccacccagccaggacagcccactacggcagcctgccccagaagagccacggccgcacccaggatgaaaatcctgtggtgcacttcttcaagaacatcgtgacccccaggaccccaccacccagccagggcaagggccggggcctgagcctgagccgcttctcctggggcgctgagggccagaggcctggcttcggctatggaggccgggccagtgactacaagagcgcccacaagggcttcaagggcgtggatgcccagggcaccctgagcaagatcttcaagctgggcggccgggacagccgcagcggcagccccatggcccggaggtag

SEQ ID NO: 160464 - DNA, 561 bp, synthetic construct
  misc_feature 1..561: note = Description of Artificial Sequence: Synthetic coding sequence
  source 1..561: mol_type = other DNA
atggccagccagaagaggcccagccagagacatggcagcaagtacctggccacagccagcaccatggaccacgcccggcacggcttcctgcccaggcaccgggacaccggcatcctggacagcatcggccgcttcttcggcggggacagaggagcccccaagaggggcagcggcaaggtgccctggctgaagccaggccgcagccccctgcccagccacgcccggagccagcccggcctgtgcaacatgtacaaggacagccaccacccagccaggacagcccactacggcagcctgccccagaagagccacggccgcacccaggatgagaaccctgtggtgcacttcttcaagaacatcgtgacccccaggaccccaccacccagccagggcaaaggagctgagggccagaggcctggcttcggctatggaggccgggccagtgactacaagagcgcccacaagggcttcaagggcgtggatgcccagggcaccctgagcaagatcttcaagctgggcggccgggacagccgcagcggcagccccatggcccggaggtag

SEQ ID NO: 160465 - DNA, 594 bp, synthetic construct
  misc_feature 1..594: note = Description of Artificial Sequence: Synthetic coding sequence
  source 1..594: mol_type = other DNA
atggccagccagaagaggcccagccagagacatggcagcaagtacctggccacagccagcaccatggaccacgcccggcacggcttcctgcccaggcaccgggacaccggcatcctggacagcatcggccgcttcttcggcggggacagaggagcccccaagaggggcagcggcaaggtgccctggctgaagccaggccgcagccccctgcccagccacgcccggagccagcccggcctgtgcaacatgtacaaggacagccaccacccagccaggacagcccactacggcagcctgccccagaagagccacggccgcacccaggatgagaaccctgtggtgcacttcttcaagaacatcgtgacccccaggaccccaccacccagccagggcaagggccggggcctgagcctgagccgcttctcctggggcgctgagggccagaggcctggcttcggctacggcggccgggccagtgactacaagagcgcccacaagggcttcaagggcgtggatgcccagggcaccctgagcaagatcttcaagctgggcggccgggacagccgcagcggcagccccatggcccggaggtag

SEQ ID NO: 160466 - DNA, 594 bp, synthetic construct
  misc_feature 1..594: note = Description of Artificial Sequence: Synthetic coding sequence
  source 1..594: mol_type = other DNA
atgggcaaccacgccggcaagcgggagctgaatgctgagaaggccagcaccaacagcgagaccaacagaggagagagcgagaagaagaggaacctgggggagctgagcaggaccaccagtgaagataatgaggtgtttggagaggctgatgccaaccagaacaacggcaccagcagccaggacacagctgtgacagacagcaagaggacagctgaccccaagaatgcctggcaggatgcccaccctgctgaccccggcagccggccccacctgatccgcctcttcagcagagatgcccctggaagagaggacaacaccttcaaggaccggcccagcgagagtgatgagctgcagaccatccaggaggacagcgctgccaccagcgagagcctggatgtgatggccagccagaagaggcccagccagagacatggcagcaagtacctggccacagccagcaccatggaccacgcccggcacggcttcctgcccaggcaccgggacaccggcatcctggacagcatcggccgcttctttggaggagacagaggagcccccaagaggggcagcggcaaggtgtcctctgaggagtag

SEQ ID NO: 160467 - DNA, 594 bp, synthetic construct; identical to SEQ ID NO: 160466
  misc_feature 1..594: note = Description of Artificial Sequence: Synthetic coding sequence
  source 1..594: mol_type = other DNA

SEQ ID NO: 160468 - DNA, 483 bp, synthetic construct
  misc_feature 1..483: note = Description of Artificial Sequence: Synthetic coding sequence
  source 1..483: mol_type = other DNA
atggccagccagaagaggcccagccagagacatggcagcaagtacctggccacagccagcaccatggaccacgcccggcacggcttcctgcccaggcaccgggacaccggcatcctggacagcatcggccgcttcttcggcggggacagaggagcccccaagaggggcagcggcaaggacagccaccacccagccaggacagcccactacggcagcctgccccagaagagccacggccgcacccaggatgagaaccctgtggtgcacttcttcaagaacatcgtgacccccaggaccccaccacccagccagggcaaaggagctgagggccagaggcctggcttcggctatggaggccgggccagtgactacaagagcgcccacaagggcttcaagggcgtggatgcccagggcaccctgagcaagatcttcaagctgggcggccgggacagccgcagcggcagccccatggcccggaggtag

SEQ ID NO: 160469 - DNA, 516 bp, synthetic construct
  misc_feature 1..516: note = Description of Artificial Sequence: Synthetic coding sequence
  source 1..516: mol_type = other DNA
atggccagccagaagaggcccagccagagacatggcagcaagtacctggccacagccagcaccatggaccacgcccggcacggcttcctgcccaggcaccgggacaccggcatcctggacagcatcggccgcttcttcggcggggacagaggagcccccaagaggggcagcggcaaggacagccaccacccagccaggacagcccactacggcagcctgccccagaagagccacggccgcacccaggatgagaaccctgtggtgcacttcttcaagaacatcgtgacccccaggaccccaccacccagccagggcaagggccggggcctgagcctgagccgcttctcctggggcgctgagggccagaggcctggcttcggctacggcggccgggccagtgactacaagagcgcccacaagggcttcaagggcgtggatgcccagggcaccctgagcaagatcttcaagctgggcggccgggacagccgcagcggcagccccatggcccggaggtag

SEQ ID NO: 160470 - DNA, 261 bp, synthetic construct
  misc_feature 1..261: note = Description of Artificial Sequence: Synthetic coding sequence
  source 1..261: mol_type = other DNA
atggccagccagaagaggcccagccagagacatggcagcaagtacctggccacagccagcaccatggaccacgcccggcacggcttcctgcccaggcaccgggacaccggcatcctggacagcatcggccgcttcttcggcggggacagaggagcccccaagaggggcagcggcaaggacagccaccacccagccaggacagcccactacggcagcctgccccagaagagccacggccgcacccaggatgagaacccctag

SEQ ID NO: 160471 - DNA, 888 bp, synthetic construct
  misc_feature 1..888: note = Description of Artificial Sequence: Synthetic coding sequence
  source 1..888: mol_type = other DNA
atggccagcctgagccggcccagcctgcccagctgcctgtgcagcttcctgctgctgctgctgctgcaggtgagcagcagctatgccggccagttccgggtgattggccccaggcaccccatccgggccctggtgggagatgaggtggagctgccctgccgcatcagccctgggaagaatgccaccggcatggaggtgggctggtacagaccacccttcagccgggtggtgcacctgtacagaaatggcaaggaccaggatggagaccaggcccctgagtaccggggccgcacagagctgctgaaggatgccatcggggagggcaaggtgaccctgcgcatcagaaatgtgcgcttcagtgatgaaggaggcttcacctgcttcttccgggaccacagctaccaggaggaggccgccatggagctgaaggtggaggaccccttctactgggtgtccccaggagtgctggtgctgctggccgtgctgcctgtgctgctgctgcagatcaccgtgggcctggtgttcctgtgcctgcagtaccgcctgcggggcaagctgcgggcagaaattgagaacctgcacaggacctttgacccccacttcctgcgggtgccctgctggaagatcaccctcttcgtcatcgtgcctgtgctgggccccctggtggccctgatcatctgctacaactggctgcaccggcggctggccggccagttcctggaggagctgaggaagttcagcagcctgtgctacaagcagaggatcaagagccaggagcgggagacagaggccacccggggccggggcggcctgctgcgggaccacatcccccggggcaaggaggagctggagagcctgggcggcggcaagaccccacctggaagatag

SEQ ID NO: 160472 - DNA, 642 bp, synthetic construct
  misc_feature 1..642: note = Description of Artificial Sequence: Synthetic coding sequence
  source 1..642: mol_type = other DNA
atggccagcctgagccggcccagcctgcccagctgcctgtgcagcttcctgctgctgctgctgctgcaggtgagcagcagctatgccggccagttccgggtgattggccccaggcaccccatccgggccctggtgggagatgaggtggagctgccctgccgcatcagccctgggaagaatgccaccggcatggaggtgggctggtacagaccacccttcagccgggtggtgcacctgtacagaaatggcaaggaccaggatggagaccaggcccctgagtaccggggccgcacagagctgctgaaggatgccatcggggagggcaaggtgaccctgcgcatcagaaatgtgcgcttcagtgatgaaggaggcttcacctgcttcttccgggaccacagctaccaggaggaggccgccatggagctgaaggtggaggaccccttctactgggtgtccccaggagtgctggtgctgctggccgtgctgcctgtgctgctgctgcagatcaccgtgggcctggtgttcctgtgcctgcagtaccgcctgcggggcaagctgcgggcagaaattgagaacctgcacaggaccttcggccagttcctggaggagctgctcttccacctggaggccctgagcggctag

SEQ ID NO: 160473 - DNA, 396 bp, synthetic construct
  misc_feature 1..396: note = Description of Artificial Sequence: Synthetic coding sequence
  source 1..396: mol_type = other DNA
atggccagcctgagccggcccagcctgcccagctgcctgtgcagcttcctgctgctgctgctgctgcaggtgagcagcagctatgctgaccccttctactgggtgtccccaggagtgctggtgctgctggccgtgctgcctgtgctgctgctgcagatcaccgtgggcctcatcttcctgtgcctgcagtaccgcctgcggggcaagctgcgggcagaaattgagaacctgcacaggacctttgacccccacttcctgcgggtgccctgctggaagatcaccctcttcgtcatcgtgcctgtgctgggccccctggtggccctgatcatctgctacaactggctgcaccggcggctggccggccagttcctggaggagctgaggaaccccttctag

SEQ ID NO: 160474 - DNA, 621 bp, synthetic construct
  misc_feature 1..621: note = Description of Artificial Sequence: Synthetic coding sequence
  source 1..621: mol_type = other DNA
atggccagcctgagccggcccagcctgcccagctgcctgtgcagcttcctgctgctgctgctgctgcaggtgagcagcagctatgccggccagttccgggtgattggccccaggcaccccatccgggccctggtgggagatgaggtggagctgccctgccgcatcagccctgggaagaatgccaccggcatggaggtgggctggtacagaccacccttcagccgggtggtgcacctgtacagaaatggcaaggaccaggatggagaccaggcccctgagtaccggggccgcacagagctgctgaaggatgccatcggggagggcaaggtgaccctgcgcatcagaaatgtgcgcttcagtgatgaaggaggcttcacctgcttcttccgggaccacagctaccaggaggaggccgccatggagctgaaggtggaggaccccttctactgggtgtccccaggagtgctggtgctgctggccgtgctgcctgtgctgctgctgcagatcaccgtgggcctcatcttcctgtgcctgcagtaccgcctgcggggcaagctgcgggcagaaattgagaacctgcacaggacctttgtgttccacctggaggccctgtctggatag

SEQ ID NO: 160475 - DNA, 759 bp, synthetic construct
  misc_feature 1..759: note = Description of Artificial Sequence: Synthetic coding sequence
  source 1..759: mol_type = other DNA
atggccagcctgagccggcccagcctgcccagctgcctgtgcagcttcctgctgctgctgctgctgcaggtgagcagcagctatgccggccagttccgggtgattggccccaggcaccccatccgggccctggtgggagatgaggtggagctgccctgccgcatcagccctgggaagaatgccaccggcatggaggtgggctggtacagaccacccttcagccgggtggtgcacctgtacagaaatggcaaggaccaggatggagaccaggcccctgagtaccggggccgcacagagctgctgaaggatgccatcggggagggcaaggtgaccctgcgcatcagaaatgtgcgcttcagtgatgaaggaggcttcacctgcttcttccgggaccacagctaccaggaggaggccgccatggagctgaaggtggaggaccccttctactgggtgtccccaggagtgctggtgctgctggccgtgctgcctgtgctgctgctgcagatcaccgtgggcctcatcttcctgtgcctgcagtaccgcctgcggggcaagctgcgggcagaaattgagaacctgcacaggacctttgacccccacttcctgcgggtgccctgctggaagatcaccctcttcgtcatcgtgcctgtgctgggccccctggtggccctgatcatctgctacaactggctgcaccggcggctggccggccagttcctggaggagctgctcttccacctggaggccctgtctggatag

SEQ ID NO: 160476 - DNA, 516 bp, synthetic construct
  misc_feature 1..516: note = Description of Artificial Sequence: Synthetic coding sequence
  source 1..516: mol_type = other DNA
atggccagcctgagccggcccagcctgcccagctgcctgtgcagcttcctgctgctgctgctgctgcaggtgagcagcagctatgccggccagttccgggtgattggccccaggcaccccatccgggccctggtgggagatgaggtggagctgccctgccgcatcagccctgggaagaatgccaccggcatggaggtgggctggtacagaccacccttcagccgggtggtgcacctgtacagaaatggcaaggaccaggatggagaccaggcccctgagtaccggggccgcacagagctgctgaaggatgccatcggggagggcaaggtgaccctgcgcatcagaaatgtgcgcttcagtgatgaaggaggcttcacctgcttcttccgggaccacagctaccaggaggaggccgccatggagctgaaggtggaggtgagccacagcgtgacccaggactggctgcagtggcatgaccacggcagcctgcagcccccaccaccccggctgaagtag

SEQ ID NO: 160477 - DNA, 744 bp, synthetic construct
  misc_feature 1..744: note = Description of Artificial Sequence: Synthetic coding sequence
  source 1..744: mol_type = other DNA
atggccagcctgagccggcccagcctgcccagctgcctgtgcagcttcctgctgctgctgctgctgcaggtgagcagcagctatgccggccagttccgggtgattggccccaggcaccccatccgggccctggtgggagatgaggtggagctgccctgccgcatcagccctgggaagaatgccaccggcatggaggtgggctggtacagaccacccttcagccgggtggtgcacctgtacagaaatggcaaggaccaggatggagaccaggcccctgagtaccggggccgcacagagctgctgaaggatgccatcggggagggcaaggtgaccctgcgcatcagaaatgtgcgcttcagtgatgaaggaggcttcacctgcttcttccgggaccacagctaccaggaggaggccgccatggagctgaaggtggaggaccccttctactgggtgtccccaggagtgctggtgctgctggccgtgctgcctgtgctgctgctgcagatcaccgtgggcctcatcttcctgtgcctgcagtaccgcctgcggggcaagctgcgggcagaaattgagaacctgcacaggacctttgacccccacttcctgcgggtgccctgctggaagatcaccctcttcgtcatcgtgcctgtgctgggccccctggtggccctgatcatctgctacaactggctgcaccggcggctggccggccagttcctggaggagctgaggaaccccttctag

SEQ ID NO: 160478 - DNA, 396 bp, synthetic construct
  misc_feature 1..396: note = Description of Artificial Sequence: Synthetic coding sequence
  source 1..396: mol_type = other DNA
atggccagcctgagccggcccagcctgcccagctgcctgtgcagcttcctgctgctgctgctgctgcaggtgagcagcagctatgctgaccccttctactgggtgtccccaggagtgctggtgctgctggccgtgctgcctgtgctgctgctgcagatcaccgtgggcctggtgttcctgtgcctgcagtaccgcctgcggggcaagctgcgggcagaaattgagaacctgcacaggacctttgacccccacttcctgcgggtgccctgctggaagatcaccctcttcgtcatcgtgcctgtgctgggccccctggtggccctgatcatctgctacaactggctgcaccggcggctggccggccagttcctggaggagctgaggaaccccttctag

SEQ ID NO: 160479 - DNA, 744 bp, synthetic construct
  misc_feature 1..744: note = Description of Artificial Sequence: Synthetic coding sequence
  source 1..744: mol_type = other DNA
atggccagcctgagccggcccagcctgcccagctgcctgtgcagcttcctgctgctgctgctgctgcaggtgagcagcagctatgccggccagttccgggtgattggccccaggcaccccatccgggccctggtgggagatgaggtggagctgccctgccgcatcagccctgggaagaatgccaccggcatggaggtgggctggtacagaccacccttcagccgggtggtgcacctgtacagaaatggcaaggaccaggatggagaccaggcccctgagtaccggggccgcacagagctgctgaaggatgccatcggggagggcaaggtgaccctgcgcatcagaaatgtgcgcttcagtgatgaaggaggcttcacctgcttcttccgggaccacagctaccaggaggaggccgccatggagctgaaggtggaggaccccttctactgggtgtccccaggagtgctggtgctgctggccgtgctgcctgtgctgctgctgcagatcaccgtgggcctggtgttcctgtgcctgcagtaccgcctgcggggcaagctgcgggcagaaattgagaacctgcacaggacctttgacccccacttcctgcgggtgccctgctggaagatcaccctcttcgtcatcgtgcctgtgctgggccccctggtggccctgatcatctgctacaactggctgcaccggcggctggccggccagttcctggaggagctgaggaaccccttctag

SEQ ID NO: 160480 - DNA, 744 bp, synthetic construct; identical to SEQ ID NO: 160479
  misc_feature 1..744: note = Description of Artificial Sequence: Synthetic coding sequence
  source 1..744: mol_type = other DNA

SEQ ID NO: 160481 - DNA, 690 bp, synthetic construct
  misc_feature 1..690: note = Description of Artificial Sequence: Synthetic coding sequence
  source 1..690: mol_type = other DNA
atggccagcctgagccggcccagcctgcccagctgcctgtgcagcttcctgctgctgctgctgctgcaggtgagcagcagctatgccggccagttccgggtgattggccccaggcaccccatccgggccctggtgggagatgaggtggagctgccctgccgcatcagccctgggaagaatgccaccggcatggaggtgggctggtacagaccacccttcagccgggtggtgcacctgtacagaaatggcaaggaccaggatggagaccaggcccctgagtaccggggccgcacagagctgctgaaggatgccatcggggagggcaaggtgaccctgcgcatcagaaatgtgcgcttcagtgatgaaggaggcttcacctgcttcttccgggaccacagctaccaggaggaggccgccatggagctgaaggtggaggaccccttctactgggtgtccccaggagtgctggtgctgctggccgtgctgcctgtgctgctgctgcagatcaccgtgggcctggtgttcctgtgcctgcagtaccgcctgcggggcaagctgcgggcagaaattgagaacctgcacaggacctttgagagctttggagtgctgggcccccaggtgaaggagcccaagaagacaggccagttcctggaggagctgctcttccacctggaggccctgagcggctag

SEQ ID NO: 160482 - DNA, 642 bp, synthetic construct
  misc_feature 1..642: note = Description of Artificial Sequence: Synthetic coding sequence
  source 1..642: mol_type = other DNA
atggccagcctgagccggcccagcctgcccagctgcctgtgcagcttcctgctgctgctgctgctgcaggtgagcagcagctatgccggccagttccgggtgattggccccaggcaccccatccgggccctggtgggagatgaggtggagctgccctgccgcatcagccctgggaagaatgccaccggcatggaggtgggctggtacagaccacccttcagccgggtggtgcacctgtacagaaatggcaaggaccaggatggagaccaggcccctgagtaccggggccgcacagagctgctgaaggatgccatcggggagggcaaggtgaccctgcgcatcagaaatgtgcgcttcagtgatgaaggaggcttcacctgcttcttccgggaccacagctaccaggaggaggccgccatggagctgaaggtggaggaccccttctactgggtgtccccaggagtgctggtgctgctggccgtgctgcctgtgctgctgctgcagatcaccgtgggcctcatcttcctgtgcctgcagtaccgcctgcggggcaagctgcgggcagaaattgagaacctgcacaggaccttcggccagttcctggaggagctgctcttccacctggaggccctgagcggctag

SEQ ID NO: 160483 - DNA, 675 bp, synthetic construct
  misc_feature 1..675: note = Description of Artificial Sequence: Synthetic coding sequence
  source 1..675: mol_type = other DNA
atggccagcctgagccggcccagcctgcccagctgcctgtgcagcttcctgctgctgctgctgctgcaggtgagcagcagctatgccggccagttccgggtgattggccccaggcaccccatccgggccctggtgggagatgaggtggagctgccctgccgcatcagccctgggaagaatgccaccggcatggaggtgggctggtacagaccacccttcagccgggtggtgcacctgtacagaaatggcaaggaccaggatggagaccaggcccctgagtaccggggccgcacagagctgctgaaggatgccatcggggagggcaaggtgaccctgcgcatcagaaatgtgcgcttcagtgatgaaggaggcttcacctgcttcttccgggaccacagctaccaggaggaggccgccatggagctgaaggtggaggaccccttctactgggtgtccccaggagtgctggtgctgctggccgtgctgcctgtgctgctgctgcagatcaccgtgggcctcatcttcctgtgcctgcagtaccgcctgcggggcaagctgcgggcagaaattgagaacctgcacaggacctttgagagctttggagtgctgggcccccaggtgaaggagcccaagaagacaggccagttcctggaggagctgaggaaccccttctag

SEQ ID NO: 160484 - DNA, 675 bp, synthetic construct
  misc_feature 1..675: note = Description of Artificial Sequence: Synthetic coding sequence
  source 1..675: mol_type = other DNA
atggccagcctgagccggcccagcctgcccagctgcctgtgcagcttcctgctgctgctgctgctgcaggtgagcagcagctatgccggccagttccgggtgattggccccaggcaccccatccgggccctggtgggagatgaggtggagctgccctgccgcatcagccctgggaagaatgccaccggcatggaggtgggctggtacagaccacccttcagccgggtggtgcacctgtacagaaatggcaaggaccaggatggagaccaggcccctgagtaccggggccgcacagagctgctgaaggatgccatcggggagggcaaggtgaccctgcgcatcagaaatgtgcgcttcagtgatgaaggaggcttcacctgcttcttccgggaccacagctaccaggaggaggccgccatggagctgaaggtggaggaccccttctactgggtgtccccaggagtgctggtgctgctggccgtgctgcctgtgctgctgctgcagatcaccctgggcctggtgttcctgtgcctgcagtaccgcctgcggggcaagctgcgggcagaaattgagaacctgcacaggacctttgagagctttggagtgctgggcccccaggtgaaggagcccaagaagacaggccagttcctggaggagctgaggaaccccttctag

SEQ ID NO: 160485 - DNA, 690 bp, synthetic construct; identical to SEQ ID NO: 160481
  misc_feature 1..690: note = Description of Artificial Sequence: Synthetic coding sequence
  source 1..690: mol_type = other DNA

SEQ ID NO: 160486 - DNA, 642 bp, synthetic construct; identical to SEQ ID NO: 160472
  misc_feature 1..642: note = Description of Artificial Sequence: Synthetic coding sequence
  source 1..642: mol_type = other DNA

SEQ ID NO: 160487 - DNA, 540 bp, synthetic construct
  misc_feature 1..540: note = Description of Artificial Sequence: Synthetic coding sequence
  source 1..540: mol_type = other DNA
tgacagttccgggtcatcggccccaggcaccccatccgggccctggtgggagatgaggtggagctgccctgccgcatcagccctgggaagaatgccaccggcatggaggtgggctggtaccggccccccttcagccgggtggtgcacctgtacagaaatggcaaggaccaggatggagaccaggcccctgagtaccggggccgcacagagctgctgaaggatgccatcggggagggcaaggtgaccctgcgcatcagaaatgtgcgcttcagtgatgagggcggcttcacctgcttcttccgggaccacagctaccaggaggaggccgccatggagctgaaggtggaggaccccttctactgggtgtcccctggggtgctggtgctgctggccgtgctgcctgtgctgctgctgcagatcaccgtgggcctggtgttcctgtgcctgcagtaccgcctgcggggcaagctgcgggcagaaattgagaacctgcacaggaccttcggccagttcctggaggagctgaggaaccccttctag

SEQ ID NO: 160488 - DNA, 396 bp, synthetic construct; identical to SEQ ID NO: 160478
  misc_feature 1..396: note = Description of Artificial Sequence: Synthetic coding sequence
  source 1..396: mol_type = other DNA

SEQ ID NO: 160489 - DNA, 615 bp, synthetic construct
  misc_feature 1..615: note = Description of Artificial Sequence: Synthetic coding sequence
  source 1..615: mol_type = other DNA
agcctgagccggcccagcctgcccagctgcctgtgcagcttcctgctgctgctgctgctgcaggtgagcagcagctatgccggccagttccgggtgattggccccaggcaccccatccgggccctggtgggagatgaggtggagctgccctgccgcatcagccctgggaagaatgccaccggcatggaggtgggctggtacagaccacccttcagccgggtggtgcacctgtacagaaatggcaaggaccaggatggagaccaggcccctgagtaccggggccgcacagagctgctgaaggatgccatcggggagggcaaggtgaccctgcgcatcagaaatgtgcgcttcagtgatgaaggaggcttcacctgcttcttccgggaccacagctaccaggaggaggccgccatggagctgaaggtggaggaccccttctactgggtgtccccaggagtgctggtgctgctggccgtgctgcctgtgctgctgctgcagatcaccgtgggcctggtgttcctgtgcctgcagtaccgcctgcggggcaagctgcgggcagaaattgagaacctgcacaggacctttgtgttccacctggaggccctgtctggatag

SEQ ID NO: 160490 - DNA, 396 bp, synthetic construct
  misc_feature 1..396: note = Description of Artificial Sequence: Synthetic coding sequence
  source 1..396: mol_type = other DNA
atggccagcctgagccggcccagcctgcccagctgcctgtgcagcttcctgctgctgctgctgctgcaggtgagcagcagctatgctgaccccttctactgggtgtccccaggagtgctggtgctgctggccgtgctgcctgtgctgctgctgcagatcaccctgggcctggtgttcctgtgcctgcagtaccgcctgcggggcaagctgcgggcagaaattgagaacctgcacaggacctttgacccccacttcctgcgggtgccctgctggaagatcaccctcttcgtcatcgtgcctgtgctgggccccctggtggccctgatcatctgctacaactggctgcaccggcggctggccggccagttcctggaggagctgaggaaccccttctag

SEQ ID NO: 160491 - DNA, 675 bp, synthetic construct
  misc_feature 1..675: note = Description of Artificial Sequence: Synthetic coding sequence
  source 1..675: mol_type = other DNA
atggccagcctgagccggcccagcctgcccagctgcctgtgcagcttcctgctgctgctgctgctgcaggtgagcagcagctatgccggccagttccgggtgattggccccaggcaccccatccgggccctggtgggagatgaggtggagctgccctgccgcatcagccctgggaagaatgccaccggcatggaggtgggctggtacagaccacccttcagccgggtggtgcacctgtacagaaatggcaaggaccaggatggagaccaggcccctgagtaccggggccgcacagagctgctgaaggatgccatcggggagggcaaggtgaccctgcgcatcagaaatgtgcgcttcagtgatgaaggaggcttcacctgcttcttccgggaccacagctaccaggaggaggccgccatggagctgaaggtggaggaccccttctactgggtgtccccaggagtgctggtgctgctggccgtgctgcctgtgctgctgctgcagatcaccgtgggcctggtgttcctgtgcctgcagtaccgcctgcggggcaagctgcgggcagaaattgagaacctgcacaggacctttgagagctttggagtgctgggcccccaggtgaaggagcccaagaagacaggccagttcctggaggagctgaggaaccccttctag

SEQ ID NO: 160492 - DNA, 675 bp, synthetic construct; identical to SEQ ID NO: 160491
  misc_feature 1..675: note = Description of Artificial Sequence: Synthetic coding sequence
  source 1..675: mol_type = other DNA

SEQ ID NO: 160493 - DNA, 675 bp, synthetic construct; identical to SEQ ID NO: 160491
  misc_feature 1..675: note = Description of Artificial Sequence: Synthetic coding sequence
  source 1..675: mol_type = other DNA

SEQ ID NO: 160494 - DNA, 759 bp, synthetic construct
  misc_feature 1..759: note = Description of Artificial Sequence: Synthetic coding sequence
  source 1..759: mol_type = other DNA
atggccagcctgagccggcccagcctgcccagctgcctgtgcagcttcctgctgctgctgctgctgcaggtgagcagcagctatgccggccagttccgggtgattggccccaggcaccccatccgggccctggtgggagatgaggtggagctgccctgccgcatcagccctgggaagaatgccaccggcatggaggtgggctggtacagaccacccttcagccgggtggtgcacctgtacagaaatggcaaggaccaggatggagaccaggcccctgagtaccggggccgcacagagctgctgaaggatgccatcggggagggcaaggtgaccctgcgcatcagaaatgtgcgcttcagtgatgaaggaggcttcacctgcttcttccgggaccacagctaccaggaggaggccgccatggagctgaaggtggaggaccccttctactgggtgtccccaggagtgctggtgctgctggccgtgctgcctgtgctgctgctgcagatcaccgtgggcctggtgttcctgtgcctgcagtaccgcctgcggggcaagctgcgggcagaaattgagaacctgcacaggacctttgacccccacttcctgcgggtgccctgctggaagatcaccctcttcgtcatcgtgcctgtgctgggccccctggtggccctgatcatctgctacaactggctgcaccggcggctggccggccagttcctggaggagctgctcttccacctggaggccctgtctggatag

SEQ ID NO: 160495 - DNA, 744 bp, synthetic construct; identical to SEQ ID NO: 160479
  misc_feature 1..744: note = Description of Artificial Sequence: Synthetic coding sequence
  source 1..744: mol_type = other DNA

SEQ ID NO: 160496 - DNA, 540 bp, synthetic construct; identical to SEQ ID NO: 160487
  misc_feature 1..540: note = Description of Artificial Sequence: Synthetic coding sequence
  source 1..540: mol_type = other DNA

SEQ ID NO: 160497 - DNA, 540 bp, synthetic construct; identical to SEQ ID NO: 160487
  misc_feature 1..540: note = Description of Artificial Sequence: Synthetic coding sequence
  source 1..540: mol_type = other DNA

SEQ ID NO: 160498 - DNA, 759 bp, synthetic construct; identical to SEQ ID NO: 160494
  misc_feature 1..759: note = Description of Artificial Sequence: Synthetic coding sequence
  source 1..759: mol_type = other DNA

SEQ ID NO: 160499 - DNA, 690 bp, synthetic construct; identical to SEQ ID NO: 160481
  misc_feature 1..690: note = Description of Artificial Sequence: Synthetic coding sequence
  source 1..690: mol_type = other DNA

SEQ ID NO: 160500 - DNA, 888 bp, synthetic construct; identical to SEQ ID NO: 160471
  misc_feature 1..888: note = Description of Artificial Sequence: Synthetic coding sequence
  source 1..888: mol_type = other DNA

SEQ ID NO: 160501 - DNA, 642 bp, synthetic construct; identical to SEQ ID NO: 160472
  misc_feature 1..642: note = Description of Artificial Sequence: Synthetic coding sequence
  source 1..642: mol_type = other DNA

SEQ ID NO: 160502 - DNA, 759 bp, synthetic construct; identical to SEQ ID NO: 160494
  misc_feature 1..759: note = Description of Artificial Sequence: Synthetic coding sequence
  source 1..759: mol_type = other DNA

SEQ ID NO: 160503 - DNA, 540 bp, synthetic construct; identical to SEQ ID NO: 160487
  misc_feature 1..540: note = Description of Artificial Sequence: Synthetic coding sequence
  source 1..540: mol_type = other DNA

SEQ ID NO: 160504 - DNA, 888 bp, synthetic construct; identical to SEQ ID NO: 160471
  misc_feature 1..888: note = Description of Artificial Sequence: Synthetic coding sequence
  source 1..888: mol_type = other DNA

SEQ ID NO: 160505 - DNA, 888 bp, synthetic construct; identical to SEQ ID NO: 160471
  misc_feature 1..888: note = Description of Artificial Sequence: Synthetic coding sequence
  source 1..888: mol_type = other DNA

SEQ ID NO: 160506 - DNA, 396 bp, synthetic construct; identical to SEQ ID NO: 160478
  misc_feature 1..396: note = Description of Artificial Sequence: Synthetic coding sequence
  source 1..396: mol_type = other DNA

SEQ ID NO: 160507 - DNA, 759 bp, synthetic construct; identical to SEQ ID NO: 160494
  misc_feature 1..759: note = Description of Artificial Sequence: Synthetic coding sequence
  source 1..759: mol_type = other DNA

SEQ ID NO: 160508 - DNA, 744 bp, synthetic construct; identical to SEQ ID NO: 160479
  misc_feature 1..744: note = Description of Artificial Sequence: Synthetic coding sequence
  source 1..744: mol_type = other DNA

SEQ ID NO: 160509 - DNA, 615 bp, synthetic construct; identical to SEQ ID NO: 160489
  misc_feature 1..615: note = Description of Artificial Sequence: Synthetic coding sequence
  source 1..615: mol_type = other DNA

SEQ ID NO: 160510 - DNA, 888 bp, synthetic construct
  misc_feature 1..888: note = Description of Artificial Sequence: Synthetic coding sequence
  source 1..888: mol_type = other DNA
atggccagcctgagccggcccagcctgcccagctgcctgtgcagcttcctgctgctgctgctgctgcaggtgagcagcagctatgccggccagttccgggtgattggccccaggcaccccatccgggccctggtgggagatgaggtggagctgccctgccgcatcagccctgggaagaatgccaccggcatggaggtgggctggtacagaccacccttcagccgggtggtgcacctgtacagaaatggcaaggaccaggatggagaccaggcccctgagtaccggggccgcacagagctgctgaaggatgccatcggggagggcaaggtgaccctgcgcatcagaaatgtgcgcttcagtgatgaaggaggcttcacctgcttcttccgggaccacagctaccaggaggaggccgccatggagctgaaggtggaggaccccttctactgggtgtccccaggagtgctggtgctgctggccgtgctgcctgtgctgctgctgcagatcaccctgggcctggtgttcctgtgcctgcagtaccgcctgcggggcaagctgcgggcagaaattgagaacctgcacaggacctttgacccccacttcctgcgggtgccctgctggaagatcaccctcttcgtcatcgtgcctgtgctgggccccctggtggccctgatcatctgctacaactggctgcaccggcggctggccggccagttcctggaggagctgaggaagttcagcagcctgtgctacaagcagaggatcaagagccaggagcgggagacagaggccacccggggccggggcggcctgctgcgggaccacatcccccggggcaaggaggagctggagagcctgggcggcggcaagaccccacctggaagatag

SEQ ID NO: 160511 - DNA, 690 bp, synthetic construct; identical to SEQ ID NO: 160481
  misc_feature 1..690: note = Description of Artificial Sequence: Synthetic coding sequence
  source 1..690: mol_type = other DNA

SEQ ID NO: 160512 - DNA, 396 bp, synthetic construct; identical to SEQ ID NO: 160478
  misc_feature 1..396: note = Description of Artificial Sequence: Synthetic coding sequence
  source 1..396: mol_type = other DNA

SEQ ID NO: 160513 - DNA, 540 bp, synthetic construct
  misc_feature 1..540: note = Description of Artificial Sequence: Synthetic coding sequence
  source 1..540: mol_type = other DNA
tgacagttccgggtcatcggccccaggcaccccatccgggccctggtgggagatgaggtggagctgccctgccgcatcagccctgggaagaatgccaccggcatggaggtgggctggtaccggccccccttcagccgggtggtgcacctgtacagaaatggcaaggaccaggatggagaccaggcccctgagtaccggggccgcacagagctgctgaaggatgccatcggggagggcaaggtgaccctgcgcatcagaaatgtgcgcttcagtgatgagggcggcttcacctgcttcttccgggaccacagctaccaggaggaggccgccatggagctgaaggtggaggaccccttctactgggtgtcccctggggtgctggtgctgctggccgtgctgcctgtgctgctgctgcagatcaccctgggcctggtgttcctgtgcctgcagtaccgcctgcggggcaagctgcgggcagaaattgagaacctgcacaggaccttcggccagttcctggaggagctgaggaaccccttctag

SEQ ID NO: 160514 - DNA, 627 bp, synthetic construct
  misc_feature 1..627: note = Description of Artificial Sequence: Synthetic coding sequence
  source 1..627: mol_type = other DNA
atggccagcctgagccggcccagcctgcccagctgcctgtgcagcttcctgctgctgctgctgctgcaggtgagcagcagctatgccggccagttccgggtgattggccccaggcaccccatccgggccctggtgggagatgaggtggagctgccctgccgcatcagccctgggaagaatgccaccggcatggaggtgggctggtacagaccacccttcagccgggtggtgcacctgtacagaaatggcaaggaccaggatggagaccaggcccctgagtaccggggccgcacagagctgctgaaggatgccatcggggagggcaaggtgaccctgcgcatcagaaatgtgcgcttcagtgatgaaggaggcttcacctgcttcttccgggaccacagctaccaggaggaggccgccatggagctgaaggtggaggaccccttctactgggtgtccccaggagtgctggtgctgctggccgtgctgcctgtgctgctgctgcagatcaccgtgggcctcatcttcctgtgcctgcagtaccgcctgcggggcaagctgcgggcagaaattgagaacctgcacaggaccttcggccagttcctggaggagctgaggaaccccttctag

SEQ ID NO: 160515 - DNA, 744 bp, synthetic construct; identical to SEQ ID NO: 160479
  misc_feature 1..744: note = Description of Artificial Sequence: Synthetic coding sequence
  source 1..744: mol_type = other DNA

SEQ ID NO: 160516 - DNA, 396 bp, synthetic construct; identical to SEQ ID NO: 160478
  misc_feature 1..396: note = Description of Artificial Sequence: Synthetic coding sequence
  source 1..396: mol_type = other DNA

SEQ ID NO: 160517 - DNA, 642 bp, synthetic construct; identical to SEQ ID NO: 160472
  misc_feature 1..642: note = Description of Artificial Sequence: Synthetic coding sequence
  source 1..642: mol_type = other DNA

SEQ ID NO: 160518 - DNA, 615 bp, synthetic construct
  misc_feature 1..615: note = Description of Artificial Sequence: Synthetic coding sequence
  source 1..615: mol_type = other DNA
agcctgagccggcccagcctgcccagctgcctgtgcagcttcctgctgctgctgctgctgcaggtgagcagcagctatgccggccagttccgggtgattggccccaggcaccccatccgggccctggtgggagatgaggtggagctgccctgccgcatcagccctgggaagaatgccaccggcatggaggtgggctggtacagaccacccttcagccgggtggtgcacctgtacagaaatggcaaggaccaggatggagaccaggcccctgagtaccggggccgcacagagctgctgaaggatgccatcggggagggcaaggtgaccctgcgcatcagaaatgtgcgcttcagtgatgaaggaggcttcacctgcttcttccgggaccacagctaccaggaggaggccgccatggagctgaaggtggaggaccccttctactgggtgtccccaggagtgctggtgctgctggccgtgctgcctgtgctgctgctgcagatcaccctgggcctggtgttcctgtgcctgcagtaccgcctgcggggcaagctgcgggcagaaattgagaacctgcacaggacctttgtgttccacctggaggccctgtctggatag

SEQ ID NO: 160519 - DNA, 675 bp, synthetic construct; identical to SEQ ID NO: 160491
  misc_feature 1..675: note = Description of Artificial Sequence: Synthetic coding sequence
  source 1..675: mol_type = other DNA

SEQ ID NO: 160520 - DNA, 690 bp, synthetic construct; identical to SEQ ID NO: 160481
  misc_feature 1..690: note = Description of Artificial Sequence: Synthetic coding sequence
  source 1..690: mol_type = other DNA

SEQ ID NO: 160521 - DNA, 888 bp, synthetic construct; identical to SEQ ID NO: 160471
  misc_feature 1..888: note = Description of Artificial Sequence: Synthetic coding sequence
  source 1..888: mol_type = other DNA

SEQ ID NO: 160522 - DNA, 540 bp, synthetic construct; identical to SEQ ID NO: 160487
  misc_feature 1..540: note = Description of Artificial Sequence: Synthetic coding sequence
  source 1..540: mol_type = other DNA

SEQ ID NO: 160523 - DNA, 642 bp, synthetic construct; identical to SEQ ID NO: 160472
  misc_feature 1..642: note = Description of Artificial Sequence: Synthetic coding sequence
  source 1..642: mol_type = other DNA

SEQ ID NO: 160524 - DNA, 759 bp, synthetic construct; identical to SEQ ID NO: 160494
  misc_feature 1..759: note = Description of Artificial Sequence: Synthetic coding sequence
  source 1..759: mol_type = other DNA

SEQ ID NO: 160525 - DNA, 642 bp, synthetic construct; identical to SEQ ID NO: 160472
  misc_feature 1..642: note = Description of Artificial Sequence: Synthetic coding sequence
  source 1..642: mol_type = other DNA

SEQ ID NO: 160526 - DNA, 675 bp, synthetic construct; identical to SEQ ID NO: 160491
  misc_feature 1..675: note = Description of Artificial Sequence: Synthetic coding sequence
  source 1..675: mol_type = other DNA

SEQ ID NO: 160527 - DNA, 615 bp, synthetic construct; identical to SEQ ID NO: 160489
  misc_feature 1..615: note = Description of Artificial Sequence: Synthetic coding sequence
  source 1..615: mol_type = other DNA

SEQ ID NO: 160528 - DNA, 675 bp, synthetic construct; identical to SEQ ID NO: 160491
  misc_feature 1..675: note = Description of Artificial Sequence: Synthetic coding sequence
  source 1..675: mol_type = other DNA

SEQ ID NO: 160529 - DNA, 759 bp, synthetic construct; identical to SEQ ID NO: 160494
  misc_feature 1..759: note = Description of Artificial Sequence: Synthetic coding sequence
  source 1..759: mol_type = other DNA

SEQ ID NO: 160530 - DNA, 744 bp, synthetic construct; identical to SEQ ID NO: 160479
  misc_feature 1..744: note = Description of Artificial Sequence: Synthetic coding sequence
  source 1..744: mol_type = other DNA

SEQ ID NO: 160531 - DNA, 615 bp, synthetic construct; identical to SEQ ID NO: 160489
  misc_feature 1..615: note = Description of Artificial Sequence: Synthetic coding sequence
  source 1..615: mol_type = other DNA

SEQ ID NO: 160532 - DNA, 888 bp, synthetic construct; identical to SEQ ID NO: 160471
  misc_feature 1..888: note = Description of Artificial Sequence: Synthetic coding sequence
  source 1..888: mol_type = other DNA

SEQ ID NO: 160533 - DNA, 759 bp, synthetic construct
  misc_feature 1..759: note = Description of Artificial Sequence: Synthetic coding sequence
  source 1..759: mol_type = other DNA
atggccagcctgagccggcccagcctgcccagctgcctgtgcagcttcctgctgctgctgctgctgcaggtgagcagcagctatgccggccagttccgggtgattggccccaggcaccccatccgggccctggtgggagatgaggtggagctgccctgccgcatcagccctgggaagaatgccaccggcatggaggtgggctggtacagaccacccttcagccgggtggtgcacctgtacagaaatggcaaggaccaggatggagaccaggcccctgagtaccggggccgcacagagctgctgaaggatgccatcggggagggcaaggtgaccctgcgcatcagaaatgtgcgcttcagtgatgaaggaggcttcacctgcttcttccgggaccacagctaccaggaggaggccgccatggagctgaaggtggaggaccccttctactgggtgtccccaggagtgctggtgctgctggccgtgctgcctgtgctgctgctgcagatcaccctgggcctggtgttcctgtgcctgcagtaccgcctgcggggcaagctgcgggcagaaattgagaacctgcacaggacctttgacccccacttcctgcgggtgccctgctggaagatcaccctcttcgtcatcgtgcctgtgctgggccccctggtggccctgatcatctgctacaactggctgcaccggcggctggccggccagttcctggaggagctgctcttccacctggaggccctgtctggatag

SEQ ID NO: 160534 - DNA, 540 bp, synthetic construct; identical to SEQ ID NO: 160487
  misc_feature 1..540: note = Description of Artificial Sequence: Synthetic coding sequence
  source 1..540: mol_type = other DNA

SEQ ID NO: 160535 - DNA, 396 bp, synthetic construct; identical to SEQ ID NO: 160478
  misc_feature 1..396: note = Description of Artificial Sequence: Synthetic coding sequence
  source 1..396: mol_type = other DNA

SEQ ID NO: 160536 - DNA, 744 bp, synthetic construct
  misc_feature 1..744: note = Description of Artificial Sequence: Synthetic coding sequence
  source 1..744: mol_type = other DNA
atggccagcctgagccggcccagcctgcccagctgcctgtgcagcttcctgctgctgctgctgctgcaggtgagcagcagctatgccggccagttccgggtgattggccccaggcaccccatccgggccctggtgggagatgaggtggagctgccctgccgcatcagccctgggaagaatgccaccggcatggaggtgggctggtacagaccacccttcagccgggtggtgcacctgtacagaaatggcaaggaccaggatggagaccaggcccctgagtaccggggccgcacagagctgctgaaggatgccatcggggagggcaaggtgaccctgcgcatcagaaatgtgcgcttcagtgatgaaggaggcttcacctgcttcttccgggaccacagctaccaggaggaggccgccatggagctgaaggtggaggaccccttctactgggtgtccccaggagtgctggtgctgctggccgtgctgcctgtgctgctgctgcagatcaccctgggcctggtgttcctgtgcctgcagtaccgcctgcggggcaagctgcgggcagaaattgagaacctgcacaggacctttgacccccacttcctgcgggtgccctgctggaagatcaccctcttcgtcatcgtgcctgtgctgggccccctggtggccctgatcatctgctacaactggctgcaccggcggctggccggccagttcctggaggagctgaggaaccccttctag

SEQ ID NO: 160537 - DNA, 642 bp, synthetic construct
  misc_feature 1..642: note = Description of Artificial Sequence: Synthetic coding sequence
  source 1..642: mol_type = other DNA
atggccagcctgagccggcccagcctgcccagctgcctgtgcagcttcctgctgctgctgctgctgcaggtgagcagcagctatgccggccagttccgggtgattggccccaggcaccccatccgggccctggtgggagatgaggtggagctgccctgccgcatcagccctgggaagaatgccaccggcatggaggtgggctggtacagaccacccttcagccgggtggtgcacctgtacagaaatggcaaggaccaggatggagaccaggcccctgagtaccggggccgcacagagctgctgaaggatgccatcggggagggcaaggtgaccctgcgcatcagaaatgtgcgcttcagtgatgaaggaggcttcacctgcttcttccgggaccacagctaccaggaggaggccgccatggagctgaaggtggaggaccccttctactgggtgtccccaggagtgctggtgctgctggccgtgctgcctgtgctgctgctgcagatcaccctgggcctggtgttcctgtgcctgcagtaccgcctgcggggcaagctgcgggcagaaattgagaacctgcacaggaccttcggccagttcctggaggagctgctcttccacctggaggccctgagcggctag

SEQ ID NO: 160538 - DNA, 615 bp, synthetic construct; identical to SEQ ID NO: 160489
  misc_feature 1..615: note = Description of Artificial Sequence: Synthetic coding sequence
  source 1..615: mol_type = other DNA

SEQ ID NO: 160539 - DNA, 690 bp, synthetic construct; identical to SEQ ID NO: 160481
  misc_feature 1..690: note = Description of Artificial Sequence: Synthetic coding sequence
  source 1..690: mol_type = other DNA

SEQ ID NO: 160540 - DNA, 615 bp, synthetic construct; identical to SEQ ID NO: 160489
  misc_feature 1..615: note = Description of Artificial Sequence: Synthetic coding sequence
  source 1..615: mol_type = other DNA

SEQ ID NO: 160541 - DNA, 690 bp, synthetic construct
  misc_feature 1..690: note = Description of Artificial Sequence: Synthetic coding sequence
  source 1..690: mol_type = other DNA
atggccagcctgagccggcccagcctgcccagctgcctgtgcagcttcctgctgctgctgctgctgcaggtgagcagcagctatgccggccagttccgggtgattggccccaggcaccccatccgggccctggtgggagatgaggtggagctgccctgccgcatcagccctgggaagaatgccaccggcatggaggtgggctggtacagaccacccttcagccgggtggtgcacctgtacagaaatggcaaggaccaggatggagaccaggcccctgagtaccggggccgcacagagctgctgaaggatgccatcggggagggcaaggtgaccctgcgcatcagaaatgtgcgcttcagtgatgaaggaggcttcacctgcttcttccgggaccacagctaccaggaggaggccgccatggagctgaaggtggaggaccccttctactgggtgtccccaggagtgctggtgctgctggccgtgctgcctgtgctgctgctgcagatcaccctgggcctggtgttcctgtgcctgcagtaccgcctgcggggcaagctgcgggcagaaattgagaacctgcacaggacctttgagagctttggagtgctgggcccccaggtgaaggagcccaagaagacaggccagttcctggaggagctgctcttccacctggaggccctgagcggctag

SEQ ID NO: 160542 - DNA, 690 bp, synthetic construct
  misc_feature 1..690: note = Description of Artificial Sequence: Synthetic coding sequence
  source 1..690: mol_type = other DNA
atggccagcctgagccggcccagcctgcccagctgcctgtgcagcttcctgctgctgctgctgctgcaggtgagcagcagctatgccggccagttccgggtgattggccccaggcaccccatccgggccctggtgggagatgaggtggagctgccctgccgcatcagccctgggaagaatgccaccggcatggaggtgggctggtacagaccacccttcagccgggtggtgcacctgtacagaaatggcaaggaccaggatggagaccaggcccctgagtaccggggccgcacagagctgctgaaggatgccatcggggagggcaaggtgaccctgcgcatcagaaatgtgcgcttcagtgatgaaggaggcttcacctgcttcttccgggaccacagctaccaggaggaggccgccatggagctgaaggtggaggaccccttctactgggtgtccccaggagtgctggtgctgctggccgtgctgcctgtgctgctgctgcagatcaccgtgggcctcatcttcctgtgcctgcagtaccgcctgcggggcaagctgcgggcagaaattgagaacctgcacaggacctttgagagctttggagtgctgggcccccaggtgaaggagcccaagaagacaggccagttcctggaggagctgctcttccacctggaggccctgagcggctag

SEQ ID NO: 160543 - DNA, 516 bp, synthetic construct; identical to SEQ ID NO: 160476
  misc_feature 1..516: note = Description of Artificial Sequence: Synthetic coding sequence
  source 1..516: mol_type = other DNA

SEQ ID NO: 160544 - DNA, 534 bp, synthetic construct
  misc_feature 1..534: note = Description of Artificial Sequence: Synthetic coding sequence
  source 1..534: mol_type = other DNA
atgagccacatctcctgggaggagcgctacagaaatggcaaggaccaggatggagaccaggcccctgagtaccggggccgcacagagctgctgaaggatgccatcggggagggcaaggtgaccctgcgcatcagaaatgtgcgcttcagtgatgaaggaggcttcacctgcttcttccgggaccacagctaccaggaggaggccgccatggagctgaaggtggaggaccccttctactgggtgtccccaggagtgctggtgctgctggccgtgctgcctgtgctgctgctgcagatcaccgtgggcctggtgttcctgtgcctgcagtaccgcctgcggggcaagctgcgggcagaaattgagaacctgcacaggacctttgacccccacttcctgcgggtgccctgctggaagatcaccctcttcgtcatcgtgcctgtgctgggccccctggtggccctgatcatctgctacaactggctgcaccggcggctggccggccagttcctggaggagctgaggaaccccttctag

SEQ ID NO: 160545 - DNA, 174 bp, synthetic construct
  misc_feature 1..174: note = Description of Artificial Sequence: Synthetic coding sequence
  source 1..174: mol_type = other DNA
atggccagcctgagccggcccagcctgcccagctgcctgtgcagcttcctgctgctgctgctgctgcaggtgagcagcagctatgccggcctggtggccgtggcccgctcctggctgattgctgccagcaccagccaggcccaggtgatcctgctgacccagcccctggagtag

SEQ ID NO: 160546 - DNA, 627 bp, synthetic construct
  misc_feature 1..627: note = Description of Artificial Sequence: Synthetic coding sequence
  source 1..627: mol_type = other DNA
atggccagcctgagccggcccagcctgcccagctgcctgtgcagcttcctgctgctgctgctgctgcaggtgagcagcagctatgccggccagttccgggtgattggccccaggcaccccatccgggccctggtgggagatgaggtggagctgccctgccgcatcagccctgggaagaatgccaccggcatggaggtgggctggtacagaccacccttcagccgggtggtgcacctgtacagaaatggcaaggaccaggatggagaccaggcccctgagtaccggggccgcacagagctgctgaaggatgccatcggggagggcaaggtgaccctgcgcatcagaaatgtgcgcttcagtgatgaaggaggcttcacctgcttcttccgggaccacagctaccaggaggaggccgccatggagctgaaggtggaggaccccttctactgggtgtccccaggagtgctggtgctgctggccgtgctgcctgtgctgctgctgcagatcaccgtgggcctggtgttcctgtgcctgcagtaccgcctgcggggcaagctgcgggcagaaattgagaacctgcacaggaccttcggccagttcctggaggagctgaggaaccccttctag

SEQ ID NO: 160547 - DNA, 516 bp, synthetic construct; identical to SEQ ID NO: 160476
  misc_feature 1..516: note = Description of Artificial Sequence: Synthetic coding sequence
  source 1..516: mol_type = other DNA

SEQ ID NO: 160548 - DNA, 516 bp, synthetic construct; identical to SEQ ID NO: 160476
  misc_feature 1..516: note = Description of Artificial Sequence: Synthetic coding sequence
  source 1..516: mol_type = other DNA

SEQ ID NO: 160549 - DNA, 621 bp, synthetic construct
  misc_feature 1..621: note = Description of Artificial Sequence: Synthetic coding sequence
  source 1..621: mol_type = other DNA
atggccagcctgagccggcccagcctgcccagctgcctgtgcagcttcctgctgctgctgctgctgcaggtgagcagcagctatgccggccagttccgggtgattggccccaggcaccccatccgggccctggtgggagatgaggtggagctgccctgccgcatcagccctgggaagaatgccaccggcatggaggtgggctggtacagaccacccttcagccgggtggtgcacctgtacagaaatggcaaggaccaggatggagaccaggcccctgagtaccggggccgcacagagctgctgaaggatgccatcggggagggcaaggtgaccctgcgcatcagaaatgtgcgcttcagtgatgaaggaggcttcacctgcttcttccgggaccacagctaccaggaggaggccgccatggagctgaaggtggaggaccccttctactgggtgtccccaggagtgctggtgctgctggccgtgctgcctgtgctgctgctgcagatcaccgtgggcctggtgttcctgtgcctgcagtaccgcctgcggggcaagctgcgggcagaaattgagaacctgcacaggacctttgtgttccacctggaggccctgtctggatag

SEQ ID NO: 160550 - DNA, 627 bp, synthetic construct; identical to SEQ ID NO: 160546
  misc_feature 1..627: note = Description of Artificial Sequence: Synthetic coding sequence
  source 1..627: mol_type = other DNA

SEQ ID NO: 160551 - DNA, 621 bp, synthetic construct; identical to SEQ ID NO: 160549
  misc_feature 1..621: note = Description of Artificial Sequence: Synthetic coding sequence
  source 1..621: mol_type = other DNA

SEQ ID NO: 160552 - DNA, 534 bp, synthetic construct; identical to SEQ ID NO: 160544
  misc_feature 1..534: note = Description of Artificial Sequence: Synthetic coding sequence
  source 1..534: mol_type = other DNA

SEQ ID NO: 160553 - DNA, 621 bp, synthetic construct; identical to SEQ ID NO: 160549
  misc_feature 1..621: note = Description of Artificial Sequence: Synthetic coding sequence
  source 1..621: mol_type = other DNA

SEQ ID NO: 160554 - DNA, 621 bp, synthetic construct; identical to SEQ ID NO: 160549
  misc_feature 1..621: note = Description of Artificial Sequence: Synthetic coding sequence
  source 1..621: mol_type = other DNA

SEQ ID NO: 160555 - DNA, 534 bp, synthetic construct; identical to SEQ ID NO: 160544
  misc_feature 1..534: note = Description of Artificial Sequence: Synthetic coding sequence
  source 1..534: mol_type = other DNA

SEQ ID NO: 160556 - DNA, 621 bp, synthetic construct; identical to SEQ ID NO: 160549
  misc_feature 1..621: note = Description of Artificial Sequence: Synthetic coding sequence
  source 1..621: mol_type = other DNA

SEQ ID NO: 160557 - DNA, 174 bp, synthetic construct; identical to SEQ ID NO: 160545
  misc_feature 1..174: note = Description of Artificial Sequence: Synthetic coding sequence
  source 1..174: mol_type = other DNA

SEQ ID NO: 160558 - DNA, 621 bp, synthetic construct; identical to SEQ ID NO: 160549
  misc_feature 1..621: note = Description of Artificial Sequence: Synthetic coding sequence
  source 1..621: mol_type = other DNA

SEQ ID NO: 160559 - DNA, 516 bp, synthetic construct; identical to SEQ ID NO: 160476
  misc_feature 1..516: note = Description of Artificial Sequence: Synthetic coding sequence
  source 1..516: mol_type = other DNA

SEQ ID NO: 160560 - DNA, 621 bp, synthetic construct
  misc_feature 1..621: note = Description of Artificial Sequence: Synthetic coding sequence
  source 1..621: mol_type = other DNA
atggccagcctgagccggcccagcctgcccagctgcctgtgcagcttcctgctgctgctgctgctgcaggtgagcagcagctatgccggccagttccgggtgattggccccaggcaccccatccgggccctggtgggagatgaggtggagctgccctgccgcatcagccctgggaagaatgccaccggcatggaggtgggctggtacagaccacccttcagccgggtggtgcacctgtacagaaatggcaaggaccaggatggagaccaggcccctgagtaccggggccgcacagagctgctgaaggatgccatcggggagggcaaggtgaccctgcgcatcagaaatgtgcgcttcagtgatgaaggaggcttcacctgcttcttccgggaccacagctaccaggaggaggccgccatggagctgaaggtggaggaccccttctactgggtgtccccaggagtgctggtgctgctggccgtgctgcctgtgctgctgctgcagatcaccctgggcctggtgttcctgtgcctgcagtaccgcctgcggggcaagctgcgggcagaaattgagaacctgcacaggacctttgtgttccacctggaggccctgtctggatag

SEQ ID NO: 160561 - DNA, 516 bp, synthetic construct; identical to SEQ ID NO: 160476
  misc_feature 1..516: note = Description of Artificial Sequence: Synthetic coding sequence
  source 1..516: mol_type = other DNA

SEQ ID NO: 160562 - DNA, 516 bp, synthetic construct; identical to SEQ ID NO: 160476
  misc_feature 1..516: note = Description of Artificial Sequence: Synthetic coding sequence
  source 1..516: mol_type = other DNA

SEQ ID NO: 160563 - DNA, 627 bp, synthetic construct; identical to SEQ ID NO: 160546
  misc_feature 1..627: note = Description of Artificial Sequence: Synthetic coding sequence
  source 1..627: mol_type = other DNA

SEQ ID NO: 160564 - DNA, 174 bp, synthetic construct; identical to SEQ ID NO: 160545
  misc_feature 1..174: note = Description of Artificial Sequence: Synthetic coding sequence
  source 1..174: mol_type = other DNA

SEQ ID NO: 160565 - DNA, 627 bp, synthetic construct; identical to SEQ ID NO: 160546
  misc_feature 1..627: note = Description of Artificial Sequence: Synthetic coding sequence
  source 1..627: mol_type = other DNA

SEQ ID NO: 160566 - DNA, 174 bp, synthetic construct; identical to SEQ ID NO: 160545
  misc_feature 1..174: note = Description of Artificial Sequence: Synthetic coding sequence
  source 1..174: mol_type = other DNA

SEQ ID NO: 160567 - DNA, 534 bp, synthetic construct; identical to SEQ ID NO: 160544
  misc_feature 1..534: note = Description of Artificial Sequence: Synthetic coding sequence
  source 1..534: mol_type = other DNA

SEQ ID NO: 160568 - DNA, 516 bp, synthetic construct; identical to SEQ ID NO: 160476
  misc_feature 1..516: note = Description of Artificial Sequence: Synthetic coding sequence
  source 1..516: mol_type = other DNA

SEQ ID NO: 160569 - DNA, 534 bp, synthetic construct
  misc_feature 1..534: note = Description of Artificial Sequence: Synthetic coding sequence
  source 1..534: mol_type = other DNA
atgagccacatctcctgggaggagcgctacagaaatggcaaggaccaggatggagaccaggcccctgagtaccggggccgcacagagctgctgaaggatgccatcggggagggcaaggtgaccctgcgcatcagaaatgtgcgcttcagtgatgaaggaggcttcacctgcttcttccgggaccacagctaccaggaggaggccgccatggagctgaaggtggaggaccccttctactgggtgtccccaggagtgctggtgctgctggccgtgctgcctgtgctgctgctgcagatcaccctgggcctggtgttcctgtgcctgcagtaccgcctgcggggcaagctgcgggcagaaattgagaacctgcacaggacctttgacccccacttcctgcgggtgccctgctggaagatcaccctcttcgtcatcgtgcctgtgctgggccccctggtggccctgatcatctgctacaactggctgcaccggcggctggccggccagttcctggaggagctgaggaaccccttctag

SEQ ID NO: 160570 - DNA, 627 bp, synthetic construct; identical to SEQ ID NO: 160546
  misc_feature 1..627: note = Description of Artificial Sequence: Synthetic coding sequence
  source 1..627: mol_type = other DNA

SEQ ID NO: 160571 - DNA, 174 bp, synthetic construct; identical to SEQ ID NO: 160545
  misc_feature 1..174: note = Description of Artificial Sequence: Synthetic coding sequence
  source 1..174: mol_type = other DNA

SEQ ID NO: 160572 - DNA, 174 bp, synthetic construct; identical to SEQ ID NO: 160545
  misc_feature 1..174: note = Description of Artificial Sequence: Synthetic coding sequence
  source 1..174: mol_type = other DNA

SEQ ID NO: 160573 - DNA, 534 bp, synthetic construct; identical to SEQ ID NO: 160544
  misc_feature 1..534: note = Description of Artificial Sequence: Synthetic coding sequence
  source 1..534: mol_type = other DNA

SEQ ID NO: 160574 - DNA, 516 bp, synthetic construct; identical to SEQ ID NO: 160476
  misc_feature 1..516: note = Description of Artificial Sequence: Synthetic coding sequence
  source 1..516: mol_type = other DNA

SEQ ID NO: 160575 - DNA, 534 bp, synthetic construct; identical to SEQ ID NO: 160544
  misc_feature 1..534: note = Description of Artificial Sequence: Synthetic coding sequence
  source 1..534: mol_type = other DNA

SEQ ID NO: 160576 - DNA, 174 bp, synthetic construct; identical to SEQ ID NO: 160545
  misc_feature 1..174: note = Description of Artificial Sequence: Synthetic coding sequence
  source 1..174: mol_type = other DNA

SEQ ID NO: 160577 - DNA, 627 bp, synthetic construct; identical to SEQ ID NO: 160546
  misc_feature 1..627: note = Description of Artificial Sequence: Synthetic coding sequence
  source 1..627: mol_type = other DNA

SEQ ID NO: 160578 - DNA, 327 bp, synthetic construct
  misc_feature 1..327: note = Description of Artificial Sequence: Synthetic coding sequence
  source 1..327: mol_type = other DNA
atggccagcctgagccggcccagcctgcccagctgcctgtgcagcttcctgctgctgctgctgctgcaggtgagcagcagctatgctgaccccttctactgggtgtccccaggagtgctggtgctgctggccgtgctgcctgtgctgctgctgcagatcaccgtgggcctcatcttcctgtgcctgcagtaccgcctgcggggcaagctgcgggcagaaattgagaacctgcacaggacctttgagagctttggagtgctgggcccccaggtgaaggagcccaagaagacaggccagttcctggaggagctgaggaaccccttctag

SEQ ID NO: 160579 - DNA, 753 bp, synthetic construct
  misc_feature 1..753: note = Description of Artificial Sequence: Synthetic coding sequence
  source 1..753: mol_type = other DNA
atggcccctggggcccccagcagcagccccagccccatcctggccgtgctgctcttcagcagcctggtgctgagccctgcccaggccatcgtggtgtacacagaccgggaggtgcatggagctgtgggcagccgggtgaccctgcactgcagcttctggagcagcgagtgggtgtctgatgacatctccttcacctggagataccagcctgagggcggcagagatgccatcagcatcttccactacgccaagggccagccctacattgatgaggtgggcaccttcaaggagcgcatccagtgggtgggggacccccgctggaaggatggcagcatcgtcatccacaacctggactacagcgacaatggcaccttcacctgtgatgtgaagaaccccccagacatcgtgggcaagaccagccaggtgaccctgtatgtgtttgagaaggtgcccaccaggtatggagtggtgctgggcgccgtcatcggcggcgtgctgggcgtggtgctgctgctgctgctgctcttctacgtggtgcgctactgctggctgcggcggcaggccgccctgcagaggcggctgagcgccatggagaagggcaagctgcacaagccaggcaaggatgccagcaagaggggccggcagacccctgtgctgtaccagtgctggaccacagctgaggcccccaagctgtctgtgagaagaagaccccggggctggggcagcctggcccgcatcagaaattctggatag

SEQ ID NO: 160580 - DNA, 777 bp, synthetic construct
  misc_feature 1..777: note = Description of Artificial Sequence: Synthetic coding sequence
  source 1..777: mol_type = other DNA
atgctgcgggccccagccccagccccagccatggcccctggggcccccagcagcagccccagccccatcctggccgtgctgctcttcagcagcctggtgctgagccctgcccaggccatcgtggtgtacacagaccgggaggtgcatggagctgtgggcagccgggtgaccctgcactgcagcttctggagcagcgagtgggtgtctgatgacatctccttcacctggagataccagcctgagggcggcagagatgccatcagcatcttccactacgccaagggccagccctacattgatgaggtgggcaccttcaaggagcgcatccagtgggtgggggacccccgctggaaggatggcagcatcgtcatccacaacctggactacagcgacaatggcaccttcacctgtgatgtgaagaaccccccagacatcgtgggcaagaccagccaggtgaccctgtatgtgtttgagaaggtgcccaccaggtatggagtggtgctgggcgccgtcatcggcggcgtgctgggcgtggtgctgctgctgctgctgctcttctacgtggtgcgctactgctggctgcggcggcaggccgccctgcagaggcggctgagcgccatggagaagggcaagctgcacaagccaggcaaggatgccagcaagaggggccggcagacccctgtgctgtatgccatgctggaccacagccgcagcaccaaggctgtgtctgagaagaaggccaagggcctgggggagagcaggaaggacaagaagtag

SEQ ID NO: 160581 - DNA, 747 bp, synthetic construct
  misc_feature 1..747: note = Description of Artificial Sequence: Synthetic coding sequence
  source 1..747: mol_type = other DNA
atggcccctggggcccccagcagcagccccagccccatcctggccgtgctgctcttcagcagcctggtgctgagccctgcccaggccatcgtggtgtacacagaccgggaggtgcatggagctgtgggcagccgggtgaccctgcactgcagcttctggagcagcgagtgggtgtctgatgacatctccttcacctggagataccagcctgagggcggcagagatgccatcagcatcttccactacgccaagggccagccctacattgatgaggtgggcaccttcaaggagcgcatccagtgggtgggggacccccgctggaaggatggcagcatcgtcatccacaacctggactacagcgacaatggcaccttcacctgtgatgtgaagaaccccccagacatcgtgggcaagaccagccaggtgaccctgtatgtgtttgagaaggtgcccaccaggtatggagtggtgctgggcgccgtcatcggcggcgtgctgggcgtggtgctgctgctgctgctgctcttctacgtggtgcgctactgctggctgcggcggcaggccgccctgcagaggcggctgagcgccatggagaagggcaagctgcacaagccaggcaaggatgccagcaagaggggccggcagacccctgtgctgtatgccatgctggaccacagccgcagcaccaaggctgtgtctgagaagaaggccaagggcctgggggagagcaggaaggacaagaagtag

SEQ ID NO: 160582 - DNA, 747 bp, synthetic construct; identical to SEQ ID NO: 160581
  misc_feature 1..747: note = Description of Artificial Sequence: Synthetic coding sequence
  source 1..747: mol_type = other DNA

SEQ ID NO: 160583 - DNA, 648 bp, synthetic construct
  misc_feature 1..648: note = Description of Artificial Sequence: Synthetic coding sequence
  source 1..648: mol_type = other DNA
atgtatggcaagagcagcaccagggctgtgctgctgctgctgggcatccagctgacagccctgtggcccatcgctgctgtggagatctacaccagccgggtgctggaggccgtgaatggaacagatgcccggctgaagtgcaccttcagcagctttgcccctgtgggagatgccctgactgtgacctggaacttccggcccctggatggcggccctgagcagtttgtgttctactaccacatcgaccccttccagcccatgagcggccgcttcaaggacagagtgtcctgggatggcaaccctgagagatatgatgccagcatcctgctgtggaagctgcagtttgatgacaatggcacctacacctgccaggtgaagaaccccccagatgtggatggagtgattggagagatccggctgtctgtggtgcacacagtgcgcttcagcgagatccacttcctggccctggccatcggcagcgcctgtgccctgatgatcatcatcgtcatcgtggtggtgctcttccagcactacaggaagaagcgctgggccgagcgggcccacaaggtggtggagatcaagagcaaggaggaggagcggctgaaccaggagaagaaggtgtctgtgtacctggaggacacagactag

SEQ ID NO: 160584 - DNA, 648 bp, synthetic construct; identical to SEQ ID NO: 160583
  misc_feature 1..648: note = Description of Artificial Sequence: Synthetic coding sequence
  source 1..648: mol_type = other DNA

SEQ ID NO: 160585 - DNA, 708 bp, synthetic construct
  misc_feature 1..708: note = Description of Artificial Sequence: Synthetic coding sequence
  source 1..708: mol_type = other DNA
atgcagcagagaggagctgctggcagccggggctgtgccctcttccccctgctgggcgtgctcttcttccagggcgtgtacatcgtgttcagcctggagatccgggcagatgcccacgtgcggggctacgtgggggagaagatcaagctgaagtgcaccttcaagagcaccagtgatgtgacagacaagctgaccatcgactggacctaccggccccccagcagcagccacacagtgtccatcttccactaccagagcttccagtaccccaccacagctggcaccttccgggaccgcatctcctgggtgggcaatgtgtacaagggagatgccagcatcagcatcagcaaccccaccatcaaggacaatggcaccttcagctgtgctgtgaagaaccccccagatgtgcaccacaacatccccatgacagagctgactgtgacagagcggggcttcggcaccatgctgagctctgtggccctgctgagcatcctggtgtttgtgcccagcgctgtggtggtggccctgctgctggtgaggatgggcaggaaggccgccggcctgaagaagaggagccgcagcggctacaagaagagcagcattgaggtgtctgatgacacagaccaggaggaggaggaggcctgcatggcccggctgtgtgtgcgctgtgctgaatgtctggacagcgactatgaggagacctactag

SEQ ID NO: 160586 - DNA, 672 bp, synthetic construct
  misc_feature 1..672: note = Description of Artificial Sequence: Synthetic coding sequence
  source 1..672: mol_type = other DNA
atgcagcagagaggagctgctggcagccggggctgtgccctcttccccctgctgggcgtgctcttcttccaggatgcccacgtgcggggctacgtgggggagaagatcaagctgaagtgcaccttcaagagcaccagtgatgtgacagacaagctgaccatcgactggacctaccggccccccagcagcagccacacagtgtccatcttccactaccagagcttccagtaccccaccacagctggcaccttccgggaccgcatctcctgggtgggcaatgtgtacaagggagatgccagcatcagcatcagcaaccccaccatcaaggacaatggcaccttcagctgtgctgtgaagaaccccccagatgtgcaccacaacatccccatgacagagctgactgtgacagagcggggcttcggcaccatgctgagctctgtggccctgctgagcatcctggtgtttgtgcccagcgctgtggtggtggccctgctgctggtgaggatgggcaggaaggccgccggcctgaagaagaggagccgcagcggctacaagaagagcagcattgaggtgtctgatgacacagaccaggaggaggaggaggcctgcatggcccggctgtgtgtgcgctgtgctgaatgtctggacagcgactatgaggagacctactag

SEQ ID NO: 160587 - DNA, 3366 bp, synthetic construct
  misc_feature 1..3366: note = Description of Artificial Sequence: Synthetic coding sequence
  source 1..3366: mol_type = other DNA
atgagcctggagaatgaagacaagagggcccggaccaggagcaaggccctgcggggccccccagagaccacagctgctgacctgagctgccccaccccaggctgcaccggcagcggccacgtgcggggcaagtacagccgccacaggagcctgcagagctgccccctggccaagaagaggaagctggagggcgctgaggccgagcacctggtgtccaagaggaagagccaccccctgaagctggccctggatgagggctatggagtggacagtgatggcagcgaggacacagaggtgaaggatgcctctgtgtctgatgagagcgagggcaccctggagggcgctgaggccgagaccagcggccaggatgagatccacaggcctgagacagctgagggccgcagccctgtgaagagccacttcggcagcaaccccatcggcagcgccacagccagcagcaagggcagctacagcagctaccagggcatcatcgccaccagcctgctgaacctgggccagattgctgaggagaccctggtggaggaggacctgggccaggccgccaagccaggccctggcatcgtgcacctgctgcaggaggccgctgagggcgccgccagcgaggagggggagaagggcctcttcatccagccagaagatgctgaggaggtggtggaggtgaccacagagaggagccaggacctgtgcccccagagcctggaggatgctgccagcgaggagagcagcaagcagaagggcatcctgagccatgaggaggaggatgaggaggaggaggaggaggaggaggaggaggaggaggatgaggaggaggaggaggaggaggaggaggaggaggaggaggaggaggaggaggaggaggaggaggaggaggaggaggaggaggaggaggaggaggaggccgccccagatgtgatcttccaggaggacaccagccacaccagcgcccagaaggcccctgagctgcggggccctgagagccccagccccaagccagagtacagcgtgattgtggaggtgcggagtgatgatgacaaggatgaggacacccacagcaggaagagcacagtgacagatgaaagtgagatgcaggacatgatgacccggggcaacctgggcctgctggagcaggccatcgccctgaaggccgagcaggtgaggacagtgtgtgagcccggctgccccccagctgagcagagccagctgggcctgggggagcccgggaaggccgccaagcccctggacacagtgaggaagagctactacagcaaggaccccagcagagctgagaagcgggagatcaagtgccccaccccaggctgtgatggcaccggccacgtgacaggcctgtacccccaccacaggagcctgagcggctgcccccacaaggaccgcatccccccagagatcctggccatgcatgaaaatgtgctgaagtgccccaccccaggctgcaccggccagggccacgtgaacagcaacagaaacacccacaggagcctgagcggctgccccatcgctgctgctgagaagctggccaagagccatgagaagcagcagccccagacaggagaccccagcaagagcagcagcaacagcgaccgcatcctgcggcccatgtgctttgtgaagcagctggaggtgcccccctacggcagctaccggcccaacgtggccccagccaccccccgggccaacctggccaaggagctggagaagttcagcaaggtgacctttgattatgccagctttgatgcccaggtgtttgggaagaggatgctggcccccaagatccagaccagcgagaccagccccaaggccttccagtgctttgactacagccaggatgctgaggccgcccacatggccgccacagccatcctgaacctgagcacccgctgctgggagatgcctgagaacctgagcaccaagccccaggacctgcccagcaagtctgtggacatcgaggtggatgaaaatggcaccctggacctgtccatgcacaagcacaggaagcgggagaatgccttccccagcagcagcagctgcagcagcagccctggggtgaagagcccagatgccagccagaggcacagcagcaccagcgcccccagcagctccatgaccagcccccagagcagccaggccagccggcaggatgagtgggaccggcccctggactacaccaagcccagccggctgcgggaggaggagcctgaggagagcgagcctgctgcccacagctttgccagcagcgaggctgatgaccaggaggtgtctgaggagaactttgaggagaggaagtacccaggagaggtgaccctgaccaacttcaagctgaagttcctgagcaaggacatcaagaaggagctgctgacctgccccaccccaggctgtgatggcagcggccacatcaccggcaactatgccagccacaggagcctgagcggctgccccctggccgacaagagcctgaggaacctgatggccgcccacagcgctgacctgaagtgccccaccccaggctgtgatggcagcggccacatcaccggcaactatgccagccacaggagcctgagcggctgcccccgggccaagaagagcggcgtgaaggtggcccccaccaaggatgacaaggaggaccctgagctgatgaagtgccctgtgcccggctgtgtgggcctgggccacatcagcggcaagtatgccagccacaggtctgccagcggctgccccctggccgcccggcggcagaaggagggcagcctgaatggcagcagcttctcctggaagagcctgaagaatgaaggccccacctgccccaccccaggctgtgatggcagcggccacgccaacggcagcttcctgacccacaggagcctgagcggctgcccccgggccacctttgctgggaagaagggcaagctgtctggagatgaggtgctgagccccaagttcaagaccagtgatgtgctggagaatgatgaggagatcaagcagctgaaccaggagatccgggacctgaatgaaagcaacagcgagatggaggccgccatggtgcagctgcagagccagatcagctccatggagaagaacctgaagaacatcgaggaggagaacaagctgattgaggagcagaatgaggccctcttcctggagctgagcggcctgagccaggccctgatccagagcctggccaacatccggctgccccacatggagcccatctgtgagcagaactttgatgcctacgtgtccaccctgacagacatgtacagcaaccaggaccctgagaacaaggacctgctggagagcatcaagcaggccgtgcggggcatccaggtgtag

SEQ ID NO: 160588 - DNA, 1776 bp, synthetic construct
  misc_feature 1..1776: note = Description of Artificial Sequence: Synthetic coding sequence
  source 1..1776: mol_type = other DNA
atgagcctggagaatgaagacaagagggcccggaccaggagcaaggccctgcggggccccccagagaccacagctgctgacctgagctgccccaccccaggctgcaccggcagcggccacgtgcggggcaagtacagccgccacaggagcctgcagagctgccccctggccaagaagaggaagctggagggcgctgaggccgagcacctggtgtccaagaggaagagccaccccctgaagctggccctggatgagggctatggagtggacagtgatggcagcgaggacacagaggtgaaggatgcctctgtgtctgatgagagcgagggcaccctggagggcgctgaggccgagaccagcggccaggatgagatccacaggcctgagacagctgaggaccccagcagagctgagaagcgggagatcaagtgccccaccccaggctgtgatggcaccggccacgtgacaggcctgtacccccaccacaggagcctgagcggctgcccccacaaggaccgcatccccccagagatcctggccatgcatgaaaatgtgctgaagtgccccaccccaggctgcaccggccagggccacgtgaacagcaacagaaacacccacaggagcctgagcggctgccccatcgctgctgctgagaagctggccaagagccatgagaagcagcagccccagacaggagaccccagcaagagcagcagcaacagcgaccgcatcctgcggcccatgtgctttgtgaagcagctggaggtgcccccctacggcagctaccggcccaacgtggccccagccaccccccgggccaacctggccaaggagctggagaagttcagcaaggtgacctttgattatgccagctttgatgcccaggtgtttgggaagaggatgctggcccccaagatccagaccagcgagaccagccccaaggccttccagtgctttgactacagccaggatgctgaggccgcccacatggccgccacagccatcctgaacctgagcacccgctgctgggagatgcctgagaacctgagcaccaagccccaggacctgcccagcaagtctgtggacatcgaggtggatgaaaatggcaccctggacctgtccatgcacaagcacaggaagcgggagaatgccttccccagcagcagcagctgcagcagcagccctggggtgaagagcccagatgccagccagaggcacagcagcaccagcgcccccagcagctccatgaccagcccccagagcagccaggccagccggcaggatgagtgggaccggcccctggactacaccaagcccagccggctgcgggaggaggagcctgaggagagcgagcctgctgcccacagctttgccagcagcgaggctgatgaccaggaggtgtctgaggagaactttgaggagaggaagtacccaggagaggtgaccctgaccaacttcaagctgaagttcctgagcaaggacatcaagaaggagctgctgacctgccccaccccaggctgtgatggcagcggccacatcaccggcaactatgccagccaccggcgctgccccaccccaggctgtgatggcagcggccacatcactggaaattatgccagccacaggagcctgagcggctgcccccgggccaagaagtctggagtgaaggtggcccccaccaaggatgacaaggaggaccctgagctgatgaagtatgtgggcccctgctggctgttccactgcatcgccgagctgcgcttcagctgtgtgctgtag

SEQ ID NO: 160589 - DNA, 3447 bp, synthetic construct
  misc_feature 1..3447: note = Description of Artificial Sequence: Synthetic coding sequence
  source 1..3447: mol_type = other DNA
atgagcctggagaatgaagacaagagggcccggaccaggagcaaggccctgcggggccccccagagaccacagctgctgacctgagctgccccaccccaggctgcaccggcagcggccacgtgcggggcaagtacagccgccacaggagcctgcagagctgccccctggccaagaagaggaagctggagggcgctgaggccgagcacctggtgtccaagaggaagagccaccccctgaagctggccctggatgagggctatggagtggacagtgatggcagcgaggacacagaggtgaaggatgcctctgtgtctgatgagagcgagggcaccctggagggcgctgaggccgagaccagcggccaggatgagatccacaggcctgagacagctgagggccgcagccctgtgaagagccacttcggcagcaaccccatcggcagcgccacagccagcagcaagggcagctacagcagctaccagggcatcatcgccaccagcctgctgaacctgggccagattgctgaggagaccctggtggaggaggacctgggccaggccgccaagccaggccctggcatcgtgcacctgctgcaggaggccgctgagggcgccgccagcgaggagggggagaagggcctcttcatccagccagaagatgctgaggaggtggtggaggtgaccacagagaggagccaggacctgtgcccccagagcctggaggatgctgccagcgaggagagcagcaagcagaagggcatcctgagccatgaggaggaggatgaggaggaggaggaggaggaggaggaggaggaggaggatgaggaggaggaggaggaggaggaggaggaggaggaggaggaggaggaggaggaggaggaggaggaggaggaggaggaggaggaggaggaggaggaggccgccccagatgtgatcttccaggaggacaccagccacaccagcgcccagaaggcccctgagctgcggggccctgagagccccagccccaagccagagtacagcgtgattgtggaggtgcggagtgatgatgacaaggatgaggacacccacagcaggaagagcacagtgacagatgaaagtgagatgcaggacatgatgacccggggcaacctgggcctgctggagcaggccatcgccctgaaggccgagcaggtgaggacagtgtgtgagcccggctgccccccagctgagcagagccagctgggcctgggggagcccgggaaggccgccaagcccctggacacagtgaggaagagctactacagcaaggaccccagcagagctgagaagcgggagatcaagtgccccaccccaggctgtgatggcaccggccacgtgacaggcctgtacccccaccacaggagcctgagcggctgcccccacaaggaccgcatccccccagagatcctggccatgcatgaaaatgtgctgaagtgccccaccccaggctgcaccggccagggccacgtgaacagcaacagaaacacccacaggagcctgagcggctgccccatcgctgctgctgagaagctggccaagagccatgagaagcagcagccccagacaggagaccccagcaagagcagcagcaacagcgaccgcatcctgcggcccatgtgctttgtgaagcagctggaggtgcccccctacggcagctaccggcccaacgtggccccagccaccccccgggccaacctggccaaggagctggagaagttcagcaaggtgacctttgattatgccagctttgatgcccaggtgtttgggaagaggatgctggcccccaagatccagaccagcgagaccagccccaaggccttccagagcaagcccttccccaaggccagcagccccaggcacagccccagcagcagctatgtgcgcagcaccagcagcagcagcgctggctttgactacagccaggatgctgaggccgcccacatggccgccacagccatcctgaacctgagcacccgctgctgggagatgcctgagaacctgagcaccaagccccaggacctgcccagcaagtctgtggacatcgaggtggatgaaaatggcaccctggacctgtccatgcacaagcacaggaagagagaaaatgccttccccagcagcagcagctgcagcagcagccctggggtgaagagcccagatgccagccagaggcacagcagcaccagcgcccccagcagctccatgaccagcccccagagcagccaggccagccggcaggatgagtgggaccggcccctggactacaccaagcccagccggctgcgggaggaggagcctgaggagagcgagcctgctgcccacagctttgccagcagcgaggctgatgaccaggaggtgtctgaagaaaattttgaggagaggaagtacccaggagaggtgaccctgaccaacttcaagctgaagttcctgagcaaggacatcaagaaggagctgctgacctgccccaccccaggctgtgatggcagcggccacatcactggaaattatgccagccacaggagcctgagcggctgccccctggccgacaagagcctgaggaacctgatggccgcccacagcgctgacctgaagtgccccaccccaggctgtgatggcagcggccacatcactggaaattatgccagccacaggagcctgagcggctgcccccgggccaagaagtctggagtgaaggtggcccccaccaaggatgacaaggaggaccctgagctgatgaagtgccctgtgcccggctgtgtgggcctgggccacatcagcggcaagtatgccagccacaggtctgccagcggctgccccctggccgcccggcggcagaaggagggcagcctgaatggcagcagcttctcctggaagagcctgaagaatgaaggccccacctgccccaccccaggctgtgatggcagcggccacgccaacggcagcttcctgacccacaggagcctgagcggctgcccccgggccacctttgctgggaagaagggcaagctgtctggagatgaggtgctgagccccaagttcaagaccagtgatgtgctggagaatgatgaggagatcaagcagctgaaccaggagatccgggacctgaatgaaagcaacagcgagatggaggccgccatggtgcagctgcagagccagatcagctccatggagaagaacctgaagaacatcgaggaggagaacaagctgattgaggagcagaatgaggccctcttcctggagctgagcggcctgagccaggccctgatccagagcctggccaacatccggctgccccacatggagcccatctgtgagcagaactttgatgcctacgtgtccaccctgacagacatgtacagcaaccaggaccctgagaacaaggacctgctggagagcatcaagcaggccgtgcggggcatccaggtgtag

SEQ ID NO: 160590 - DNA, 3399 bp, synthetic construct
  misc_feature 1..3399: note = Description of Artificial Sequence: Synthetic coding sequence
  source 1..3399: mol_type = other DNA
atggaggtggacacagaggagaagaggcacaggaccaggagcaaaggagtgcgggtgcctgtggagcccgccatccaggagctgttcagctgccccaccccaggctgtgatggcagcggccacgtgtctgggaagtatgcccggcacaggtctgtgtatggctgccccctggccaagaagaggaagacccaggacaagcagccccaggagcccgcccccaagaggaagccctttgctgtgaaggctgacagcagctctgtggatgaatgtgatgacagtgatggaacagaggacatggatgagaaggaggaggatgaggaggaggaggaggaggaggaggaggagaatgaagaccaccagatgaactgccacaacacccgcatcatgcaggacacagagaaggatgacaacaacaatgatgaatatgacaactatgatgagctggtggccaagagcctgctgaacctgggcaagattgctgaagatgctgcctaccgggccaggacagaaagtgagatgaacagcaacaccagcaacagcctggaggatgacagcgacaagaatgaaaacctgggcaggaagtctgagctgagcctggacctggacagtgatgtggtgcgggagaccgtggacagcctgaagctgctggcccagggccacggcgtggtgctgtctgagaacatgaatgacagaaattatgctgacagcatgagccagcaggacagcaggaacatgaactacgtgatgctgggcaagcccatgaacaacggcctgatggagaagatggtggaggagagtgatgaggaggtgtgcctgagcagcctggagtgcctgaggaaccagtgctttgacctggccaggaagctgtctgagaccaacccccaggagaggaacccccagcagaacatgaacatccggcagcacgtgcggcctgaggaggacttccctggccgcaccccagacaggaactacagcgacatgctgaacctgatgaggctggaggagcagctgagccccaggagccgggtgtttgccagctgtgccaaggaggatggctgccacgagagagatgatgacaccacctctgtgaacagcgacagaagtgaggaggtgtttgacatgaccaagggcaacctgaccctgctggagaaggccatcgccctggagacagagcgggccaaggccatgagggagaagatggccatggaggccggccggcgggacaacatgaggagctatgaggaccagagcccccggcagctgcccggggaggacaggaagcccaagagcagtgacagccacgtgaagaagccctactatgaccccagcaggacagagaagaaggagagcaaatgtcccaccccaggctgtgatggcaccggccacgtgacaggcctgtacccccaccacaggagcctgagcggctgcccccacaaggacagagtgcccccagagatcctggccatgcatgagagcgtgctgaagtgccccaccccaggctgcaccggccggggccacgtgaacagcaacagaaacagccacaggagcctgagcggctgccccatcgctgctgctgagaagctggccaaggcccaggagaagcaccagagctgtgatgtgtccaagagcagccaggccagtgacagagtgctgcggcccatgtgctttgtgaagcagctggagatcccccagtatggctacagaaacaacgtgcccaccaccacccccaggagcaacctggccaaggagctggagaagtacagcaagaccagctttgagtacaacagctatgacaaccacacctacggcaagagggccatcgcccccaaggtgcagacccgggacatcagccccaagggctatgatgatgccaagcgctactgcaaggaccccagccccagcagcagcagcaccagcagctatgcccccagcagcagcagcaacctgagctgtggcggcggcagcagcgccagcagcacctgcagcaagagcagctttgactacacccatgacatggaggccgcccacatggccgccacagccatcctgaacctgagcacccgctgccgggagatgccccagaacctgagcaccaagccccaggacctgtgtgccaccagaaatccagacatggaggtggatgaaaatggcaccctggacctgtccatgaacaagcagaggccccgggacagctgctgccccatcctgacccccctggagcccatgagcccccagcagcaggccgtgatgaacaaccgctgcttccagctgggggagggggactgctgggacctgcctgtggactacaccaagatgaagcccaggagaattgatgaagatgagagcaaggacatcaccccagaggacctggaccccttccaggaggccctggaggagcggcgctacccaggagaggtgaccatccccagccccaagcccaagtacccccagtgcaaggagagcaagaaggacctgatcaccctgagcggctgccccctggccgacaagagcatccgctccatgctggccaccagcagccaggagctgaagtgccccaccccaggctgtgatggcagcggccacatcactggaaattatgccagccacaggagcctgagcggctgcccccgggccaagaagagcggcatcagaattgcccagagcaaggaggacaaggaggaccaggagcccatccgctgccctgtgcccggctgtgatggccagggccacatcaccgggaagtatgccagccacaggtctgccagcggctgccccctggccgccaagaggcagaaggatggctacctgaatggcagccagttctcctggaagtctgtgaagacagagggcatgagctgccccaccccaggctgtgatggcagcggccacgtgtctggcagcttcctgacccacaggagcctgagcggctgcccccgggccaccagcgccatgaagaaggccaagctgagcggggagcagatgctgaccatcaagcagagggccagcaatggaattgaaaatgatgaggagatcaagcagctggatgaggagatcaaggagctgaatgaaagcaacagccagatggaggccgacatgatcaagctgcggacccagatcaccaccatggagagcaacctgaagaccatcgaggaggagaacaaggtgattgagcagcagaatgaaagcctgctgcacgagctggccaacctgagccagagcctcatccacagcctggccaacatccagctgccccacatggaccccatcaatgagcagaactttgatgcctacgtgaccaccctgacagagatgtacaccaaccaggaccgctaccagagccctgagaacaaggccctgctggagaacatcaagcaggccgtgcggggcatccaggtgtag

SEQ ID NO: 160591 - DNA, 3561 bp, synthetic construct
  misc_feature 1..3561: note = Description of Artificial Sequence: Synthetic coding sequence
  source 1..3561: mol_type = other DNA
atggaggtggacacagaggagaagaggcacaggaccaggagcaaaggagtgcgggtgcctgtggagcccgccatccaggagctgttcagctgccccaccccaggctgtgatggcagcggccacgtgtctgggaagtatgcccggcacaggtctgtgtatggctgccccctggccaagaagaggaagacccaggacaagcagccccaggagcccgcccccaagaggaagccctttgctgtgaaggctgacagcagctctgtggatgaatgtgatgacagtgatggaacagaggacatggatgagaaggaggaggatgaaggagaggagtacagcgaggacaatgatgagcctggagatgaagatgaagaagatgaggagggggaccgggaggaggaggaggagattgaggaggaggatgaagatgatgatgaagatggagaagatgtggaggatgaggaggaggaggaggaggaggaggaggaggaggaggaggaggaggagaatgaagaccaccagatgaactgccacaacacccgcatcatgcaggacacagagaaggatgacaacaacaatgatgaatatgacaactatgatgagctggtggccaagagcctgctgaacctgggcaagattgctgaagatgctgcctaccgggccaggacagaaagtgagatgaacagcaacaccagcaacagcctggaggatgacagcgacaagaatgaaaacctgggcaggaagtctgagctgagcctggacctggacagtgatgtggtgcgggagaccgtggacagcctgaagctgctggcccagggccacggcgtggtgctgtctgagaacatgaatgacagaaattatgctgacagcatgagccagcaggacagcaggaacatgaactacgtgatgctgggcaagcccatgaacaacggcctgatggagaagatggtggaggagagtgatgaggaggtgtgcctgagcagcctggagtgcctgaggaaccagtgctttgacctggccaggaagctgtctgagaccaacccccaggagaggaacccccagcagaacatgaacatccggcagcacgtgcggcctgaggaggacttccctggccgcaccccagacaggaactacagcgacatgctgaacctgatgaggctggaggagcagctgagccccaggagccgggtgtttgccagctgtgccaaggaggatggctgccacgagagagatgatgacaccacctctgtgaacagcgacagaagtgaggaggtgtttgacatgaccaagggcaacctgaccctgctggagaaggccatcgccctggagacagagcgggccaaggccatgagggagaagatggccatggaggccggccggcgggacaacatgaggagctatgaggaccagagcccccggcagctgcccggggaggacaggaagcccaagagcagtgacagccacgtgaagaagccctactacggcaaggaccccagcaggacagagaagaaggagagcaaatgtcccaccccaggctgtgatggcaccggccacgtgacaggcctgtacccccaccacaggagcctgagcggctgcccccacaaggacagagtgcccccagagatcctggccatgcatgagagcgtgctgaagtgccccaccccaggctgcaccggccggggccacgtgaacagcaacagaaacagccacaggagcctgagcggctgccccatcgctgctgctgagaagctggccaaggcccaggagaagcaccagagctgtgatgtgtccaagagcagccaggccagtgacagagtgctgcggcccatgtgctttgtgaagcagctggagatcccccagtatggctacagaaacaacgtgcccaccaccacccccaggagcaacctggccaaggagctggagaagtacagcaagaccagctttgagtacaacagctatgacaaccacacctacggcaagagggccatcgcccccaaggtgcagacccgggacatcagccccaagggctatgatgatgccaagcgctactgcaaggaccccagccccagcagcagcagcaccagcagctatgcccccagcagcagcagcaacctgagctgtggcggcggcagcagcgccagcagcacctgcagcaagagcagctttgactacacccatgacatggaggccgcccacatggccgccacagccatcctgaacctgagcacccgctgccgggagatgccccagaacctgagcaccaagccccaggacctgtgtgccaccagaaatccagacatggaggtggatgaaaatggcaccctggacctgtccatgaacaagcagaggccccgggacagctgctgccccatcctgacccccctggagcccatgagcccccagcagcaggccgtgatgaacaaccgctgcttccagctgggggagggggactgctgggacctgcctgtggactacaccaagatgaagcccaggagaattgatgaagatgagagcaaggacatcaccccagaggacctggaccccttccaggaggccctggaggagcggcgctacccaggagaggtgaccatccccagccccaagcccaagtacccccagtgcaaggagagcaagaaggacctgatcaccctgagcggctgccccctggccgacaagagcatccgctccatgctggccaccagcagccaggagctgaagtgccccaccccaggctgtgatggcagcggccacatcactggaaattatgccagccacaggagcctgagcggctgcccccgggccaagaagagcggcatcagaattgcccagagcaaggaggacaaggaggaccaggagcccatccgctgccctgtgcccggctgtgatggccagggccacatcaccgggaagtatgccagccacaggtctgccagcggctgccccctggccgccaagaggcagaaggatggctacctgaatggcagccagttctcctggaagtctgtgaagacagagggcatgagctgccccaccccaggctgtgatggcagcggccacgtgtctggcagcttcctgacccacaggagcctgagcggctgcccccgggccaccagcgccatgaagaaggccaagctgagcggggagcagatgctgaccatcaagcagagggccagcaatggaattgaaaatgatgaggagatcaagcagctggatgaggagatcaaggagctgaatgaaagcaacagccagatggaggccgacatgatcaagctgcggacccagatcaccaccatggagagcaacctgaagaccatcgaggaggagaacaaggtgattgagcagcagaatgaaagcctgctgcacgagctggccaacctgagccagagcctcatccacagcctggccaacatccagctgccccacatggaccccatcaatgagcagaactttgatgcctacgtgaccaccctgacagagatgtacaccaaccaggaccgctaccagagccctgagaacaaggccctgctggagaacatcaagcaggccgtgcggggcatccaggtgtag

SEQ ID NO: 160592 - DNA, 555 bp, synthetic construct
  misc_feature 1..555: note = Description of Artificial Sequence: Synthetic coding sequence
  source 1..555: mol_type = other DNA
atgagctgccccaccccaggctgtgatggcagcggccacgtgtctggcagcttcctgacccacaggagcctgagcggctgcccccgggccaccagcgccatgaagaaggccaagctgagcggggagcagatgctgaccatcaagcagagggccagcaatggaattgaaaatgatgaggagatcaagcagctggatgaggagatcaaggagctgaatgaaagcaacagccagatggaggccgacatgatcaagctgcggacccaggtgaccatcaccaccatggagagcaacctgaagaccatcgaggaggagaacaaggtgattgagcagcagaatgaaagcctgctgcacgagctggccaacctgagccagagcctcatccacagcctggccaacatccagctgccccacatggaccccatcaatgagcagaactttgatgcctacgtgaccaccctgacagagatgtacaccaaccaggaccgctaccagagccctgagaacaaggccctgctggagaacatcaagcaggccgtgcggggcatccaggtgtag

SEQ ID NO: 160593 - DNA, 3555 bp, synthetic construct
  misc_feature 1..3555: note = Description of Artificial Sequence: Synthetic coding sequence
  source 1..3555: mol_type = other DNA
atggaggtggacacagaggagaagaggcacaggaccaggagcaaaggagtgcgggtgcctgtggagcccgccatccaggagctgttcagctgccccaccccaggctgtgatggcagcggccacgtgtctgggaagtatgcccggcacaggtctgtgtatggctgccccctggccaagaagaggaagacccaggacaagcagccccaggagcccgcccccaagaggaagccctttgctgtgaaggctgacagcagctctgtggatgaatgtgatgacagtgatggaacagaggacatggatgagaaggaggaggatgaaggagaggagtacagcgaggacaatgatgagcctggagatgaagatgaagaagatgaggagggggaccgggaggaggaggaggagattgaggaggaggatgaagatgatgatgaagatggagaagatgtggaggatgaggaggaggaggaggaggaggaggaggaggaggaggaggaggaggagaatgaagaccaccagatgaactgccacaacacccgcatcatgcaggacacagagaaggatgacaacaacaatgatgaatatgacaactatgatgagctggtggccaagagcctgctgaacctgggcaagattgctgaagatgctgcctaccgggccaggacagaaagtgagatgaacagcaacaccagcaacagcctggaggatgacagcgacaagaatgaaaacctgggcaggaagtctgagctgagcctggacctggacagtgatgtggtgcgggagaccgtggacagcctgaagctgctggcccagggccacggcgtggtgctgtctgagaacatgaatgacagaaattatgctgacagcatgagccagcaggacagcaggaacatgaactacgtgatgctgggcaagcccatgaacaacggcctgatggagaagatggtggaggagagtgatgaggaggtgtgcctgagcagcctggagtgcctgaggaaccagtgctttgacctggccaggaagctgtctgagaccaacccccaggagaggaacccccagcagaacatgaacatccggcagcacgtgcggcctgaggaggacttccctggccgcaccccagacaggaactacagcgacatgctgaacctgatgaggctggaggagcagctgagccccaggagccgggtgtttgccagctgtgccaaggaggatggctgccacgagagagatgatgacaccacctctgtgaacagcgacagaagtgaggaggtgtttgacatgaccaagggcaacctgaccctgctggagaaggccatcgccctggagacagagcgggccaaggccatgagggagaagatggccatggaggccggccggcgggacaacatgaggagctatgaggaccagagcccccggcagctgcccggggaggacaggaagcccaagagcagtgacagccacgtgaagaagccctactatgaccccagcaggacagagaagaaggagagcaaatgtcccaccccaggctgtgatggcaccggccacgtgacaggcctgtacccccaccacaggagcctgagcggctgcccccacaaggacagagtgcccccagagatcctggccatgcatgagagcgtgctgaagtgccccaccccaggctgcaccggccggggccacgtgaacagcaacagaaacagccacaggagcctgagcggctgccccatcgctgctgctgagaagctggccaaggcccaggagaagcaccagagctgtgatgtgtccaagagcagccaggccagtgacagagtgctgcggcccatgtgctttgtgaagcagctggagatcccccagtatggctacagaaacaacgtgcccaccaccacccccaggagcaacctggccaaggagctggagaagtacagcaagaccagctttgagtacaacagctatgacaaccacacctacggcaagagggccatcgcccccaaggtgcagacccgggacatcagccccaagggctatgatgatgccaagcgctactgcaaggaccccagccccagcagcagcagcaccagcagctatgcccccagcagcagcagcaacctgagctgtggcggcggcagcagcgccagcagcacctgcagcaagagcagctttgactacacccatgacatggaggccgcccacatggccgccacagccatcctgaacctgagcacccgctgccgggagatgccccagaacctgagcaccaagccccaggacctgtgtgccaccagaaatccagacatggaggtggatgaaaatggcaccctggacctgtccatgaacaagcagaggccccgggacagctgctgccccatcctgacccccctggagcccatgagcccccagcagcaggccgtgatgaacaaccgctgcttccagctgggggagggggactgctgggacctgcctgtggactacaccaagatgaagcccaggagaattgatgaagatgagagcaaggacatcaccccagaggacctggaccccttccaggaggccctggaggagcggcgctacccaggagaggtgaccatccccagccccaagcccaagtacccccagtgcaaggagagcaagaaggacctgatcaccctgagcggctgccccctggccgacaagagcatccgctccatgctggccaccagcagccaggagctgaagtgccccaccccaggctgtgatggcagcggccacatcactggaaattatgccagccacaggagcctgagcggctgcccccgggccaagaagagcggcatcagaattgcccagagcaaggaggacaaggaggaccaggagcccatccgctgccctgtgcccggctgtgatggccagggccacatcaccgggaagtatgccagccacaggtctgccagcggctgccccctggccgccaagaggcagaaggatggctacctgaatggcagccagttctcctggaagtctgtgaagacagagggcatgagctgccccaccccaggctgtgatggcagcggccacgtgtctggcagcttcctgacccacaggagcctgagcggctgcccccgggccaccagcgccatgaagaaggccaagctgagcggggagcagatgctgaccatcaagcagagggccagcaatggaattgaaaatgatgaggagatcaagcagctggatgaggagatcaaggagctgaatgaaagcaacagccagatggaggccgacatgatcaagctgcggacccagatcaccaccatggagagcaacctgaagaccatcgaggaggagaacaaggtgattgagcagcagaatgaaagcctgctgcacgagctggccaacctgagccagagcctcatccacagcctggccaacatccagctgccccacatggaccccatcaatgagcagaactttgatgcctacgtgaccaccctgacagagatgtacaccaaccaggaccgctaccagagccctgagaacaaggccctgctggagaacatcaagcaggccgtgcggggcatccaggtgtag

SEQ ID NO: 160594 - DNA, 552 bp, synthetic construct
  misc_feature 1..552: note = Description of Artificial Sequence: Synthetic coding sequence
  source 1..552: mol_type = other DNA
atgagccagaagccagccaaggagggcccccggctgagcaagaaccagaagtacagcgagcacttcagcatccactgctgcccccccttcaccttcctgaacagcaagaaggagatcgtggacaggaagtacagcatctgcaagagcggctgcttctaccagaagaaggaggaggactggatctgctgtgcctgccagaagaccaggaccagccggcgggccaagagcccccagaggcccaagcagcagcctgctgcccctcctgctgtggtgcgggccccagccaagcccaggagcccccccaggtctgagcggcagcccaggagcccccccaggtctgagcggcagcccaggagcccccccaggtctgagcggcagcccaggagcccccccaggtctgagcggcagccccggcccaggcctgaggtgcggcccccaccagccaagcagaggcctccccagaagagcaagcagcagcccaggagcagccccctgcggggccctggggccagcagaggaggcagccctgtgaaggccagccgcttctggtag

SEQ ID NO: 160595 - DNA, 246 bp, synthetic construct
  misc_feature 1..246: note = Description of Artificial Sequence: Synthetic coding sequence
  source 1..246: mol_type = other DNA
atgagccagaagccagccaaggagggcccccggctgagcaagaaccagaagtacagcgagcacttcagcatccactgctgcccccccttcaccttcctgaacagcaagaaggagatcgtggacaggaagtacagcatctgcaagagcggctgcttctaccagaagaaggaggaggactggatctgctgtgcctgccagaagacccggctgaagaggaagatccggcccacccccaagaagaagtag

SEQ ID NO: 160596 - DNA, 246 bp, synthetic construct; identical to SEQ ID NO: 160595
  misc_feature 1..246: note = Description of Artificial Sequence: Synthetic coding sequence
  source 1..246: mol_type = other DNA

SEQ ID NO: 160597 - DNA, 246 bp, synthetic construct; identical to SEQ ID NO: 160595
  misc_feature 1..246: note = Description of Artificial Sequence: Synthetic coding sequence
  source 1..246: mol_type = other DNA

SEQ ID NO: 160598 - DNA, 552 bp, synthetic construct; identical to SEQ ID NO: 160594
  misc_feature 1..552: note = Description of Artificial Sequence: Synthetic coding sequence
  source 1..552: mol_type = other DNA

SEQ ID NO: 160599 - DNA, 552 bp, synthetic construct; identical to SEQ ID NO: 160594
  misc_feature 1..552: note = Description of Artificial Sequence: Synthetic coding sequence
  source 1..552: mol_type = other DNA

SEQ ID NO: 160600 - DNA, 246 bp, synthetic construct; identical to SEQ ID NO: 160595
  misc_feature 1..246: note = Description of Artificial Sequence: Synthetic coding sequence
  source 1..246: mol_type = other DNA

SEQ ID NO: 160601 - DNA, 552 bp, synthetic construct; identical to SEQ ID NO: 160594
  misc_feature 1..552: note = Description of Artificial Sequence: Synthetic coding sequence
  source 1..552: mol_type = other DNA

SEQ ID NO: 160602 - DNA, 246 bp, synthetic construct; identical to SEQ ID NO: 160595
  misc_feature 1..246: note = Description of Artificial Sequence: Synthetic coding sequence
  source 1..246: mol_type = other DNA

SEQ ID NO: 160603 - DNA, 177 bp, synthetic construct
  misc_feature 1..177: note = Description of Artificial Sequence: Synthetic coding sequence
  source 1..177: mol_type = other DNA
atgagccagaagccagccaaggagggcccccggctgagcaagaaccagaagtacagcgagcacttcagcatccactgctgcccccccttcaccttcctgaacagcaagaaggagatcgtggacaggaagtacagcatctgcaagagcggctgcttctaccagaagaaggaggagtag

SEQ ID NO: 160604 - DNA, 423 bp, synthetic construct
  misc_feature 1..423: note = Description of Artificial Sequence: Synthetic coding sequence
  source 1..423: mol_type = other DNA
atgctgcaggccgctgacttcatcgagaggacagaaacagctggggagctgagccggggcctcatcggcgtgctgagcagccagatctcctggtgcctgctgaatgtgaacctgagcaagctgcccacccggctgcagaggctgagctgcagcgtgctgaacagcagccctgccatgagaggaggagcccggggccggccccagctgaccctggagcggcccctgcggcccggctgccgcctgcacagctgcagcgaggccgagaagggcggctttgtgcggaggaaggagatcatcctcttccccccctgtgaagatcctgcccggggctggctgagcgccaaccctggccgggagcccagccctggcatctgctggcacctgaacctgggcctgcccagcctgcacaactgtgaggagtag

SEQ ID NO: 160605 - DNA, 816 bp, synthetic construct
  misc_feature 1..816: note = Description of Artificial Sequence: Synthetic coding sequence
  source 1..816: mol_type = other DNA
atgtttggcctgaagagaaatgctgtgattggcctgaacctgtactgcggcggggccggcctgggcgccggcagcggcggggccaccaggcctgggggccgcctgctggccacagagaaggaggccagcgcccggcgggagatcggcggcggggaggccggggctgtgattggaggcagcgctggggccagcccccccagcaccctgaccccagacagccggcgggtggcccggcccccacccatcggggctgaggtgcctgatgtgacagccaccccagcccggctgctcttctttgcccccaccaggagagctgcccccctggaggagatggaggccccagctgctgatgccatcatgagccctgaggaggagctggatggctatgagcctgagcccctgggcaagaggcctgctgtgctgcccctgctggagctggtgggggagagcggcaacaacaccagcacagatggcagcctgcccagcaccccacctcctgctgaggaggaggaggatgagctgtaccggcagagcctggagatcatcagccgctacctgcgggagcaggccactggagccaaggacaccaagcccatgggccgcagcggggccaccagcaggaaggccctggagaccctgcggcgggtgggagatggagtgcagaggaaccacgagacagccttccagggctgggtgtgtggggtgctgccctgccggggcccccggcgctggcaccaggagtgtgccgccggcttctgccgctgctgctggagccgctcctggtttggcatcagcaacaagatcgccctgctgtag

SEQ ID NO: 160606 - DNA, 1053 bp, synthetic construct
  misc_feature 1..1053: note = Description of Artificial Sequence: Synthetic coding sequence
  source 1..1053: mol_type = other DNA
atgtttggcctgaagagaaatgctgtgattggcctgaacctgtactgcggcggggccggcctgggcgccggcagcggcggggccaccaggcctgggggccgcctgctggccacagagaaggaggccagcgcccggcgggagatcggcggcggggaggccggggctgtgattggaggcagcgctggggccagcccccccagcaccctgaccccagacagccggcgggtggcccggcccccacccatcggggctgaggtgcctgatgtgacagccaccccagcccggctgctcttctttgcccccaccaggagagctgcccccctggaggagatggaggccccagctgctgatgccatcatgagccctgaggaggagctggatggctatgagcctgagcccctgggcaagaggcctgctgtgctgcccctgctggagctggtgggggagagcggcaacaacaccagcacagatggcagcctgcccagcaccccacctcctgctgaggaggaggaggatgagctgtaccggcagagcctggagatcatcagccgctacctgcgggagcaggccactggagccaaggacaccaagcccatgggccgcagcggggccaccagcaggaaggccctggagaccctgcggcgggtgggagatggagtgcagaggaaccacgagacagccttccagggcatgctgaggaagctggacatcaagaatgaagatgatgtgaagagcctgagccgggtgatgatccacgtgttcagtgatggagtgaccaactggggccgcatcgtgaccctcatcagctttggagcctttgtggccaagcacctgaagaccatcaaccaggagagctgcatcgagcccctggccgagagcatcacagatgtgctggtgaggaccaagagggactggctggtgaagcagaggggctgggatggctttgtggagttcttccacgtggaggacctggagggcggcatcagaaatgtgctgctggcctttgctggggtggccggcgtgggcgccggcctggcctacctgatcagatag

SEQ ID NO: 160607 - DNA, 840 bp, synthetic construct
  misc_feature 1..840: note = Description of Artificial Sequence: Synthetic coding sequence
  source 1..840: mol_type = other DNA
atgtttggcctgaagagaaatgctgtgattggcctgaacctgtactgcggcggggccggcctgggcgccggcagcggcggggccaccaggcctgggggccgcctgctggccacagagatggaggccccagctgctgatgccatcatgagccctgaggaggagctggatggctatgagcctgagcccctgggcaagaggcctgctgtgctgcccctgctggagctggtgggggagagcggcaacaacaccagcacagatggcagcctgcccagcaccccacctcctgctgaggaggaggaggatgagctgtaccggcagagcctggagatcatcagccgctacctgcgggagcaggccaccggggccaaggacaccaagcccatgggccgcagcggggccaccagcaggaaggccctggagaccctgcggcgggtgggagatggagtgcagagaaatcatgaaacagccttccagggcatgctgaggaagctggacatcaagaatgaagatgatgtgaagagcctgagccgggtgatgattcatgtgttcagtgatggagtgaccaactggggcagaattgtgaccctcatcagctttggagcctttgtggccaagcacctgaagaccatcaaccaggagagctgcatcgagcccctggccgagagcatcacagatgtgctggtgaggaccaagagggactggctggtgaagcagaggggctgggatggctttgtggagttcttccacgtggaggacctggagggcggcatcagaaatgtgctgctggcctttgctggggtggccggcgtgggcgccggcctggcctacctgatcagatag

SEQ ID NO: 160608 - DNA, 1224 bp, synthetic construct
  misc_feature 1..1224: note = Description of Artificial Sequence: Synthetic coding sequence
  source 1..1224: mol_type = other DNA
atggtgaatgagtacaagaagatcctgctgctgaagggctttgagctgatggatgactaccacttcaccagcatcaagagcctgctggcctatgacctgggcctgaccaccaagatgcaggaggagtacaaccgcatcaagatcacagacctgatggagaagaagttccagggcgtggcctgcctggacaagctgattgagctggccaaggacatgcccagcctgaagaacctggtgaacaacctgaggaaggagaagagcaaggtggccaagaagatcaagacccaggagaaggcccctgtgaagaagatcaaccaggaggaggtgggcctggccgccccagcccccacagccaggaacaagctgaccagcgaggcccggggccgcatccctgtggcccagaagaggaagacccccaacaaggagaagacagaggccaagaggaacaaggtgtcccaggagcagagcaagcccccaggccccagcggggccagcaccagcgctgctgtggaccacccccccctgccccagaccagcagcagcacccccagcaacaccagcttcacccccaaccaggagacccaggcccagaggcaggtggatgccaggagaaatgtgccccagaatgaccctgtgacagtggtggtgctgaaggccacagcccccttcaagtatgagagcccagaaaatggcaagagcaccatgtttcatgccaccgtggccagcaagacccagtacttccacgtgaaggtgtttgacatcaacctgaaggagaagtttgtgaggaagaaggtgatcaccatcagtgactacagtgaatgtaaaggagtgatggagatcaaggaggccagctctgtgtctgacttcaaccagaactttgaggtgcccaaccgcatcatcgagatcgccaacaagacccccaagatcagccagctgtacaagcaggccagcggcaccatggtgtatggcctcttcatgctgcagaagaagtctgtgcacaagaagaacaccatctatgagatccaggacaacacaggctccatggatgtggtgggcagcggcaagtggcacaacatcaagtgtgagaagggggacaagctgcggctcttctgcctgcagctgaggacagtggacaggaagctgaagctggtgtgtggcagccacagcttcatcaaggtgatcaaggccaagaagaacaaggagggccccatgaatgtgaactag

SEQ ID NO: 160609 - DNA, 315 bp, synthetic construct
  misc_feature 1..315: note = Description of Artificial Sequence: Synthetic coding sequence
  source 1..315: mol_type = other DNA
tgacccaaccgcatcatcgagatcgccaacaagacccccaagatcagccagctgtacaagcaggccagcggcaccatggtgtatggcctcttcatgctgcagaagaagtctgtgcacaagaagaacaccatctatgagatccaggacaacacaggctccatggatgtggtgggcagcggcaagtggcacaacatcaagtgtgagaagggggacaagctgcggctcttctgcctgcagctgaggacagtggacaggaagctgaagctggtgatcaaggccaagaagaacaaggagggccccatgaatgtgaactag

SEQ ID NO: 160610 - DNA, 795 bp, synthetic construct
  misc_feature 1..795: note = Description of Artificial Sequence: Synthetic coding sequence
  source 1..795: mol_type = other DNA
atgaggccagacagagctgaggcccctggccccccagccatggccgccggcggccctggagctggcagcgctgcccctgtgagcagcaccagcagcctgcccctggccgccctgaacatgagggtgagaagaaggctgagcctcttcctgaatgtgaggacccaggtggccgctgactggacagccctggccgaggagatggactttgagtacctggagatccggcagctggagacccaggccgaccccaccggccgcctgctggatgcctggcagggccggcctggggcctctgtgggccgcctgctggagctgctgaccaagctgggcagagatgatgtgctgctggagctgggccccagcatcggccacatgcctgagagatttgatgccttcatctgctactgccccagcgacatccagtttgtgcaggagatgatccggcagctggagcagaccaactaccgcctgaagctgtgtgtgtctgacagagatgtgctgcccggcacctgtgtgtggagcatcgccagcgagctgattgagaagcgctgcaggaggatggtggtggtggtgtctgatgactacctgcagagcaaagaatgtgacttccagaccaagtttgccctgagcctgagccctggggcccaccagaagaggctcatccccatcaagtacaaggccatgaagaaggagttccccagcatcctgcgcttcatcaccgtgtgtgactacaccaacccctgcaccaagtcctggttctggacccggctggccaaggccctgagcctgccctag

SEQ ID NO: 160611 - DNA, 615 bp, synthetic construct
  misc_feature 1..615: note = Description of Artificial Sequence: Synthetic coding sequence
  source 1..615: mol_type = other DNA
atgaggccagacagagctgaggcccctggccccccagccatggccgccggcggccctggagctggcagcgctgcccctgtgagcagcaccagcagcctgcccctggccgccctgaacatgagggtgagaagaaggctgagcctcttcctgaatgtgaggacccaggtggccgctgactggacagccctggccgaggagatggactttgagtacctggagatccggcagctggagacccaggccgaccccaccggccgcctgctggatgcctggcagggccggcctggggcctctgtgggccgcctgctggagctgctgaccaagctgggcagagatgatgtgctgctggagctgggccccagcattgaggaggactgccagaagtacatcctgaagcagcagcaggaggaggccgagaagcccctgcaggtggccgctgtggacagctctgtgcccaggacagctgagctggccggcatcaccaccctggatgaccccctgggcgccgccggctggtggtggctgagcctgatgatcacctgccgggccagaaatgtgaccagccggcccaacctgcacagcgccagcctgcaggtgcccatccgcagtgactag

SEQ ID NO: 160612 - DNA, 480 bp, synthetic construct
  misc_feature 1..480: note = Description of Artificial Sequence: Synthetic coding sequence
  source 1..480: mol_type = other DNA
atgaggccagacagagctgaggcccctggccccccagccatggccgccggcggccctggagctggcagcgctgcccctgtgagcagcaccagcagcctgcccctggccgccctgaacatgagggtgagaagaaggctgagcctcttcctgaatgtgaggacccaggtggccgctgactggacagccctggccgaggagatggactttgagtacctggagatccggcagctggagacccaggccgaccccaccggccgcctgctggatgcctggcagggccggcctggggcctctgtgggccgcctgctggagctgctgaccaagctgggcagagatgatgtgctgctggagctgggccccagcatcggggctgctggctggtggtggctgagcctgatgatcacctgccgggccagaaatgtgaccagccggcccaacctgcacagcgccagcctgcaggtgcccatccgcagtgactag

SEQ ID NO: 160613 - DNA, 807 bp, synthetic construct
  misc_feature 1..807: note = Description of Artificial Sequence: Synthetic coding sequence
  source 1..807: mol_type = other DNA
atgttcaggatgctgaacagcagctttgaagatgaccccttcttcagcgagagcatcctggcccaccgggagaacatgaggcagatgatccgctccttcagcgagcccttcggccgggacctgctgagcatcagtgatggccggggccgggcccacaacagaagaggccacaatgatggagaggacagcctgacccacacagatgtgtcctccttccagaccatggaccagatggtgagcaacatgaggaactacatgcagaagctggagaggaactttggccagctgtctgtggaccccaacggccacagcttctgcagcagctctgtgatgacctacagcaagattggagatgagccccccaaggtgttccaggccagcacccagacccggcgggcccctgggggcatcaaggagaccaggaaggccatgagggacagcgacagcggcctggagaagatggccatcggccaccacatccatgaccgggcccacgtgatcaagaagagcaagaacaagaagacaggagatgaggaggtgaaccaggagttcatcaacatgaatgaaagtgatgcccacgcctttgatgaggagtggcagagcgaggtgctgaagtacaagccaggccgccacaacctgggcaacaccaggatgaggtctgtgggccacgagaaccctggcagccgggagctgaagagaagagagaagccccagcagagccctgccattgaacatggaagaagaagcaatgtgctgggggacaagctgcacatcaagggcagctctgtgaagagcaacaagaagtag

SEQ ID NO: 160614 - DNA, 732 bp, synthetic construct
  misc_feature 1..732: note = Description of Artificial Sequence: Synthetic coding sequence
  source 1..732: mol_type = other DNA
atgaggcagatgatccgctccttcagcgagcccttcggccgggacctgctgagcatcagtgatggccggggccgggcccacaacagaagaggccacaatgatggagaggacagcctgacccacacagatgtgagcagcttccagaccatggaccagatggtgagcaacatgaggaactacatgcagaagctggagaggaactttggccagctgtctgtggaccccaacggccacagcttctgcagcagctctgtgatgacctacagcaagattggagatgagccccccaaggtgttccaggccagcacccagacccggcgggcccctgggggcatcaaggagaccaggaaggccatgagggacagcgacagcggcctggagaagatggccatcggccaccacatccatgaccgggcccacgtgatcaagaagagcaagaacaagaagacaggagatgaggaggtgaaccaggagttcatcaacatgaatgaaagtgatgcccacgcctttgatgaggagtggcagagcgaggtgctgaagtacaagccaggccgccacaacctgggcaacaccaggatgaggtctgtgggccatgaaaatcctggcagccgggagctgaagaggcgggagaagccccagcagagccctgccatcgagcacggccgccgcagcaatgtgctgggggacaagctgcacatcaagggcagctctgtgaagagcaacaagaagtag

SEQ ID NO: 160615 - DNA, 900 bp, synthetic construct
  misc_feature 1..900: note = Description of Artificial Sequence: Synthetic coding sequence
  source 1..900: mol_type = other DNA
atgctgaaggaggtgctgcagcgggagggcaagagctacaagtctgagaccctgatgtacatcaagaaggcccgggccagcgagaacaagctgtctgagagcatcctggcccaccgggagaacatgaggcagatgatccgctccttcagcgagcccttcggccgggacctgctgagcatcagtgatggccggggccgggcccacaacagaagaggccacaatgatggagaggacagcctgacagccaccagctgcagcctggtgccctttggagactttggaggcatgcacacagatgtgagcagcttccagaccatggaccagatggtgagcaacatgaggaactacatgcagaagctggagaggaactttggccagctgtctgtggaccccaacggccacagcttctgcagcagctctgtgatgacctacagcaagattggagatgagccccccaaggtgttccaggccagcacccagacccggcgggcccctgggggcatcaaggagaccaggaaggccatgagggacagcgacagcggcctggagaagatggccatcggccaccacatccatgaccgggcccacgtgatcaagaagagcaagaacaagaagacaggagatgaggaggtgaaccaggagttcatcaacatgaatgaaagtgatgcccacgcctttgatgaggagtggcagagcgaggtgctgaagtacaagccaggccgccacaacctgggcaacaccaggatgaggtctgtgggccatgaaaatcctggcagccgggagctgaagaggcgggagaagccccagcagagccctgccatcgagcacggccgccgcagcaatgtgctgggggacaagctgcacatcaagggcagctctgtgaagagcaacaagaagtag

SEQ ID NO: 160616 - DNA, 777 bp, synthetic construct
  misc_feature 1..777: note = Description of Artificial Sequence: Synthetic coding sequence
  source 1..777: mol_type = other DNA
atgaggcagatgatccgctccttcagcgagcccttcggccgggacctgctgagcatcagtgatggccggggccgggcccacaacagaagaggccacaatgatggagaggacagcctgacagccaccagctgcagcctggtgccctttggagactttggaggcatgcacacagatgtgtcctccttccagaccatggaccagatggtgagcaacatgaggaactacatgcagaagctggagaggaactttggccagctgtctgtggaccccaacggccacagcttctgcagcagctctgtgatgacctacagcaagattggagatgagccccccaaggtgttccaggccagcacccagacccggcgggcccctgggggcatcaaggagaccaggaaggccatgagggacagcgacagcggcctggagaagatggccatcggccaccacatccatgaccgggcccacgtgatcaagaagagcaagaacaagaagacaggagatgaggaggtgaaccaggagttcatcaacatgaatgaaagtgatgcccacgcctttgatgaggagtggcagagcgaggtgctgaagtacaagccaggccgccacaacctgggcaacaccaggatgaggtctgtgggccacgagaaccctggcagccgggagctgaagagaagagagaagccccagcagagccctgccattgaacatggaagaagaagcaatgtgctgggggacaagctgcacatcaagggcagctctgtgaagagcaacaagaagtag

SEQ ID NO: 160617 - DNA, 777 bp, synthetic construct; identical to SEQ ID NO: 160616
  misc_feature 1..777: note = Description of Artificial Sequence: Synthetic coding sequence
  source 1..777: mol_type = other DNA

SEQ ID NO: 160618 - DNA, 732 bp, synthetic construct; identical to SEQ ID NO: 160614
  misc_feature 1..732: note = Description of Artificial Sequence: Synthetic coding sequence
  source 1..732: mol_type = other DNA

SEQ ID NO: 160619 - DNA, 732 bp, synthetic construct; identical to SEQ ID NO: 160614
  misc_feature 1..732: note = Description of Artificial Sequence: Synthetic coding sequence
  source 1..732: mol_type = other DNA

SEQ ID NO: 160620 - DNA, 603 bp, synthetic construct
  misc_feature 1..603: note = Description of Artificial Sequence: Synthetic coding sequence
  source 1..603: mol_type = other DNA
atgaggcagatgatccgctccttcagcgagcccttcggccgggacctgctgagcatcagtgatggccggggccgggcccacaacagaagaggccacaatgatggagaggacagcctgacccacacagatgtgagcagcttccagaccatggaccagatggtgagcaacatgaggaactacatgcagaagctggagaggaacttcatcaaggagaccaggaaggccatgagggacagcgacagcggcctggagaagatggccatcggccaccacatccatgaccgggcccacgtgatcaagaagagcaagaacaagaagacaggagatgaggaggtgaaccaggagttcatcaacatgaatgaaagtgatgcccacgcctttgatgaggagtggcagagcgaggtgctgaagtacaagccaggccgccacaacctgggcaacaccaggatgaggtctgtgggccacgagaaccctggcagccgggagctgaagagaagagagaagccccagcagagccctgccattgaacatggaagaagaagcaatgtgctgggggacaagctgcacatcaagggcagctctgtgaagagcaacaagaagtag

SEQ ID NO: 160621 - DNA, 747 bp, synthetic construct
  misc_feature 1..747: note = Description of Artificial Sequence: Synthetic coding sequence
  source 1..747: mol_type = other DNA
atgttccgcttcatgagagatgtggagcctgaggaccccatgttcctgatggacccctttgccatccaccggcagcacatgagcaggatgctgagcggcggcttcggctacagccccttcctgagcatcacagatggcaacatgcctggcaccaggcctgccagcaggaggatgcagcaggccggggctgtgagccccttcggcatgctgggcatgtctgggggcttcatggacatgtttggcatgatgaatgacatgattggcaacatggagcacatgacagctgggggcaactgccagaccttcagcagcagcaccgtcatctcctacagcaacacaggagatggagcccccaaggtgtaccaggagaccagcgagatgaggtctgcccctgggggcatccgggagaccaggagaacagtgcgggacagcgacagcggcctggagcagatgagcatcggccaccacatccgggaccgggcccacatcctgcagaggagcaggaaccacaggactggagaccaggaggagcggcaggactacatcaacctggatgaaagtgaagctgctgcctttgatgatgagtggaggcgggagaccagccgcttccggcagcagaggcccctggagttccggcggctggagagcagtggagctgggggccggcgggcagagggccccccccggctggccatccagggccctgaggacagccccagccggcagagccgccgctatgactggtag

SEQ ID NO: 160622 - DNA, 747 bp, synthetic construct; identical to SEQ ID NO: 160621
  misc_feature 1..747: note = Description of Artificial Sequence: Synthetic coding sequence
  source 1..747: mol_type = other DNA

SEQ ID NO: 160623 - DNA, 747 bp, synthetic construct; identical to SEQ ID NO: 160621
  misc_feature 1..747: note = Description of Artificial Sequence: Synthetic coding sequence
  source 1..747: mol_type = other DNA

SEQ ID NO: 160624 - DNA, 747 bp, synthetic construct; identical to SEQ ID NO: 160621
  misc_feature 1..747: note = Description of Artificial Sequence: Synthetic coding sequence
  source 1..747: mol_type = other DNA

SEQ ID NO: 160625 - DNA, 684 bp, synthetic construct
  misc_feature 1..684: note = Description of Artificial Sequence: Synthetic coding sequence
  source 1..684: mol_type = other DNA
atgatggccgccggggccgccctggccctggccctgtggctgctgatgcctcctgtggaggtgggcggggccggccccccacccatccaggatggagagttcaccttcctgctgcctgctggcaggaagcagtgcttctaccagagcgccccagccaatgccagcctggagacagagtaccaggtgattggaggagctggcctggatgtggacttcaccctggagagcccccagggcgtgctgctggtgtctgagagcaggaaggcagatggagtgcacacagtggagcccacagaggccggggactacaagctgtgctttgacaacagcttcagcaccatcagcgagaagctggtgttctttgagctgatctttgacagcctgcaggatgatgaggaggtggagggctgggccgaggccgtggagcctgaggagatgctggatgtgaagatggaggacatcaaggagagcattgagaccatgaggacccggctggagaggagcatccagatgctgaccctgctgcgggcctttgaggcccgggacaggaacctgcaggagggcaacctggagcgggtgaacttctggagcgctgtgaatgtggccgtgctgctgctggtggccgtgctgcaggtgtgcaccctgaagcgcttcttccaggacaagaggcctgtgcccacctag

SEQ ID NO: 160626 - DNA, 873 bp, synthetic construct
  misc_feature 1..873: note = Description of Artificial Sequence: Synthetic coding sequence
  source 1..873: mol_type = other DNA
atgaggcctgctgtgctgggcagcccagaccgggcccccccagaagatgagggccctgtgatggtgaagctggaggacagcgaggaggagggggaggccgccctgtgggaccccggccctgaggccgcccggctgcgcttccgctgcttccgctatgaggaggccaccggcccccaggaggccctggcccagctgcgggagctgtgccggcagtggctgcggcctgaggtgcgcagcaaggagcagatgctggagctgctggtgctggagcagttcctgggcgccctgcccccagagatccaggcccgggtgcagggccagaggcctggcagccctgaggaggccgccgccctggtggatggcctgcggcgggagcccggcggcccccggcgctgggtgacagtgcaggtgcagggccaggaggtgctgtctgagaagatggagcccagcagcttccagcccctgcctgagacagagccccccaccccagagcccggccccaagaccccacccaggaccatgcaggagagccccctgggcctgcaggtgaaggaggagagcgaggtgacagaagattctgacttcctggagagcggccccctggccgccacccaggagagcgtgcccaccctgctgcctgaggaggcccagagatgtggcaccgtgctggaccagatcttcccccacagcaagacaggccctgagggccccagctggagggagcacccccgggccctgtggcatgaggaggccggcggcatcttcagccctggagctggagctggagctgccccagccctgggcgccggctggctgggcgctgctgtggccatgtatgtggcccgctgcagcgccaatgctgccacctgctag

SEQ ID NO: 160627 - DNA, 2205 bp, synthetic construct
  misc_feature 1..2205: note = Description of Artificial Sequence: Synthetic coding sequence
  source 1..2205: mol_type = other DNA
atgaggcctgctgtgctgggcagcccagaccgggcccccccagaagatgagggccctgtgatggtgaagctggaggacagcgaggaggagggggaggccgccctgtgggaccccggccctgaggccgcccggctgcgcttccgctgcttccgctatgaggaggccaccggcccccaggaggccctggcccagctgcgggagctgtgccggcagtggctgcggcctgaggtgcgcagcaaggagcagatgctggagctgctggtgctggagcagttcctgggcgccctgcccccagagatccaggcccgggtgcagggccagaggcctggcagccctgaggaggccgccgccctggtggatggcctgcggcgggagcccggcggcccccggcgctgggtgacagtgcaggtgcagggccaggaggtgctgtctgagaagatggagcccagcagcttccagcccctgcctgagacagagccccccaccccagagcccggccccaagaccccacccaggaccatgcaggagagccccctgggcctgcaggtgaaggaggagagcgaggtgacagaagattctgacttcctggagagcggccccctggccgccacccaggagagcgtgcccaccctgctgcctgaggaggcccagagatgtggcaccgtgctggaccagatcttcccccacagcaagacaggccctgagggccccagctggagggagcacccccgggccctgtggcatgaggaggccggcggcatcttcagccctggctttgccctgcagctgggcagcatctctgctggccctggctctgtgagcccccacctgcacgtgccctgggacctgggcatggccggcctgagcggccagatccagagccccagccgggagggcggctttgcccacgccctgctgctgcccagcgacctgcggtctgagcaggaccccacagatgaggacccctgccggggcgtgggccctgccctgatcaccacccgctggaggagcccccggggccgcagccggggccggcccagcactggaggaggagtggtgcggggcggccgctgtgatgtgtgtgggaaggtgttcagccagaggagcaacctgctgcggcaccagaagatccacactggagagcggccctttgtgtgcagtgaatgtggccgctccttcagccgcagcagccacctgctgcggcaccagctgacccacacagaggagcggccctttgtgtgtggggactgtggccagggctttgtgcgcagcgcccggctggaggagcacagaagagtgcacactggagagcagcccttccgctgtgccgagtgtggccagagcttccggcagaggagcaacctgctgcagcaccagaggatccacggggaccccccaggccctggggccaagcccccagcccctcctggggcccctgagcccccaggccccttcccctgcagtgaatgtcgggagagctttgcccggcgggctgtgctgctggagcaccaggccgtgcacactggagacaagagctttggctgtgtggagtgtggggagcgcttcggccgccgctctgtgctgctgcagcaccggcgggtgcacagcggggagcggccctttgcctgtgctgaatgtggccagagcttccggcagaggagcaacctgacccagcaccggcgcatccacactggagagcggccctttgcctgtgctgaatgtgggaaggccttccggcagaggcccaccctgacccagcacctgcgggtgcacactggagagaagccctttgcctgcccagaatgtggccagcgcttcagccagaggctgaagctgaccaggcaccagaggacccacactggagagaagccctaccactgtggagaatgtggcctgggcttcacccaggtgtcccggctgacagagcaccagaggatccacactggagagcggccctttgcctgcccagaatgtggccagagcttccggcagcacgccaacctgacccagcaccggcgcatccacactggagagcggccctatgcctgcccagaatgtgggaaggccttccggcagaggcccaccctgacccagcacctgcggacccaccggcgggagaagccctttgcctgccaggactgtggccgccgcttccaccagagcaccaagctgatccagcaccagagggtgcacagcgctgagtag

SEQ ID NO: 160628 - DNA, 1539 bp, synthetic construct
  misc_feature 1..1539: note = Description of Artificial Sequence: Synthetic coding sequence
  source 1..1539: mol_type = other DNA
atggcccacagctgccgctggaggtttcctgcccggcccggcaccaccggcggcggcggcggcggcggccggcggggcctgggcggggccccccggcagagggtgcctgccctgctgctgcccccaggcccccctgtgggcggcggcggccctggggccccacccagccccccagctgtggccgctgctgctgctgctgctggcagcagcggggccggcgtgcctggaggagctgctgctgccagcgctgccagcagcagcagcgccagcagcagcagcagcagcagcagcagcgccagcagcggccctgccctgctgcgggtgggccctggctttgatgctgccctgcaggtgtctgctgccatcggcaccaacctgcggcgcttccgggctgtgtttggagagagcggcggcggcggcggcagcggggagctgaccacccagatcccctgctcctggaggaccaagggccacatccatgacaagaagacagagcccttccggctgctggcctggagctggtgcctgaatgatgagcagttcctgggcttcggcagtgatgaggaggtgcgggtgcgcagccccaccaggagccccagcgtgaagaccagccccaggaagccccggggccggcccaggagcggcagtgacaggaacagcgccatcctgagtgaccccagcgtcttcagccccctgaacaagtctgagaccaagagcggggacaagatcaagaagaaggacagcaagagcattgagaagaagaggggccggccccccaccttccctggggtgaagatcaagatcacccacggcaaggacatcagcgagctgcccaagggcaacaaggaggacagcctgaagaagatcaagaggacccccagcgccaccttccagcaggccaccaagatcaagaagctgcgggccggcaagctgagccccctgaagagcaagttcaagacaggcaagctgcagattggaaggaagggcgtgcagatcgtgagaagaagaggccggccccccagcacagagcgcatcaagaccccatctggcctgctgatcaacagcgagctggagaagccccagaaggtgaggaaggacaaggagggcaccccacccctgaccaaggaggacaagacagtggtgcggcagagcccccggcgcatcaagcctgtgcgcatcatccccagcagcaagaggacagatgccaccatcgccaagcagctgctgcagagggccaagaagggggcccagaagaagattgagaaggaggccgcccagctgcagggcaggaaggtgaagacccaggtgaagaacatccggcagttcatcatgcctgtggtgtctgccatcagcagccgcatcatcaagaccccccggcgcttcattgaagatgaagattatgacccccccatcaagatcgcccggctggagagcacccccaacagccgcttcagcgcccccagctgtggcagcagcgagaagagcagcgctgccagccagcacagcagccagatgagcagtgacagcagccgctcctag

SEQ ID NO: 160629 - DNA, 11796 bp, synthetic construct
  misc_feature 1..11796: note = Description of Artificial Sequence: Synthetic coding sequence
  source 1..11796: mol_type = other DNA
atggcccacagctgccgctggaggtttcctgcccggcccggcaccaccggcggcggcggcggcggcggccggcggggcctgggcggggccccccggcagagggtgcctgccctgctgctgcccccaggcccccctgtgggcggcggcggccctggggccccacccagccccccagctgtggccgctgctgctgctgctgctggcagcagcggggccggcgtgcctggaggagctgctgctgccagcgctgccagcagcagcagcgccagcagcagcagcagcagcagcagcagcgccagcagcggccctgccctgctgcgggtgggccctggctttgatgctgccctgcaggtgtctgctgccatcggcaccaacctgcggcgcttccgggctgtgtttggagagagcggcggcggcggcggcagcggggaggatgagcagttcctgggctttggaagtgatgaggaggtgcgggtgcgcagccccaccaggagccccagcgtgaagaccagccccaggaagccccggggccggcccaggagcggcagtgacagaaattctgccatcctgagtgaccccagcgtcttcagccccctgaacaagtctgagaccaagagcggggacaagatcaagaagaaggacagcaagagcattgagaagaagaggggccggccccccaccttccctggggtgaagatcaagatcacccacggcaaggacatcagcgagctgcccaagggcaacaaggaggacagcctgaagaagatcaagaggaccccatctgccaccttccagcaggccaccaagatcaagaagctgcgggccggcaagctgagccccctgaagagcaagttcaagacaggcaagctgcagatcggcaggaaaggagtgcagatcgtgagaagaagaggccggccccccagcacagagcgcatcaagacccccagcggcctgctgatcaacagcgagctggagaagccccagaaggtgaggaaggacaaggagggcaccccacccctgaccaaggaggacaagacagtggtgcggcagagcccccggcgcatcaagcctgtgcgcatcatccccagcagcaagaggacagatgccaccatcgccaagcagctgctgcagagggccaagaagggggcccagaagaagattgagaaggaggccgcccagctgcagggcaggaaggtgaagacccaggtgaagaacatccggcagttcatcatgcctgtggtgtctgccatcagcagccgcatcatcaagaccccccggcgcttcattgaagatgaggactatgacccccccatcaagatcgcccggctggagagcacccccaacagccgcttcagcgcccccagctgtggcagcagcgagaagagcagcgctgccagccagcacagcagccagatgagcagtgacagcagccgcagcagcagccccagcgtggacaccagcacagacagccaggccagcgaggagatccaggtgctgcctgaggagaggagtgacaccccagaggtgcacccccccctgcccatcagccagagcccagaaaatgaaagcaatgaccggcgcagccgccgctacagcgtgtctgagaggagctttggcagcaggaccaccaagaagctgagcaccctgcagagcgccccccagcagcagaccagcagcagccccccaccacccctgctgaccccacctccacccctgcagcctgccagcagcatcagtgaccacaccccctggctgatgccacccaccatccccctggccagccccttcctgcctgccagcacagcccccatgcagggcaagaggaagagcatcctgcgggagcccaccttccgctggaccagcctgaagcacagccgctctgagccccagtacttcagcagcgccaagtatgccaaggagggcctcatcaggaagcccatctttgacaacttccggcccccacccctgaccccagaagatgtgggctttgccagcggcttcagcgccagcggcacagctgccagcgcccggctcttcagccccctgcacagcggcaccaggtttgacatgcacaagaggagccccctgctgcgggccccccgcttcaccccatctgaggcccacagccgcatctttgagagcgtgaccctgcccagcaacagaacatctgctggcaccagcagcagtggagtgagcaacaggaagaggaagaggaaggtgttcagccccatccgctctgagcccaggagccccagccacagcatgaggaccaggagcggccgcctgagcagcagcgagctgagccccctgaccccacccagctctgtgagcagcagcctgagcatctctgtgagccccctggccaccagcgccctgaaccccaccttcaccttccccagccacagcctgacccagagcggggagagcgctgagaagaaccagaggcccaggaagcagaccagcgccccagctgagcccttcagcagcagcagccccacccccctcttcccctggttcaccccaggcagccagacagagcggggcaggaacaaggacaaggcccctgaggagctgagcaaggacagagatgctgacaagtctgtggagaaggacaagagccgggagcgggaccgggagcgggagaaggagaacaagcgggagagcaggaaggagaagaggaagaagggcagcgagatccagagcagcagcgccctgtaccctgtgggccgggtgtccaaggagaaggtggtgggagaagatgtggccaccagcagcagcgccaagaaggccactggaaggaagaagagcagcagccatgattctggaacagacatcacctctgtgaccctgggggacaccacagctgtgaagaccaagatcctgatcaagaagggccggggcaacctggagaagaccaacctggacctgggccccacagcccccagcctggagaaggagaagaccctgtgcctgagcacccccagcagcagcacagtgaagcacagcaccagcagcatcggctccatgctggcccaggccgacaagctgcccatgacagacaagagggtggccagcctgctgaagaaggccaaggcccagctgtgcaagattgagaagagcaagagcctgaagcagacagaccagcccaaggcccagggccaggagagtgacagcagcgagacctctgtgcggggcccccgcatcaagcacgtgtgcagaagagctgctgtggccctgggcaggaagagagctgtgtttcctgatgacatgcccaccctgagcgccctgccctgggaggagcgggagaagatcctgagctccatgggaaatgatgacaagagcagcattgctggctctgaagatgctgagcccctggccccacccatcaagcccatcaagcctgtgaccaggaacaaggccccccaggagccccctgtgaagaagggccgccgcagcagaagatgtggccagtgccccggctgccaggtgcctgaggactgtggggtgtgcaccaactgcctggacaagcccaagtttggaggcaggaacatcaagaagcagtgctgcaagatgaggaagtgccagaacctgcagtggatgcccagcaaggcctacctgcagaagcaggccaaggctgtgaagaagaaggagaagaagagcaagaccagcgagaagaaggacagcaaggagagctctgtggtgaagaatgtggtggacagcagccagaagcccaccccatctgcccgggaggaccctgcccccaagaagagcagcagcgagcccccacccaggaagcctgtggaggagaagtctgaggagggcaatgtgtctgcccctggccctgagagcaagcaggccaccaccccagccagcaggaagagcagcaagcaggtgtcccagcctgccctggtgatccccccccagccccccaccaccggcccccccaggaaggaggtgcccaagaccaccccatctgagcccaagaagaagcagcccccacctcctgagagcggccctgagcagagcaagcagaagaaggtggccccccggcccagcatccctgtgaagcagaagcccaaggagaaggagaagcccccacctgtgaacaagcaggagaatgccggcaccctgaacatcctgagcaccctgagcaatggaaacagcagcaagcagaagatcccagcagatggagtgcaccgcatccgggtggacttcaagtttgtgtactgccaggtgtgctgtgagcccttccacaagttctgcctggaggagaatgaaagacccctggaggaccagctggagaactggtgctgccgccgctgcaagttctgccacgtgtgtggccggcagcaccaggccaccaagcagctgctggagtgcaacaagtgcaggaacagctaccaccctgagtgcctgggccccaactaccccaccaagcccaccaagaagaagaaggtgtggatctgcaccaagtgtgtgcgctgcaagagctgtggcagcaccaccccaggcaagggctgggatgcccagtggagccatgacttcagcctgtgccacgactgtgccaagctgtttgccaagggcaacttctgccccctgtgtgacaagtgctatgatgatgatgattatgagagcaagatgatgcagtgtgggaaatgtgaccgctgggtgcacagcaaatgtgagaacctgagtgatgagatgtatgagatcctgagcaacctgcctgagagcgtggcctacacctgtgtgaactgcacagagcggcaccctgctgagtggaggctggccctggagaaggagctgcagatcagcctgaagcaggtgctgacagccctgctgaacagcaggaccaccagccacctgctgcgctaccggcaggccgccaagcccccagacctgaaccctgagacagaggagagcatccccagccgcagcagccctgagggccctgacccccctgtgctgacagaggtgtccaagcaggatgaccagcagcccctggacctggagggcgtgaagaggaagatggaccagggcaactacacctctgtgctggagttcagtgatgacatcgtgaagatcatccaggccgccatcaacagtgatggcggccagcctgagatcaagaaggccaacagcatggtgaagagcttcttcatccggcagatggagagggtcttcccctggttctctgtgaagaagagccgcttctgggagcccaacaaggtgagcagcaacagcggcatgctgcccaatgctgtgctgccccccagcctggaccacaactatgcccagtggcaggagcgggaggagaacagccacacagagcagccccccctgatgaagaagatcatcccagcccccaagcccaagggccctggagagccagacagccccacccccctgcacccccccaccccacccatcctgagcacagacaggagccgggaggacagccctgagctgaaccccccacctggcatcgaggacaaccggcagtgtgccctgtgcctgacctatggagatgattctgccaatgatgctggccgcctgctgtacatcggccagaatgagtggacccacgtgaactgtgccctgtggagcgctgaggtgtttgaagatgatgatggcagcctgaagaatgtgcacatggccgtcatccggggcaagcagctgcgctgtgagttctgccagaagccaggggccaccgtgggctgctgcctgaccagctgcaccagcaactaccacttcatgtgcagccgggccaagaactgtgtgttcctggatgacaagaaggtgtactgccagaggcaccgggacctgatcaagggggaggtggtgcctgaaaatggatttgaggtgttcagaagagtgtttgtggactttgagggcatcagcctgcggaggaagttcctgaatggcctggagcctgagaacatccacatgatgattggctccatgaccatcgactgcctgggcatcctgaatgacctgagtgactgtgaggacaagctgttccccatcggctaccagtgcagccgggtgtactggagcaccacagatgccaggaagagatgtgtgtacacctgcaagatcgtggagtgccggccccctgtggtggagccagacatcaacagcacagtggagcatgatgaaaatagaaccatcgcccacagccccaccagcttcacagagagcagcagcaaggagagccagaacacagctgagatcatcagcccccccagcccagacaggcctccccacagccagaccagcggcagctgctactaccacgtgatcagcaaggtgccccgcatccgcacccccagctacagccccacccagaggagccctggctgccggcccctgcccagcgctggcagccccacccccaccacccatgaaattgtgacagtgggggaccccctgctgagcagcggcctgcggagcatcggcagcagaagacacagcaccagcagcctgagcccccagaggagcaagctgcgcatcatgagccccatgaggactggaaacacctacagcagaaataatgtgtcctctgtgtccaccaccggcacagccacagacctggagagcagcgccaaggtggtggaccacgtgctgggccccctgaacagcagcaccagcctgggccagaacaccagcaccagcagcaacctgcagaggacagtggtgacagtgggcaacaagaacagccacctggatggcagcagcagcagcgagatgaagcagagcagcgccagtgacctggtgtccaagagcagcagcctgaagggggagaagaccaaggtgctgagcagcaagagcagcgagggcagcgcccacaacgtggcctacccaggcatccccaagctggccccccaggtgcacaacaccaccagccgggagctgaatgtgtccaagattggcagctttgctgagcccagctctgtgtccttcagcagcaaggaggccctgtccttcccccacctgcacctgcggggccagagaaatgaccgggaccagcacacagacagcacccagagcgccaacagcagcccagatgaggacacagaggtgaagaccctgaagctgagcggcatgagcaacagaagcagcatcatcaatgagcacatgggcagcagcagccgggaccggcggcagaagggcaagaagagctgcaaggagaccttcaaggagaagcacagcagcaagagcttcctggagcccggccaggtgaccaccggggaggagggcaacctgaagccagagttcatggatgaggtgctgaccccagagtacatgggccagaggccctgcaacaacgtgtccagtgacaagattggagacaagggcctgtccatgcctggggtgcccaaggccccacccatgcaggtggagggcagcgccaaggagctgcaggcccccaggaagaggacagtgaaggtgaccctgacccccctgaagatggagaatgaaagccagagcaagaatgccctgaaggagagcagccctgccagccccctgcagatcgagagcaccagccccacagagcccatcagcgcctctgaaaatcctggagatggccctgtggcccagcccagccccaacaacaccagctgccaggacagccagagcaacaactaccagaacctgcctgtgcaggacaggaacctgatgctgcctgatggccccaagccccaggaggatggcagcttcaagaggcgctacccccggcgcagcgcccgggcccggagcaacatgttcttcggcctgacccccctgtatggagtgcgctcctatggagaggaggacatccccttctacagcagcagcacaggcaagaagaggggcaagaggtctgctgagggccaggtggatggagcagatgacctgagcaccagtgatgaagatgacctgtactactacaacttcaccaggacagtcatcagcagtggaggagaggagcggctggccagccacaacctcttccgggaggaggagcagtgtgacctgcccaagatcagccagctggatggagtggatgatggaacagaaagtgacacctctgtgacagccaccaccaggaagagcagccagatccccaagagaaatggcaaggaaaatggaacagagaacctgaagattgacagaccagaagatgctggggagaaggagcacgtgaccaagagctctgtgggccacaagaatgagcccaagatggacaactgccacagcgtgtcccgggtgaagacccagggccaggacagcctggaggcccagctgagcagcctggagagcagccggcgggtgcacaccagcacccccagcgacaagaacctgctggacacctacaacacagagctgctgaagagtgacagcgacaacaacaacagtgatgactgtggcaacatcctgcccagcgacatcatggactttgtgctgaagaacacccccagcatgcaggccctgggggagagccctgagagcagcagcagcgagctgctgaacctgggggagggcctgggcctggacagcaaccgggagaaggacatgggcctgtttgaggtgttcagccagcagctgcccaccacagagcctgtggacagctctgtgagcagcagcatctctgctgaggagcagtttgagctgcccctggagctgcccagcgacctgtctgtgctgaccaccaggagccccaccgtgcccagccagaaccccagccggctggccgtcatcagtgacagcggggagaagagggtgaccatcacagagaagtctgtggccagcagcgagagtgaccctgccctgctgagccctggggtggaccccaccccagagggccacatgaccccagaccacttcatccagggccacatggatgctgaccacatcagcagccccccctgtggctctgtggagcagggccacggcaacaaccaggacctgaccaggaacagcagcaccccaggcctgcaggtgcctgtgagccccaccgtgcccatccagaaccagaagtatgtgcccaacagcacagacagccctggccccagccagatcagcaatgctgctgtgcagaccaccccaccccacctgaagccagccacagagaagctgattgtggtgaaccagaacatgcagcccctgtatgtgctgcagaccctgcccaacggggtgacccagaagatccagctgaccagctctgtgagcagcaccccatctgtgatggagaccaacacctctgtgctgggccccatgggcggcggcctgaccctgaccaccggcctgaaccccagcctgcccaccagccagagcctcttccccagcgccagcaagggcctgctgcccatgagccaccaccagcacctgcacagcttccctgctgccacccagagcagcttcccccccaacatcagcaacccccccagcggcctgctgattggagtgcagcccccaccagacccccagctgctggtgtctgagagcagccagaggacagacctgagcaccaccgtggccacccccagcagcggcctgaagaagaggcccatcagccggctgcagaccaggaagaacaagaagctggcccccagcagcacccccagcaacatcgcccccagtgatgtggtgagcaacatgaccctcatcaacttcacccccagccagctgcccaaccaccccagcctgctggacctgggcagcctgaacaccagcagccacaggacagtgcccaacatcatcaagaggagcaagagcagcatcatgtactttgagcccgcccccctgctgccccagagcgtgggcggcacagctgccacagctgctggcaccagcaccatcagccaggacaccagccacctgaccagcggctctgtgtctggcctggccagcagcagctctgtgctgaatgtggtgtccatgcagaccaccaccacccccaccagcagcgcctctgtgcccggccacgtgaccctgaccaacccccggctgctgggcaccccagacatcggcagcatcagcaacctgctgatcaaggccagccagcagagcctgggcatccaggaccagcctgtggccctgccccccagcagcggcatgttcccccagctgggcaccagccagacccccagcacagctgccatcacagctgccagcagcatctgtgtgctgcccagcacccagaccaccggcatcacagctgccagccccagcggggaggctgatgagcactaccagctgcagcacgtgaaccagctgctggccagcaagacaggcatccacagcagccagagggacctggacagcgccagcggcccccaggtgagcaacttcacccagacagtggatgcccccaacagcatgggcctggagcagaacaaggccctgagcagcgctgtgcaggccagccccaccagccctgggggcagccccagcagccccagcagcggccagaggtctgccagccccagcgtgcccggccccaccaagcccaagcccaagaccaagcgcttccagctgcccctggacaagggaaatggcaagaagcacaaggtgagccacctgcggaccagcagcagcgaggcccacatcccagaccaggagaccaccagcctgaccagcggcaccggcaccccaggagctgaggccgagcagcaggacacagcctctgtggagcagagcagccagaaggaatgtggccagcctgctggccaggtggccgtgctgcctgaggtgcaggtgacccagaacccagccaatgagcaggagagcgctgagcccaagacagtggaggaggaggagagcaacttcagcagccccctgatgctgtggctgcagcaggagcagaagaggaaggagagcatcacagagaagaagcccaagaagggcctggtgtttgagatcagcagtgatgatggcttccagatctgtgccgagagcattgaagatgcctggaagagcctgacagacaaggtgcaggaggcccggagcaatgcccggctgaagcagctgagctttgctggggtgaatggcctgaggatgctgggcatcctgcatgatgctgtggtgttcctgattgagcagctgagcggggccaagcactgcaggaactacaagttccgcttccacaagccagaggaggccaatgagccccccctgaacccccacggcagcgcccgggcagaggtgcacctgaggaagagcgcctttgacatgttcaacttcctggccagcaagcaccggcagcccccagagtacaaccccaatgatgaggaggaggaggaggtgcagctgaagagcgcccggcgggccacctccatggacctgcccatgcccatgaggttccgccacctgaagaagaccagcaaggaggccgtgggcgtgtaccgcagccccatccacggccggggcctcttctgcaagagaaatattgatgctggggagatggtgattgaatatgctggaaatgtcatccgcagcatccagacagacaagcgggagaagtactatgacagcaagggcatcggctgctacatgttcagaattgatgacagcgaggtggtggatgccaccatgcacggcaatgctgcccgcttcatcaaccacagctgtgagcccaactgctacagcagggtcatcaacattgatggccagaagcacatcgtcatctttgccatgaggaagatctacagaggagaggagctgacctatgactacaagttccccattgaagatgccagcaacaagctgccctgcaactgtggggccaagaagtgcaggaagttcctgaactag

SEQ ID NO: 160630 - DNA, 8640 bp, synthetic construct
  misc_feature 1..8640: note = Description of Artificial Sequence: Synthetic coding sequence
  source 1..8640: mol_type = other DNA
catgcccacccagaatgtctgaccatggagcgggagaagatcctgagctccatgggaaatgatgacaagagcagcattgctggctctgaagatgctgagcccctggccccacccatcaagcccatcaagcctgtgaccaggaacaaggccccccaggagccccctgtgaagaagggccgccgcagcagaagatgtggccagtgccccggctgccaggtgcctgaggactgtggggtgtgcaccaactgcctggacaagcccaagtttggaggcaggaacatcaagaagcagtgctgcaagatgaggaagtgccagaacctgcagtggatgcccagcaaggcctacctgcagaagcaggccaaggctgtgaagaagaaggagaagaagagcaagaccagcgagaagaaggacagcaaggagagctctgtggtgaagaatgtggtggacagcagccagaagcccaccccatctgcccgggaggaccctgcccccaagaagagcagcagcgagcccccacccaggaagcctgtggaggagaagtctgaggagggcaatgtgtctgcccctggccctgagagcaagcaggccaccaccccagccagcaggaagagcagcaagcaggtgtcccagcctgccctggtgatccccccccagccccccaccaccggcccccccaggaaggaggtgcccaagaccaccccatctgagcccaagaagaagcagcccccacctcctgagagcggccctgagcagagcaagcagaagaaggtggccccccggcccagcatccctgtgaagcagaagcccaaggagaaggagaagcccccacctgtgaacaagcaggagaatgccggcaccctgaacatcctgagcaccctgagcaatggaaacagcagcaagcagaagatcccagcagatggagtgcaccgcatccgggtggacttcaaggaggactgtgaggccgagaatgtgtgggagatgggcggcctgggcatcctgacctctgtgcccatcaccccccgggtggtgtgcttcctgtgtgccagcagcggccacgtggagtttgtgtactgccaggtgtgctgtgagcccttccacaagttctgcctggaggagaatgaaagacccctggaggaccagctggagaactggtgctgccgccgctgcaagttctgccacgtgtgtggccggcagcaccaggccaccaagcagctgctggagtgcaacaagtgcaggaacagctaccaccctgagtgcctgggccccaactaccccaccaagcccaccaagaagaagaaggtgtggatctgcaccaagtgtgtgcgctgcaagagctgtggcagcaccaccccaggcaagggctgggatgcccagtggagccatgacttcagcctgtgccacgactgtgccaagctgtttgccaagggcaacttctgccccctgtgtgacaagtgctatgatgatgatgattatgagagcaagatgatgcagtgtgggaaatgtgaccgctgggtgcacagcaaatgtgagaacctgagtgatgagatgtatgagatcctgagcaacctgcctgagagcgtggcctacacctgtgtgaactgcacagagcggcaccctgctgagtggaggctggccctggagaaggagctgcagatcagcctgaagcaggtgctgacagccctgctgaacagcaggaccaccagccacctgctgcgctaccggcaggccgccaagcccccagacctgaaccctgagacagaggagagcatccccagccgcagcagccctgagggccctgacccccctgtgctgacagaggtgtccaagcaggatgaccagcagcccctggacctggagggcgtgaagaggaagatggaccagggcaactacacctctgtgctggagttcagtgatgacatcgtgaagatcatccaggccgccatcaacagtgatggcggccagcctgagatcaagaaggccaacagcatggtgaagagcttcttcatccggcagatggagagggtcttcccctggttctctgtgaagaagagccgcttctgggagcccaacaaggtgagcagcaacagcggcatgctgcccaatgctgtgctgccccccagcctggaccacaactatgcccagtggcaggagcgggaggagaacagccacacagagcagccccccctgatgaagaagatcatcccagcccccaagcccaagggccctggagagccagacagccccacccccctgcacccccccaccccacccatcctgagcacagacaggagccgggaggacagccctgagctgaaccccccacctggcatcgaggacaaccggcagtgtgccctgtgcctgacctatggagatgattctgccaatgatgctggccgcctgctgtacatcggccagaatgagtggacccacgtgaactgtgccctgtggagcgctgaggtgtttgaagatgatgatggcagcctgaagaatgtgcacatggccgtcatccggggcaagcagctgcgctgtgagttctgccagaagccaggggccaccgtgggctgctgcctgaccagctgcaccagcaactaccacttcatgtgcagccgggccaagaactgtgtgttcctggatgacaagaaggtgtactgccagaggcaccgggacctgatcaagggggaggtggtgcctgaaaatggatttgaggtgttcagaagagtgtttgtggactttgagggcatcagcctgcggaggaagttcctgaatggcctggagcctgagaacatccacatgatgattggctccatgaccatcgactgcctgggcatcctgaatgacctgagtgactgtgaggacaagctgttccccatcggctaccagtgcagccgggtgtactggagcaccacagatgccaggaagagatgtgtgtacacctgcaagatcgtggagtgccggccccctgtggtggagccagacatcaacagcacagtggagcatgatgaaaatagaaccatcgcccacagccccaccagcttcacagagagcagcagcaaggagagccagaacacagctgagatcatcagcccccccagcccagacaggcctccccacagccagaccagcggcagctgctactaccacgtgatcagcaaggtgccccgcatccgcacccccagctacagccccacccagaggagccctggctgccggcccctgcccagcgctggcagccccacccccaccacccatgaaattgtgacagtgggggaccccctgctgagcagcggcctgcggagcatcggcagcagaagacacagcaccagcagcctgagcccccagaggagcaagctgcgcatcatgagccccatgaggactggaaacacctacagcagaaataatgtgtcctctgtgtccaccaccggcacagccacagacctggagagcagcgccaaggtggtggaccacgtgctgggccccctgaacagcagcaccagcctgggccagaacaccagcaccagcagcaacctgcagaggacagtggtgacagtgggcaacaagaacagccacctggatggcagcagcagcagcgagatgaagcagagcagcgccagtgacctggtgtccaagagcagcagcctgaagggggagaagaccaaggtgctgagcagcaagagcagcgagggcagcgcccacaacgtggcctacccaggcatccccaagctggccccccaggtgcacaacaccaccagccgggagctgaatgtgtccaagattggcagctttgctgagcccagctctgtgtccttcagcagcaaggaggccctgtccttcccccacctgcacctgcggggccagagaaatgaccgggaccagcacacagacagcacccagagcgccaacagcagcccagatgaggacacagaggtgaagaccctgaagctgagcggcatgagcaacagaagcagcatcatcaatgagcacatgggcagcagcagccgggaccggcggcagaagggcaagaagagctgcaaggagaccttcaaggagaagcacagcagcaagagcttcctggagcccggccaggtgaccaccggggaggagggcaacctgaagccagagttcatggatgaggtgctgaccccagagtacatgggccagaggccctgcaacaacgtgtccagtgacaagattggagacaagggcctgtccatgcctggggtgcccaaggccccacccatgcaggtggagggcagcgccaaggagctgcaggcccccaggaagaggacagtgaaggtgaccctgacccccctgaagatggagaatgaaagccagagcaagaatgccctgaaggagagcagccctgccagccccctgcagatcgagagcaccagccccacagagcccatcagcgcctctgaaaatcctggagatggccctgtggcccagcccagccccaacaacaccagctgccaggacagccagagcaacaactaccagaacctgcctgtgcaggacaggaacctgatgctgcctgatggccccaagccccaggaggatggcagcttcaagaggcgctacccccggcgcagcgcccgggcccggagcaacatgttcttcggcctgacccccctgtatggagtgcgctcctatggagaggaggacatccccttctacagcagcagcacaggcaagaagaggggcaagaggtctgctgagggccaggtggatggagcagatgacctgagcaccagtgatgaagatgacctgtactactacaacttcaccaggacagtcatcagcagtggaggagaggagcggctggccagccacaacctcttccgggaggaggagcagtgtgacctgcccaagatcagccagctggatggagtggatgatggaacagaaagtgacacctctgtgacagccaccaccaggaagagcagccagatccccaagagaaatggcaaggaaaatggaacagagaacctgaagattgacagaccagaagatgctggggagaaggagcacgtgaccaagagctctgtgggccacaagaatgagcccaagatggacaactgccacagcgtgtcccgggtgaagacccagggccaggacagcctggaggcccagctgagcagcctggagagcagccggcgggtgcacaccagcacccccagcgacaagaacctgctggacacctacaacacagagctgctgaagagtgacagcgacaacaacaacagtgatgactgtggcaacatcctgcccagcgacatcatggactttgtgctgaagaacacccccagcatgcaggccctgggggagagccctgagagcagcagcagcgagctgctgaacctgggggagggcctgggcctggacagcaaccgggagaaggacatgggcctgtttgaggtgttcagccagcagctgcccaccacagagcctgtggacagctctgtgagcagcagcatctctgctgaggagcagtttgagctgcccctggagctgcccagcgacctgtctgtgctgaccaccaggagccccaccgtgcccagccagaaccccagccggctggccgtcatcagtgacagcggggagaagagggtgaccatcacagagaagtctgtggccagcagcgagagtgaccctgccctgctgagccctggggtggaccccaccccagagggccacatgaccccagaccacttcatccagggccacatggatgctgaccacatcagcagccccccctgtggctctgtggagcagggccacggcaacaaccaggacctgaccaggaacagcagcaccccaggcctgcaggtgcctgtgagccccaccgtgcccatccagaaccagaagtatgtgcccaacagcacagacagccctggccccagccagatcagcaatgctgctgtgcagaccaccccaccccacctgaagccagccacagagaagctgattgtggtgaaccagaacatgcagcccctgtatgtgctgcagaccctgcccaacggggtgacccagaagatccagctgaccagctctgtgagcagcaccccatctgtgatggagaccaacacctctgtgctgggccccatgggcggcggcctgaccctgaccaccggcctgaaccccagcctgcccaccagccagagcctcttccccagcgccagcaagggcctgctgcccatgagccaccaccagcacctgcacagcttccctgctgccacccagagcagcttcccccccaacatcagcaacccccccagcggcctgctgattggagtgcagcccccaccagacccccagctgctggtgtctgagagcagccagaggacagacctgagcaccaccgtggccacccccagcagcggcctgaagaagaggcccatcagccggctgcagaccaggaagaacaagaagctggcccccagcagcacccccagcaacatcgcccccagtgatgtggtgagcaacatgaccctcatcaacttcacccccagccagctgcccaaccaccccagcctgctggacctgggcagcctgaacaccagcagccacaggacagtgcccaacatcatcaagaggagcaagagcagcatcatgtactttgagcccgcccccctgctgccccagagcgtgggcggcacagctgccacagctgctggcaccagcaccatcagccaggacaccagccacctgaccagcggctctgtgtctggcctggccagcagcagctctgtgctgaatgtggtgtccatgcagaccaccaccacccccaccagcagcgcctctgtgcccggccacgtgaccctgaccaacccccggctgctgggcaccccagacatcggcagcatcagcaacctgctgatcaaggccagccagcagagcctgggcatccaggaccagcctgtggccctgccccccagcagcggcatgttcccccagctgggcaccagccagacccccagcacagctgccatcacagctgccagcagcatctgtgtgctgcccagcacccagaccaccggcatcacagctgccagccccagcggggaggctgatgagcactaccagctgcagcacgtgaaccagctgctggccagcaagacaggcatccacagcagccagagggacctggacagcgccagcggcccccaggtgagcaacttcacccagacagtggatgcccccaacagcatgggcctggagcagaacaaggccctgagcagcgctgtgcaggccagccccaccagccctgggggcagccccagcagccccagcagcggccagaggtctgccagccccagcgtgcccggccccaccaagcccaagcccaagaccaagcgcttccagctgcccctggacaagggaaatggcaagaagcacaaggtgagccacctgcggaccagcagcagcgaggcccacatcccagaccaggagaccaccagcctgaccagcggcaccggcaccccaggagctgaggccgagcagcaggacacagcctctgtggagcagagcagccagaaggaatgtggccagcctgctggccaggtggccgtgctgcctgaggtgcaggtgacccagaacccagccaatgagcaggagagcgctgagcccaagacagtggaggaggaggagagcaacttcagcagccccctgatgctgtggctgcagcaggagcagaagaggaaggagagcatcacagagaagaagcccaagaagggcctggtgtttgagatcagcagtgatgatggcttccagatctgtgccgagagcattgaagatgcctggaagagcctgacagacaaggtgcaggaggcccggagcaatgcccggctgaagcagctgagctttgctggggtgaatggcctgaggatgctgggcatcctgcatgatgctgtggtgttcctgattgagcagctgagcggggccaagcactgcaggaactacaagttccgcttccacaagccagaggaggccaatgagccccccctgaacccccacggcagcgcccgggcagaggtgcacctgaggaagagcgcctttgacatgttcaacttcctggccagcaagcaccggcagcccccagagtacaaccccaatgatgaggaggaggaggaggtgcagctgaagagcgcccggcgggccacctccatggacctgcccatgcccatgaggttccgccacctgaagaagaccagcaaggaggccgtgggcgtgtaccgcagccccatccacggccggggcctcttctgcaagagaaatattgatgctggggagatggtgattgaatatgctggaaatgtcatccgcagcatccagacagacaagcgggagaagtactatgacagcaagggcatcggctgctacatgttcagaattgatgacagcgaggtggtggatgccaccatgcacggcaatgctgcccgcttcatcaaccacagctgtgagcccaactgctacagcagggtcatcaacattgatggccagaagcacatcgtcatctttgccatgaggaagatctacagaggagaggagctgacctatgactacaagttccccattgaagatgccagcaacaagctgccctgcaactgtggggccaagaagtgcaggaagttcctgaactag

SEQ ID NO: 160631 - DNA, 11910 bp, synthetic construct
  misc_feature 1..11910: note = Description of Artificial Sequence: Synthetic coding sequence
  source 1..11910: mol_type = other DNA
atggcccacagctgccgctggaggtttcctgcccggcccggcaccaccggcggcggcggcggcggcggccggcggggcctgggcggggccccccggcagagggtgcctgccctgctgctgcccccaggcccccctgtgggcggcggcggccctggggccccacccagccccccagctgtggccgctgctgctgctgctgctggcagcagcggggccggcgtgcctggaggagctgctgctgccagcgctgccagcagcagcagcgccagcagcagcagcagcagcagcagcagcgccagcagcggccctgccctgctgcgggtgggccctggctttgatgctgccctgcaggtgtctgctgccatcggcaccaacctgcggcgcttccgggctgtgtttggagagagcggcggcggcggcggcagcggggaggatgagcagttcctgggctttggaagtgatgaggaggtgcgggtgcgcagccccaccaggagccccagcgtgaagaccagccccaggaagccccggggccggcccaggagcggcagtgacagaaattctgccatcctgagtgaccccagcgtcttcagccccctgaacaagtctgagaccaagagcggggacaagatcaagaagaaggacagcaagagcattgagaagaagaggggccggccccccaccttccctggggtgaagatcaagatcacccacggcaaggacatcagcgagctgcccaagggcaacaaggaggacagcctgaagaagatcaagaggaccccatctgccaccttccagcaggccaccaagatcaagaagctgcgggccggcaagctgagccccctgaagagcaagttcaagacaggcaagctgcagatcggcaggaaaggagtgcagatcgtgagaagaagaggccggccccccagcacagagcgcatcaagacccccagcggcctgctgatcaacagcgagctggagaagccccagaaggtgaggaaggacaaggagggcaccccacccctgaccaaggaggacaagacagtggtgcggcagagcccccggcgcatcaagcctgtgcgcatcatccccagcagcaagaggacagatgccaccatcgccaagcagctgctgcagagggccaagaagggggcccagaagaagattgagaaggaggccgcccagctgcagggcaggaaggtgaagacccaggtgaagaacatccggcagttcatcatgcctgtggtgtctgccatcagcagccgcatcatcaagaccccccggcgcttcattgaagatgaggactatgacccccccatcaagatcgcccggctggagagcacccccaacagccgcttcagcgcccccagctgtggcagcagcgagaagagcagcgctgccagccagcacagcagccagatgagcagtgacagcagccgcagcagcagccccagcgtggacaccagcacagacagccaggccagcgaggagatccaggtgctgcctgaggagaggagtgacaccccagaggtgcacccccccctgcccatcagccagagcccagaaaatgaaagcaatgaccggcgcagccgccgctacagcgtgtctgagaggagctttggcagcaggaccaccaagaagctgagcaccctgcagagcgccccccagcagcagaccagcagcagccccccaccacccctgctgaccccacctccacccctgcagcctgccagcagcatcagtgaccacaccccctggctgatgccacccaccatccccctggccagccccttcctgcctgccagcacagcccccatgcagggcaagaggaagagcatcctgcgggagcccaccttccgctggaccagcctgaagcacagccgctctgagccccagtacttcagcagcgccaagtatgccaaggagggcctcatcaggaagcccatctttgacaacttccggcccccacccctgaccccagaagatgtgggctttgccagcggcttcagcgccagcggcacagctgccagcgcccggctcttcagccccctgcacagcggcaccaggtttgacatgcacaagaggagccccctgctgcgggccccccgcttcaccccatctgaggcccacagccgcatctttgagagcgtgaccctgcccagcaacagaacatctgctggcaccagcagcagtggagtgagcaacaggaagaggaagaggaaggtgttcagccccatccgctctgagcccaggagccccagccacagcatgaggaccaggagcggccgcctgagcagcagcgagctgagccccctgaccccacccagctctgtgagcagcagcctgagcatctctgtgagccccctggccaccagcgccctgaaccccaccttcaccttccccagccacagcctgacccagagcggggagagcgctgagaagaaccagaggcccaggaagcagaccagcgccccagctgagcccttcagcagcagcagccccacccccctcttcccctggttcaccccaggcagccagacagagcggggcaggaacaaggacaaggcccctgaggagctgagcaaggacagagatgctgacaagtctgtggagaaggacaagagccgggagcgggaccgggagcgggagaaggagaacaagcgggagagcaggaaggagaagaggaagaagggcagcgagatccagagcagcagcgccctgtaccctgtgggccgggtgtccaaggagaaggtggtgggagaagatgtggccaccagcagcagcgccaagaaggccactggaaggaagaagagcagcagccatgattctggaacagacatcacctctgtgaccctgggggacaccacagctgtgaagaccaagatcctgatcaagaagggccggggcaacctggagaagaccaacctggacctgggccccacagcccccagcctggagaaggagaagaccctgtgcctgagcacccccagcagcagcacagtgaagcacagcaccagcagcatcggctccatgctggcccaggccgacaagctgcccatgacagacaagagggtggccagcctgctgaagaaggccaaggcccagctgtgcaagattgagaagagcaagagcctgaagcagacagaccagcccaaggcccagggccaggagagtgacagcagcgagacctctgtgcggggcccccgcatcaagcacgtgtgcagaagagctgctgtggccctgggcaggaagagagctgtgtttcctgatgacatgcccaccctgagcgccctgccctgggaggagcgggagaagatcctgagctccatgggaaatgatgacaagagcagcattgctggctctgaagatgctgagcccctggccccacccatcaagcccatcaagcctgtgaccaggaacaaggccccccaggagccccctgtgaagaagggccgccgcagcagaagatgtggccagtgccccggctgccaggtgcctgaggactgtggggtgtgcaccaactgcctggacaagcccaagtttggaggcaggaacatcaagaagcagtgctgcaagatgaggaagtgccagaacctgcagtggatgcccagcaaggcctacctgcagaagcaggccaaggctgtgaagaagaaggagaagaagagcaagaccagcgagaagaaggacagcaaggagagctctgtggtgaagaatgtggtggacagcagccagaagcccaccccatctgcccgggaggaccctgcccccaagaagagcagcagcgagcccccacccaggaagcctgtggaggagaagtctgaggagggcaatgtgtctgcccctggccctgagagcaagcaggccaccaccccagccagcaggaagagcagcaagcaggtgtcccagcctgccctggtgatccccccccagccccccaccaccggcccccccaggaaggaggtgcccaagaccaccccatctgagcccaagaagaagcagcccccacctcctgagagcggccctgagcagagcaagcagaagaaggtggccccccggcccagcatccctgtgaagcagaagcccaaggagaaggagaagcccccacctgtgaacaagcaggagaatgccggcaccctgaacatcctgagcaccctgagcaatggaaacagcagcaagcagaagatcccagcagatggagtgcaccgcatccgggtggacttcaaggaggactgtgaggccgagaatgtgtgggagatgggcggcctgggcatcctgacctctgtgcccatcaccccccgggtggtgtgcttcctgtgtgccagcagcggccacgtggagtttgtgtactgccaggtgtgctgtgagcccttccacaagttctgcctggaggagaatgaaagacccctggaggaccagctggagaactggtgctgccgccgctgcaagttctgccacgtgtgtggccggcagcaccaggccaccaagcagctgctggagtgcaacaagtgcaggaacagctaccaccctgagtgcctgggccccaactaccccaccaagcccaccaagaagaagaaggtgtggatctgcaccaagtgtgtgcgctgcaagagctgtggcagcaccaccccaggcaagggctgggatgcccagtggagccatgacttcagcctgtgccacgactgtgccaagctgtttgccaagggcaacttctgccccctgtgtgacaagtgctatgatgatgatgattatgagagcaagatgatgcagtgtgggaaatgtgaccgctgggtgcacagcaaatgtgagaacctgagtgatgagatgtatgagatcctgagcaacctgcctgagagcgtggcctacacctgtgtgaactgcacagagcggcaccctgctgagtggaggctggccctggagaaggagctgcagatcagcctgaagcaggtgctgacagccctgctgaacagcaggaccaccagccacctgctgcgctaccggcaggccgccaagcccccagacctgaaccctgagacagaggagagcatccccagccgcagcagccctgagggccctgacccccctgtgctgacagaggtgtccaagcaggatgaccagcagcccctggacctggagggcgtgaagaggaagatggaccagggcaactacacctctgtgctggagttcagtgatgacatcgtgaagatcatccaggccgccatcaacagtgatggcggccagcctgagatcaagaaggccaacagcatggtgaagagcttcttcatccggcagatggagagggtcttcccctggttctctgtgaagaagagccgcttctgggagcccaacaaggtgagcagcaacagcggcatgctgcccaatgctgtgctgccccccagcctggaccacaactatgcccagtggcaggagcgggaggagaacagccacacagagcagccccccctgatgaagaagatcatcccagcccccaagcccaagggccctggagagccagacagccccacccccctgcacccccccaccccacccatcctgagcacagacaggagccgggaggacagccctgagctgaaccccccacctggcatcgaggacaaccggcagtgtgccctgtgcctgacctatggagatgattctgccaatgatgctggccgcctgctgtacatcggccagaatgagtggacccacgtgaactgtgccctgtggagcgctgaggtgtttgaagatgatgatggcagcctgaagaatgtgcacatggccgtcatccggggcaagcagctgcgctgtgagttctgccagaagccaggggccaccgtgggctgctgcctgaccagctgcaccagcaactaccacttcatgtgcagccgggccaagaactgtgtgttcctggatgacaagaaggtgtactgccagaggcaccgggacctgatcaagggggaggtggtgcctgaaaatggatttgaggtgttcagaagagtgtttgtggactttgagggcatcagcctgcggaggaagttcctgaatggcctggagcctgagaacatccacatgatgattggctccatgaccatcgactgcctgggcatcctgaatgacctgagtgactgtgaggacaagctgttccccatcggctaccagtgcagccgggtgtactggagcaccacagatgccaggaagagatgtgtgtacacctgcaagatcgtggagtgccggccccctgtggtggagccagacatcaacagcacagtggagcatgatgaaaatagaaccatcgcccacagccccaccagcttcacagagagcagcagcaaggagagccagaacacagctgagatcatcagcccccccagcccagacaggcctccccacagccagaccagcggcagctgctactaccacgtgatcagcaaggtgccccgcatccgcacccccagctacagccccacccagaggagccctggctgccggcccctgcccagcgctggcagccccacccccaccacccatgaaattgtgacagtgggggaccccctgctgagcagcggcctgcggagcatcggcagcagaagacacagcaccagcagcctgagcccccagaggagcaagctgcgcatcatgagccccatgaggactggaaacacctacagcagaaataatgtgtcctctgtgtccaccaccggcacagccacagacctggagagcagcgccaaggtggtggaccacgtgctgggccccctgaacagcagcaccagcctgggccagaacaccagcaccagcagcaacctgcagaggacagtggtgacagtgggcaacaagaacagccacctggatggcagcagcagcagcgagatgaagcagagcagcgccagtgacctggtgtccaagagcagcagcctgaagggggagaagaccaaggtgctgagcagcaagagcagcgagggcagcgcccacaacgtggcctacccaggcatccccaagctggccccccaggtgcacaacaccaccagccgggagctgaatgtgtccaagattggcagctttgctgagcccagctctgtgtccttcagcagcaaggaggccctgtccttcccccacctgcacctgcggggccagagaaatgaccgggaccagcacacagacagcacccagagcgccaacagcagcccagatgaggacacagaggtgaagaccctgaagctgagcggcatgagcaacagaagcagcatcatcaatgagcacatgggcagcagcagccgggaccggcggcagaagggcaagaagagctgcaaggagaccttcaaggagaagcacagcagcaagagcttcctggagcccggccaggtgaccaccggggaggagggcaacctgaagccagagttcatggatgaggtgctgaccccagagtacatgggccagaggccctgcaacaacgtgtccagtgacaagattggagacaagggcctgtccatgcctggggtgcccaaggccccacccatgcaggtggagggcagcgccaaggagctgcaggcccccaggaagaggacagtgaaggtgaccctgacccccctgaagatggagaatgaaagccagagcaagaatgccctgaaggagagcagccctgccagccccctgcagatcgagagcaccagccccacagagcccatcagcgcctctgaaaatcctggagatggccctgtggcccagcccagccccaacaacaccagctgccaggacagccagagcaacaactaccagaacctgcctgtgcaggacaggaacctgatgctgcctgatggccccaagccccaggaggatggcagcttcaagaggcgctacccccggcgcagcgcccgggcccggagcaacatgttcttcggcctgacccccctgtatggagtgcgctcctatggagaggaggacatccccttctacagcagcagcacaggcaagaagaggggcaagaggtctgctgagggccaggtggatggagcagatgacctgagcaccagtgatgaagatgacctgtactactacaacttcaccaggacagtcatcagcagtggaggagaggagcggctggccagccacaacctcttccgggaggaggagcagtgtgacctgcccaagatcagccagctggatggagtggatgatggaacagaaagtgacacctctgtgacagccaccaccaggaagagcagccagatccccaagagaaatggcaaggaaaatggaacagagaacctgaagattgacagaccagaagatgctggggagaaggagcacgtgaccaagagctctgtgggccacaagaatgagcccaagatggacaactgccacagcgtgtcccgggtgaagacccagggccaggacagcctggaggcccagctgagcagcctggagagcagccggcgggtgcacaccagcacccccagcgacaagaacctgctggacacctacaacacagagctgctgaagagtgacagcgacaacaacaacagtgatgactgtggcaacatcctgcccagcgacatcatggactttgtgctgaagaacacccccagcatgcaggccctgggggagagccctgagagcagcagcagcgagctgctgaacctgggggagggcctgggcctggacagcaaccgggagaaggacatgggcctgtttgaggtgttcagccagcagctgcccaccacagagcctgtggacagctctgtgagcagcagcatctctgctgaggagcagtttgagctgcccctggagctgcccagcgacctgtctgtgctgaccaccaggagccccaccgtgcccagccagaaccccagccggctggccgtcatcagtgacagcggggagaagagggtgaccatcacagagaagtctgtggccagcagcgagagtgaccctgccctgctgagccctggggtggaccccaccccagagggccacatgaccccagaccacttcatccagggccacatggatgctgaccacatcagcagccccccctgtggctctgtggagcagggccacggcaacaaccaggacctgaccaggaacagcagcaccccaggcctgcaggtgcctgtgagccccaccgtgcccatccagaaccagaagtatgtgcccaacagcacagacagccctggccccagccagatcagcaatgctgctgtgcagaccaccccaccccacctgaagccagccacagagaagctgattgtggtgaaccagaacatgcagcccctgtatgtgctgcagaccctgcccaacggggtgacccagaagatccagctgaccagctctgtgagcagcaccccatctgtgatggagaccaacacctctgtgctgggccccatgggcggcggcctgaccctgaccaccggcctgaaccccagcctgcccaccagccagagcctcttccccagcgccagcaagggcctgctgcccatgagccaccaccagcacctgcacagcttccctgctgccacccagagcagcttcccccccaacatcagcaacccccccagcggcctgctgattggagtgcagcccccaccagacccccagctgctggtgtctgagagcagccagaggacagacctgagcaccaccgtggccacccccagcagcggcctgaagaagaggcccatcagccggctgcagaccaggaagaacaagaagctggcccccagcagcacccccagcaacatcgcccccagtgatgtggtgagcaacatgaccctcatcaacttcacccccagccagctgcccaaccaccccagcctgctggacctgggcagcctgaacaccagcagccacaggacagtgcccaacatcatcaagaggagcaagagcagcatcatgtactttgagcccgcccccctgctgccccagagcgtgggcggcacagctgccacagctgctggcaccagcaccatcagccaggacaccagccacctgaccagcggctctgtgtctggcctggccagcagcagctctgtgctgaatgtggtgtccatgcagaccaccaccacccccaccagcagcgcctctgtgcccggccacgtgaccctgaccaacccccggctgctgggcaccccagacatcggcagcatcagcaacctgctgatcaaggccagccagcagagcctgggcatccaggaccagcctgtggccctgccccccagcagcggcatgttcccccagctgggcaccagccagacccccagcacagctgccatcacagctgccagcagcatctgtgtgctgcccagcacccagaccaccggcatcacagctgccagccccagcggggaggctgatgagcactaccagctgcagcacgtgaaccagctgctggccagcaagacaggcatccacagcagccagagggacctggacagcgccagcggcccccaggtgagcaacttcacccagacagtggatgcccccaacagcatgggcctggagcagaacaaggccctgagcagcgctgtgcaggccagccccaccagccctgggggcagccccagcagccccagcagcggccagaggtctgccagccccagcgtgcccggccccaccaagcccaagcccaagaccaagcgcttccagctgcccctggacaagggaaatggcaagaagcacaaggtgagccacctgcggaccagcagcagcgaggcccacatcccagaccaggagaccaccagcctgaccagcggcaccggcaccccaggagctgaggccgagcagcaggacacagcctctgtggagcagagcagccagaaggaatgtggccagcctgctggccaggtggccgtgctgcctgaggtgcaggtgacccagaacccagccaatgagcaggagagcgctgagcccaagacagtggaggaggaggagagcaacttcagcagccccctgatgctgtggctgcagcaggagcagaagaggaaggagagcatcacagagaagaagcccaagaagggcctggtgtttgagatcagcagtgatgatggcttccagatctgtgccgagagcattgaagatgcctggaagagcctgacagacaaggtgcaggaggcccggagcaatgcccggctgaagcagctgagctttgctggggtgaatggcctgaggatgctgggcatcctgcatgatgctgtggtgttcctgattgagcagctgagcggggccaagcactgcaggaactacaagttccgcttccacaagccagaggaggccaatgagccccccctgaacccccacggcagcgcccgggcagaggtgcacctgaggaagagcgcctttgacatgttcaacttcctggccagcaagcaccggcagcccccagagtacaaccccaatgatgaggaggaggaggaggtgcagctgaagagcgcccggcgggccacctccatggacctgcccatgcccatgaggttccgccacctgaagaagaccagcaaggaggccgtgggcgtgtaccgcagccccatccacggccggggcctcttctgcaagagaaatattgatgctggggagatggtgattgaatatgctggaaatgtcatccgcagcatccagacagacaagcgggagaagtactatgacagcaagggcatcggctgctacatgttcagaattgatgacagcgaggtggtggatgccaccatgcacggcaatgctgcccgcttcatcaaccacagctgtgagcccaactgctacagcagggtcatcaacattgatggccagaagcacatcgtcatctttgccatgaggaagatctacagaggagaggagctgacctatgactacaagttccccattgaagatgccagcaacaagctgccctgcaactgtggggccaagaagtgcaggaagttcctgaactag

SEQ ID NO: 160632 - DNA, 336 bp, synthetic construct
  misc_feature 1..336: note = Description of Artificial Sequence: Synthetic coding sequence
  source 1..336: mol_type = other DNA
gacttcaaggatgagcagttcctgggcttcggcagtgatgaggaggtgcgggtgcgcagccccaccaggagccccagcggctccatgctggcccaggccgacaagctgcccatgacagacaagagggtggccagcctgctgaagaaggccaaggcccagctgtgcaagattgagaagagcaagagcctgaagcagacagaccagcccaaggcccagggccaggagagtgacagcagcgagacctctgtgcggggcccccgcatcaagcacgtgtgcagaagagctgctgtggccctgggcaggaagagagctgtgtttcctgatgacatgccctag

SEQ ID NO: 160633 - DNA, 4320 bp, synthetic construct
  misc_feature 1..4320: note = Description of Artificial Sequence: Synthetic coding sequence
  source 1..4320: mol_type = other DNA
atggcccacagctgccgctggaggtttcctgcccggcccggcaccaccggcggcggcggcggcggcggccggcggggcctgggcggggccccccggcagagggtgcctgccctgctgctgcccccaggcccccctgtgggcggcggcggccctggggccccacccagccccccagctgtggccgctgctgctgctgctgctggcagcagcggggccggcgtgcctggaggagctgctgctgccagcgctgccagcagcagcagcgccagcagcagcagcagcagcagcagcagcgccagcagcggccctgccctgctgcgggtgggccctggctttgatgctgccctgcaggtgtctgctgccatcggcaccaacctgcggcgcttccgggctgtgtttggagagagcggcggcggcggcggcagcggggagctgaccacccagatcccctgctcctggaggaccaagggccacatccatgacaagaagacagagcccttccggctgctggcctggagctggtgcctgaatgatgagcagttcctgggcttcggcagtgatgaggaggtgcgggtgcgcagccccaccaggagccccagcgtgaagaccagccccaggaagccccggggccggcccaggagcggcagtgacaggaacagcgccatcctgagtgaccccagcgtcttcagccccctgaacaagtctgagaccaagagcggggacaagatcaagaagaaggacagcaagagcattgagaagaagaggggccggccccccaccttccctggggtgaagatcaagatcacccacggcaaggacatcagcgagctgcccaagggcaacaaggaggacagcctgaagaagatcaagaggacccccagcgccaccttccagcaggccaccaagatcaagaagctgcgggccggcaagctgagccccctgaagagcaagttcaagacaggcaagctgcagattggaaggaagggcgtgcagatcgtgagaagaagaggccggccccccagcacagagcgcatcaagaccccatctggcctgctgatcaacagcgagctggagaagccccagaaggtgaggaaggacaaggagggcaccccacccctgaccaaggaggacaagacagtggtgcggcagagcccccggcgcatcaagcctgtgcgcatcatccccagcagcaagaggacagatgccaccatcgccaagcagctgctgcagagggccaagaagggggcccagaagaagattgagaaggaggccgcccagctgcagggcaggaaggtgaagacccaggtgaagaacatccggcagttcatcatgcctgtggtgtctgccatcagcagccgcatcatcaagaccccccggcgcttcattgaagatgaagattatgacccccccatcaagatcgcccggctggagagcacccccaacagccgcttcagcgcccccagctgtggcagcagcgagaagagcagcgctgccagccagcacagcagccagatgagcagtgacagcagccgcagcagcagccccagcgtggacaccagcacagacagccaggccagcgaggagatccaggtgctgcctgaggagaggagtgacaccccagaggtgcacccccccctgcccatcagccagagcccagaaaatgaaagcaatgacagaagaagccgccgctacagcgtgtctgagaggagctttggcagcaggaccaccaagaagctgagcaccctgcagagcgccccccagcagcagaccagcagcagccccccaccacccctgctgaccccacctccacccctgcagcctgccagcagcatcagtgaccacaccccctggctgatgccacccaccatccccctggccagccccttcctgcctgccagcacagcccccatgcagggcaagaggaagagcatcctgcgggagcccaccttccgctggaccagcctgaagcacagccgctctgagccccagtacttcagcagcgccaagtatgccaaggagggcctcatcaggaagcccatctttgacaacttccggcccccacccctgaccccagaagatgtgggctttgccagcggcttcagcgccagcggcacagctgccagcgcccggctcttcagccccctgcacagcggcaccaggtttgacatgcacaagaggagccccctgctgcgggccccccgcttcacccccagcgaggcccacagccgcatctttgaatctgtgaccctgcccagcaacagaaccagcgctggcaccagcagcagcggcgtgagcaacaggaagaggaagaggaaggtgttcagccccatccgctctgagcccaggagccccagccacagcatgaggaccaggagcggccgcctgagcagcagcgagctgagccccctgaccccacccagctctgtgagcagcagcctgagcatctctgtgagccccctggccaccagcgccctgaaccccaccttcaccttccccagccacagcctgacccagagcggggagagcgctgagaagaaccagaggcccaggaagcagaccagcgccccagctgagcccttcagcagcagcagccccacccccctcttcccctggttcaccccaggcagccagacagagcggggcaggaacaaggacaaggcccctgaggagctgagcaaggacagagatgctgacaagtctgtggagaaggacaagagccgggagcgggaccgggagcgggagaaggagaacaagcgggagagcaggaaggagaagaggaagaagggcagcgagatccagagcagcagcgccctgtaccctgtgggccgggtgtccaaggagaaggtggtgggggaggatgtggccaccagcagcagcgccaagaaggccaccggcaggaagaagagcagcagccatgacagcggcacagacatcacctctgtgaccctgggggacaccacagctgtgaagaccaagatcctgatcaagaagggccggggcaacctggagaagaccaacctggacctgggccccacagcccccagcctggagaaggagaagaccctgtgcctgagcacccccagcagcagcacagtgaagcacagcaccagcagcatcggctccatgctggcccaggccgacaagctgcccatgacagacaagagggtggccagcctgctgaagaaggccaaggcccagctgtgcaagattgagaagagcaagagcctgaagcagacagaccagcccaaggcccagggccaggagagtgacagcagcgagacctctgtgcggggcccccgcatcaagcacgtgtgccggcgggctgctgtggccctgggcaggaagagagctgtgtttcctgatgacatgcccaccctgagcgccctgccctgggaggagcgggagaagatcctgagctccatgggaaatgatgacaagagcagcattgctggctctgaagatgctgagcccctggccccacccatcaagcccatcaagcctgtgaccaggaacaaggccccccaggagccccctgtgaagaagggcagaagaagccgccgctgtggccagtgccccggctgccaggtgcctgaggactgtggggtgtgcaccaactgcctggacaagcccaagtttggaggaagaaacatcaagaagcagtgctgcaagatgaggaagtgccagaacctgcagtggatgcccagcaaggcctacctgcagaagcaggccaaggctgtgaagaagaaggagaagaagagcaagaccagcgagaagaaggacagcaaggagagctctgtggtgaagaatgtggtggacagcagccagaagcccacccccagcgccagagaagatcctgcccccaagaagagcagcagcgagcccccacccaggaagcctgtggaggagaagtctgaggagggcaatgtgtctgcccctggccctgagagcaagcaggccaccaccccagccagcaggaagagcagcaagcaggtgtcccagcctgccctggtgattcctccccagccccccaccactggaccacccaggaaggaggtgcccaagaccacccccagcgagcccaagaagaagcagcccccacctcctgagagcggccctgagcagagcaagcagaagaaggtggccccccggcccagcatccctgtgaagcagaagcccaaggagaaggagaagcccccacctgtgaacaagcaggagaatgccggcaccctgaacatcctgagcaccctgagcaatggaaacagcagcaagcagaagatcccagcagatggagtgcaccgcatccgggtggacttcaagtag

SEQ ID NO: 160634 - DNA, 11919 bp, synthetic construct
  misc_feature 1..11919: note = Description of Artificial Sequence: Synthetic coding sequence
  source 1..11919: mol_type = other DNA
atggcccacagctgccgctggaggtttcctgcccggcccggcaccaccggcggcggcggcggcggcggccggcggggcctgggcggggccccccggcagagggtgcctgccctgctgctgcccccaggcccccctgtgggcggcggcggccctggggccccacccagccccccagctgtggccgctgctgctgctgctgctggcagcagcggggccggcgtgcctggaggagctgctgctgccagcgctgccagcagcagcagcgccagcagcagcagcagcagcagcagcagcgccagcagcggccctgccctgctgcgggtgggccctggctttgatgctgccctgcaggtgtctgctgccatcggcaccaacctgcggcgcttccgggctgtgtttggagagagcggcggcggcggcggcagcggggaggatgagcagttcctgggctttggaagtgatgaggaggtgcgggtgcgcagccccaccaggagccccagcgtgaagaccagccccaggaagccccggggccggcccaggagcggcagtgacagaaattctgccatcctgagtgaccccagcgtcttcagccccctgaacaagtctgagaccaagagcggggacaagatcaagaagaaggacagcaagagcattgagaagaagaggggccggccccccaccttccctggggtgaagatcaagatcacccacggcaaggacatcagcgagctgcccaagggcaacaaggaggacagcctgaagaagatcaagaggaccccatctgccaccttccagcaggccaccaagatcaagaagctgcgggccggcaagctgagccccctgaagagcaagttcaagacaggcaagctgcagatcggcaggaaaggagtgcagatcgtgagaagaagaggccggccccccagcacagagcgcatcaagacccccagcggcctgctgatcaacagcgagctggagaagccccagaaggtgaggaaggacaaggagggcaccccacccctgaccaaggaggacaagacagtggtgcggcagagcccccggcgcatcaagcctgtgcgcatcatccccagcagcaagaggacagatgccaccatcgccaagcagctgctgcagagggccaagaagggggcccagaagaagattgagaaggaggccgcccagctgcagggcaggaaggtgaagacccaggtgaagaacatccggcagttcatcatgcctgtggtgtctgccatcagcagccgcatcatcaagaccccccggcgcttcattgaagatgaggactatgacccccccatcaagatcgcccggctggagagcacccccaacagccgcttcagcgcccccagctgtggcagcagcgagaagagcagcgctgccagccagcacagcagccagatgagcagtgacagcagccgcagcagcagccccagcgtggacaccagcacagacagccaggccagcgaggagatccaggtgctgcctgaggagaggagtgacaccccagaggtgcacccccccctgcccatcagccagagcccagaaaatgaaagcaatgaccggcgcagccgccgctacagcgtgtctgagaggagctttggcagcaggaccaccaagaagctgagcaccctgcagagcgccccccagcagcagaccagcagcagccccccaccacccctgctgaccccacctccacccctgcagcctgccagcagcatcagtgaccacaccccctggctgatgccacccaccatccccctggccagccccttcctgcctgccagcacagcccccatgcagggcaagaggaagagcatcctgcgggagcccaccttccgctggaccagcctgaagcacagccgctctgagccccagtacttcagcagcgccaagtatgccaaggagggcctcatcaggaagcccatctttgacaacttccggcccccacccctgaccccagaagatgtgggctttgccagcggcttcagcgccagcggcacagctgccagcgcccggctcttcagccccctgcacagcggcaccaggtttgacatgcacaagaggagccccctgctgcgggccccccgcttcaccccatctgaggcccacagccgcatctttgagagcgtgaccctgcccagcaacagaacatctgctggcaccagcagcagtggagtgagcaacaggaagaggaagaggaaggtgttcagccccatccgctctgagcccaggagccccagccacagcatgaggaccaggagcggccgcctgagcagcagcgagctgagccccctgaccccacccagctctgtgagcagcagcctgagcatctctgtgagccccctggccaccagcgccctgaaccccaccttcaccttccccagccacagcctgacccagagcggggagagcgctgagaagaaccagaggcccaggaagcagaccagcgccccagctgagcccttcagcagcagcagccccacccccctcttcccctggttcaccccaggcagccagacagagcggggcaggaacaaggacaaggcccctgaggagctgagcaaggacagagatgctgacaagtctgtggagaaggacaagagccgggagcgggaccgggagcgggagaaggagaacaagcgggagagcaggaaggagaagaggaagaagggcagcgagatccagagcagcagcgccctgtaccctgtgggccgggtgtccaaggagaaggtggtgggagaagatgtggccaccagcagcagcgccaagaaggccactggaaggaagaagagcagcagccatgattctggaacagacatcacctctgtgaccctgggggacaccacagctgtgaagaccaagatcctgatcaagaagggccggggcaacctggagaagaccaacctggacctgggccccacagcccccagcctggagaaggagaagaccctgtgcctgagcacccccagcagcagcacagtgaagcacagcaccagcagcatcggctccatgctggcccaggccgacaagctgcccatgacagacaagagggtggccagcctgctgaagaaggccaaggcccagctgtgcaagattgagaagagcaagagcctgaagcagacagaccagcccaaggcccagggccaggagagtgacagcagcgagacctctgtgcggggcccccgcatcaagcacgtgtgcagaagagctgctgtggccctgggcaggaagagagctgtgtttcctgatgacatgcccaccctgagcgccctgccctgggaggagcgggagaagatcctgagctccatgggaaatgatgacaagagcagcattgctggctctgaagatgctgagcccctggccccacccatcaagcccatcaagcctgtgaccaggaacaaggccccccaggagccccctgtgaagaagggccgccgcagcagaagatgtggccagtgccccggctgccaggtgcctgaggactgtggggtgtgcaccaactgcctggacaagcccaagtttggaggcaggaacatcaagaagcagtgctgcaagatgaggaagtgccagaacctgcagtggatgcccagcaaggcctacctgcagaagcaggccaaggctgtgaagaagaaggagaagaagagcaagaccagcgagaagaaggacagcaaggagagctctgtggtgaagaatgtggtggacagcagccagaagcccaccccatctgcccgggaggaccctgcccccaagaagagcagcagcgagcccccacccaggaagcctgtggaggagaagtctgaggagggcaatgtgtctgcccctggccctgagagcaagcaggccaccaccccagccagcaggaagagcagcaagcaggtgtcccagcctgccctggtgatccccccccagccccccaccaccggcccccccaggaaggaggtgcccaagaccaccccatctgagcccaagaagaagcagcccccacctcctgagagcggccctgagcagagcaagcagaagaaggtggccccccggcccagcatccctgtgaagcagaagcccaaggagaaggagaagcccccacctgtgaacaagcaggagaatgccggcaccctgaacatcctgagcaccctgagcaatggaaacagcagcaagcagaagatcccagcagatggagtgcaccgcatccgggtggacttcaaggaggactgtgaggccgagaatgtgtgggagatgggcggcctgggcatcctgacctctgtgcccatcaccccccgggtggtgtgcttcctgtgtgccagcagcggccacgtggagtttgtgtactgccaggtgtgctgtgagcccttccacaagttctgcctggaggagaatgaaagacccctggaggaccagctggagaactggtgctgccgccgctgcaagttctgccacgtgtgtggccggcagcaccaggccaccaagcagctgctggagtgcaacaagtgcaggaacagctaccaccctgagtgcctgggccccaactaccccaccaagcccaccaagaagaagaaggtgtggatctgcaccaagtgtgtgcgctgcaagagctgtggcagcaccaccccaggcaagggctgggatgcccagtggagccatgacttcagcctgtgccacgactgtgccaagctgtttgccaagggcaacttctgccccctgtgtgacaagtgctatgatgatgatgattatgagagcaagatgatgcagtgtgggaaatgtgaccgctgggtgcacagcaaatgtgagaacctgtctggaacagaagatgagatgtatgagatcctgagcaacctgcctgagagcgtggcctacacctgtgtgaactgcacagagcggcaccctgctgagtggaggctggccctggagaaggagctgcagatcagcctgaagcaggtgctgacagccctgctgaacagcaggaccaccagccacctgctgcgctaccggcaggccgccaagcccccagacctgaaccctgagacagaggagagcatccccagccgcagcagccctgagggccctgacccccctgtgctgacagaggtgtccaagcaggatgaccagcagcccctggacctggagggcgtgaagaggaagatggaccagggcaactacacctctgtgctggagttcagtgatgacatcgtgaagatcatccaggccgccatcaacagtgatggcggccagcctgagatcaagaaggccaacagcatggtgaagagcttcttcatccggcagatggagagggtcttcccctggttctctgtgaagaagagccgcttctgggagcccaacaaggtgagcagcaacagcggcatgctgcccaatgctgtgctgccccccagcctggaccacaactatgcccagtggcaggagcgggaggagaacagccacacagagcagccccccctgatgaagaagatcatcccagcccccaagcccaagggccctggagagccagacagccccacccccctgcacccccccaccccacccatcctgagcacagacaggagccgggaggacagccctgagctgaaccccccacctggcatcgaggacaaccggcagtgtgccctgtgcctgacctatggagatgacagcgccaatgatgctggccgcctgctgtacatcggccagaatgagtggacccacgtgaactgtgccctgtggagcgctgaggtgtttgaagatgatgatggcagcctgaagaatgtgcacatggctgtgatccggggcaagcagctgcgctgtgagttctgccagaagccaggggccaccgtgggctgctgcctgaccagctgcaccagcaactaccacttcatgtgcagccgggccaagaactgtgtgttcctggatgacaagaaggtgtactgccagaggcaccgggacctgatcaagggggaggtggtgcctgaaaatggatttgaggtgttccggcgggtgtttgtggactttgagggcatcagcctgcggaggaagttcctgaatggcctggagcctgagaacatccacatgatgattggctccatgaccatcgactgcctgggcatcctgaatgacctgagtgactgtgaggacaagctgttccccatcggctaccagtgcagccgggtgtactggagcaccacagatgccaggaagagatgtgtgtacacctgcaagatcgtggagtgcaggcctcctgtggtggagccagacatcaacagcacagtggagcatgatgagaacagaaccatcgcccacagccccaccagcttcacagagagcagcagcaaggagagccagaacacagctgagatcatcagcccccccagcccagaccggcccccccacagccagaccagcggcagctgctactaccacgtgatcagcaaggtgccccgcatccgcacccccagctacagccccacccagaggagccctggctgccggcccctgcccagcgctggcagccccacccccaccacccatgagatcgtgacagtgggggaccccctgctgagcagcggcctgcggagcatcggcagccgccgccacagcaccagcagcctgagcccccagaggagcaagctgcgcatcatgagccccatgaggacaggcaacacctacagcaggaacaacgtgtcctctgtgtccaccactggaacagccacagacctggagagcagcgccaaggtggtggaccacgtgctgggccccctgaacagcagcaccagcctgggccagaacaccagcaccagcagcaacctgcagaggacagtggtgacagtgggcaacaagaacagccacctggatggcagcagcagcagcgagatgaagcagagcagcgccagtgacctggtgtccaagagcagcagcctgaagggggagaagaccaaggtgctgagcagcaagagcagcgagggcagcgcccacaacgtggcctacccaggcatccccaagctggccccccaggtgcacaacaccaccagccgggagctgaatgtgtccaagattggcagctttgctgagcccagctctgtgtccttcagcagcaaggaggccctgtccttcccccacctgcacctgcggggccagagaaatgaccgggaccagcacacagacagcacccagagcgccaacagcagcccagatgaggacacagaggtgaagaccctgaagctgagcggcatgagcaacagaagcagcatcatcaatgagcacatgggcagcagcagccgggaccggcggcagaagggcaagaagagctgcaaggagaccttcaaggagaagcacagcagcaagagcttcctggagcccggccaggtgaccactggagaggagggcaacctgaagccagagttcatggatgaggtgctgaccccagagtacatgggccagaggccctgcaacaacgtgtccagtgacaagatcggggacaagggcctgtccatgcctggggtgcccaaggccccacccatgcaggtggagggcagcgccaaggagctgcaggcccccaggaagaggacagtgaaggtgaccctgacccccctgaagatggagaatgaaagccagagcaagaatgccctgaaggagagcagccctgccagccccctgcagatcgagagcaccagccccacagagcccatcagcgccagcgagaaccctggagatggccctgtggcccagcccagccccaacaacaccagctgccaggacagccagagcaacaactaccagaacctgcctgtgcaggacaggaacctgatgctgcctgatggccccaagccccaggaggatggcagcttcaagaggcgctaccccaggagaagtgcccgggcccggagcaacatgttcttcggcctgacccccctgtatggagtgcgctcctatggagaggaggacatccccttctacagcagcagcacaggcaagaagaggggcaagaggtctgctgagggccaggtggatggagcagatgacctgagcaccagtgatgaagatgacctgtactactacaacttcaccaggacagtcatcagcagcggcggggaggagcggctggccagccacaacctcttccgggaggaggagcagtgtgacctgcccaagatcagccagctggatggagtggatgatggaacagaaagtgacacctctgtgacagccaccaccaggaagagcagccagatccccaagagaaatggcaaggaaaatggaacagagaacctgaagattgacagaccagaagatgctggggagaaggagcacgtgaccaagagctctgtgggccacaagaatgagcccaagatggacaactgccacagcgtgtcccgggtgaagacccagggccaggacagcctggaggcccagctgagcagcctggagagcagcagaagagtgcacaccagcacccccagcgacaagaacctgctggacacctacaacacagagctgctgaagagtgacagcgacaacaacaacagtgatgactgtggcaacatcctgcccagcgacatcatggactttgtgctgaagaacacccccagcatgcaggccctgggggagagccctgagagcagcagcagcgagctgctgaacctgggggagggcctgggcctggacagcaaccgggagaaggacatgggcctgtttgaggtgttcagccagcagctgcccaccacagagcctgtggacagctctgtgagcagcagcatctctgctgaggagcagtttgagctgcccctggagctgcccagcgacctgtctgtgctgaccaccaggagccccaccgtgcccagccagaaccccagccggctggccgtcatcagtgacagcggggagaagagggtgaccatcacagagaagtctgtggccagcagcgagagtgaccctgccctgctgagccctggggtggaccccaccccagagggccacatgaccccagaccacttcatccagggccacatggatgctgaccacatcagcagccccccctgtggctctgtggagcagggccacggcaacaaccaggacctgaccaggaacagcagcaccccaggcctgcaggtgcctgtgagccccaccgtgcccatccagaaccagaagtatgtgcccaacagcacagacagccctggccccagccagatcagcaatgctgctgtgcagaccaccccaccccacctgaagccagccacagagaagctgattgtggtgaaccagaacatgcagcccctgtatgtgctgcagaccctgcccaatggagtgacccagaagatccagctgaccagctctgtgagcagcacccccagcgtgatggagaccaacacctctgtgctgggccccatgggcggcggcctgaccctgaccaccggcctgaaccccagcctgcccaccagccagagcctcttccccagcgccagcaagggcctgctgcccatgagccaccaccagcacctgcacagcttccctgctgccacccagagcagcttcccccccaacatcagcaaccccccatctggcctgctgattggagtgcagcccccaccagacccccagctgctggtgtctgagagcagccagaggacagacctgagcaccaccgtggccacccccagcagcggcctgaagaagaggcccatcagccggctgcagaccaggaagaacaagaagctggcccccagcagcacccccagcaacatcgcccccagtgatgtggtgagcaacatgaccctcatcaacttcacccccagccagctgcccaaccaccccagcctgctggacctgggcagcctgaacaccagcagccacaggacagtgcccaacatcatcaagaggagcaagagcagcatcatgtactttgagcccgcccccctgctgccccagagcgtgggcggcacagctgccacagctgctggcaccagcaccatcagccaggacaccagccacctgaccagcggctctgtgtctggcctggccagcagcagctctgtgctgaatgtggtgtccatgcagaccaccaccacccccaccagcagcgcctctgtgcccggccacgtgaccctgaccaacccccggctgctgggcaccccagacatcggcagcatcagcaacctgctgatcaaggccagccagcagagcctgggcatccaggaccagcctgtggccctgccccccagcagcggcatgttcccccagctgggcaccagccagacccccagcacagctgccatcacagctgccagcagcatctgtgtgctgcccagcacccagaccaccggcatcacagctgccagccccagcggggaggctgatgagcactaccagctgcagcacgtgaaccagctgctggccagcaagacaggcatccacagcagccagagggacctggacagcgccagcggcccccaggtgagcaacttcacccagacagtggatgcccccaacagcatgggcctggagcagaacaaggccctgagcagcgctgtgcaggccagccccaccagccctgggggcagccccagcagccccagcagcggccagaggtctgccagccccagcgtgcccggccccaccaagcccaagcccaagaccaagcgcttccagctgcccctggacaagggaaatggcaagaagcacaaggtgagccacctgcggaccagcagcagcgaggcccacatcccagaccaggagaccaccagcctgaccagcggcaccggcaccccaggagctgaggccgagcagcaggacacagcctctgtggagcagagcagccagaaggaatgtggccagcctgctggccaggtggccgtgctgcctgaggtgcaggtgacccagaacccagccaatgagcaggagagcgctgagcccaagacagtggaggaggaggagagcaacttcagcagccccctgatgctgtggctgcagcaggagcagaagaggaaggagagcatcacagagaagaagcccaagaagggcctggtgtttgagatcagcagtgatgatggcttccagatctgtgccgagagcattgaagatgcctggaagagcctgacagacaaggtgcaggaggcccggagcaatgcccggctgaagcagctgagctttgctggggtgaatggcctgaggatgctgggcatcctgcatgatgctgtggtgttcctgattgagcagctgagcggggccaagcactgcaggaactacaagttccgcttccacaagccagaggaggccaatgaaccacccctgaacccccacggcagcgcccgggcagaggtgcacctgaggaagagcgcctttgacatgttcaacttcctggccagcaagcaccggcagcccccagagtacaaccccaatgatgaggaggaggaggaggtgcagctgaagagcgcccggcgggccacctccatggacctgcccatgcccatgaggttccgccacctgaagaagaccagcaaggaggccgtgggcgtgtaccgcagccccatccacggccggggcctcttctgcaagaggaacattgatgctggggagatggtgattgaatatgctggaaatgtcatccgcagcatccagacagacaagcgggagaagtactatgacagcaaaggaattggctgctacatgttcagaattgatgattctgaggtggtggatgccaccatgcatggaaatgctgcccgcttcatcaaccacagctgtgagcccaactgctacagcagggtcatcaacattgatggccagaagcacatcgtcatctttgccatgaggaagatctacagaggagaggagctgacctatgactacaagttccccattgaagatgccagcaacaagctgccctgcaactgtggggccaagaagtgcaggaagttcctgaactag

SEQ ID NO: 160635 - DNA, 1680 bp, synthetic construct
  misc_feature 1..1680: note = Description of Artificial Sequence: Synthetic coding sequence
  source 1..1680: mol_type = other DNA
atggacaaccagtgcaccgtgcaggtgcggctggagctgggccaccgggcccagctgaggaagaagcccaccacagagggcttcacccatgactggatggtgtttgtgcggggccctgagcagtgtgacatccagcactttgtggagaaggtggtgttctggctgcatgacagcttccccaagcccaggagagtgtgcaaggagcccccctacaaggtggaggagagcggctacgccggcttcatcatgcccatcgaggtgcacttcaagaacaaggaggagcccaggaaggtgtgcttcacctatgacctcttcctgaacctggagggcaacccccctgtgaaccacctgcgctgtgagaagctgaccttcaacaaccccaccacagagttccgctacaagctgctgcgggccggcggcgtgatggtgatgcctgagggcgctgacacagtgtcccggcccagcccagactaccccatgctgcccaccatccccctgagcgccttcagtgaccccaagaagaccaagcccagccacggcagcaaggatgccaacaaggagagcagcaagaccagcaagccccacaaggtgaccaaggagcaccgggagcggcccaggaaggacagcgagagcaagagcagcagcaaggagctggagcgggagcaggccaagagcagcaaggacaccagcaggaagctgggggagggccgcctgcccaaggaggagaaggcccccccacccaaggccgccttcaaggagcccaagatggccctgaaggagaccaagctggagagcaccagccccaagggcggccccccacctcctcctcctcctccaccccgggccagcagcaagaggcctgccacagctgacagccccaagcccagcgccaagaagcagaagaagagcagcagcaagggcagccgcagcgcccctggcaccagccccaggaccagcagcagcagcagcttcagtgacaagaagccagccaaggacaagagcagcaccagaggagagaaggtgaaggccgagagcgagccccgggaggccaagaaggccctggaggtggaggagagcaacagtgaagatgaggccagcttcaagtctgagagcgcccagagcagccccagcaacagcagcagcagcagtgacagcagcagtgacagcgactttgagcccagccagaaccacagccagggccccctgcgctccatggtggaggacctgcagagcgaggagagtgatgaagatgacagcagcagtggagaggaggccgccggcaagaccaaccctggccgggacagccggctgtccttcagtgacagcgagagtgacaacagcgctgacagcagcctgcccagccgggagcccccaccaccccagaagcccccaccacccaacagcaaggtgtctggaagaagaagccctgagagctgcagcaagccagagaagatcctgaagaagggcacctatgacaaggcctacacagatgagctggtggagctgcaccggcggctgatggccctgcgggagagaaatgtgctgcagcagatcgtgaacctgattgaggagaccggccacttcaacgtgaccaacaccacctttgattttgacctcttcagcctggatgagaccaccgtgaggaagctgcagagctgcctggaggccgtggccacctag

SEQ ID NO: 160636 - DNA, 273 bp, synthetic construct
  misc_feature 1..273: note = Description of Artificial Sequence: Synthetic coding sequence
  source 1..273: mol_type = other DNA
atgagggaccctgtgagcagccagtacagcagcttcctgttctggaggatgcccatccctgagctggacctgtctgagctggagggcctgggcctgagtgacacagccacctacaaggtgaaggacagctctgtgggcaagatgattggccaggccacagctgctgaccaggagaagaacccagaaggagatggcctgctggagtacagcaccttcaacttctggagggcccccatcgccagcatccacagctttgagctggacctgctgtag

SEQ ID NO: 160637 - DNA, 417 bp, synthetic construct
  misc_feature 1..417: note = Description of Artificial Sequence: Synthetic coding sequence
  source 1..417: mol_type = other DNA
atgaaggacctgcacagtgatgacaatgaggaggagagtgatgaggtggaggacaatgacaatgattctgagatggagaggcctgtgaacagaggaggcagccgcagcagaagagtgtccctgagtgatggcagtgacagcgagagcagcagcgccagcagccccctgcaccacgagcccccaccacccctgctgaagaccaacaacaaccagatcctggaggtgaagagccccatcaagcagagcaagagtgacaagcagatcaagaatggagaatgtgacaagatcgtgaacctgattgaggagaccggccacttccacatcaccaacaccacctttgattttgacctgtgcagcctggacaagaccaccgtgaggaagctgcagagctacctggagaccagcggcaccagctag

SEQ ID NO: 160638 - DNA, 489 bp, synthetic construct
  misc_feature 1..489: note = Description of Artificial Sequence: Synthetic coding sequence
  source 1..489: mol_type = other DNA
atgaaggacctgcacagtgatgacaatgaggaggagagtgatgaggtggaggacaatgacaatgattctgagatggagaggcctgtgaacagaggaggcagccgcagcagaagagtgtccctgagtgatggcagtgacagcgagagcagcagcgccagcagccccctgcaccacgagcccccaccacccctgctgaagaccaacaacaaccagatcctggaggtgaagagccccatcaagcagagcaagagtgacaagcagatcaagaatggagaatgtgacaaggcctacctggatgagctggtggagctgcaccggcggctgatgaccctgcgggagcggcacatcctgcagcagatcgtgaacctgattgaggagaccggccacttccacatcaccaacaccacctttgattttgacctgtgcagcctggacaagaccaccgtgaggaagctgcagagctacctggagaccagcggcaccagctag

SEQ ID NO: 160639 - DNA, 417 bp, synthetic construct; identical to SEQ ID NO: 160637
  misc_feature 1..417: note = Description of Artificial Sequence: Synthetic coding sequence
  source 1..417: mol_type = other DNA

SEQ ID NO: 160640 - DNA, 1707 bp, synthetic construct
  misc_feature 1..1707: note = Description of Artificial Sequence: Synthetic coding sequence
  source 1..1707: mol_type = other DNA
atggccagcagctgtgctgtgcaggtgaagctggagctgggccaccgggcccaggtgaggaagaagcccaccgtggagggcttcacccatgactggatggtgtttgtgcggggccctgagcacagcaacatccagcactttgtggagaaggtggtgttccacctgcacgagagcttcccccggcccaagagggtgtgcaaggaccccccctacaaggtggaggagagcggctacgccggcttcatcctgcccatcgaggtgtacttcaagaacaaggaggagcccaggaaggtgcgctttgattatgacctcttcctgcacctggagggccacccccctgtgaaccacctgcgctgtgagaagctgaccttcaacaaccccacagaggacttccggaggaagctgctgaaggccggcggggaccccaacagaagcatccacaccagcagcagcagcagcagcagcagcagcagcagcagcagcagcagcagcagcagcagcagcagcagcagcagcagcagcagcagcagcagcagcagcagcagcagcagcagcagcagcagcagcagcaccagcttcagcaagccccacaagctgatgaaggagcacaaggagaagcccagcaaggacagccgggagcacaagagcgccttcaaggagcccagccgggaccacaacaagagcagcaaggagagcagcaagaagcccaaggagaacaagcccctgaaggaggagaagatcgtgcccaagatggccttcaaggagcccaagcccatgagcaaggagcccaagccagacagcaacctgctgaccatcaccagcggccaggacaagaaggcccccagcaagaggcctcccatcagtgacagcgaggagctgagcgccaagaagaggaagaagagcagcagcgaggccctcttcaagagcttcagcagcgccccacccctcatcctgacctgcagcgctgacaagaagcagatcaaggacaagagccacgtgaagatgggcaaggtgaagattgagagcgagaccagcgagaagaagaagagcaccctgcccccatttgatgacatcgtggaccccaatgacagtgatgtggaggagaacatcagcagcaagagtgacagcgagcagcccagccctgccagcagcagcagcagcagcagcagcagcttcacccccagccagacccggcagcagggccccctgcggagcatcatgaaggacctgcacagtgatgacaatgaggaggagagtgatgaggtggaggacaatgacaatgattctgagatggagaggcctgtgaacagaggaggcagccgcagcagaagagtgtccctgagtgatggcagtgacagcgagagcagcagcgccagcagccccctgcaccacgagcccccaccacccctgctgaagaccaacaacaaccagatcctggaggtgaagagccccatcaagcagagcaagagtgacaagcagatcaagaatggagaatgtgacaaggcctacctggatgagctggtggagctgcaccggcggctgatgaccctgcgggagcggcacatcctgcagcagatcgtgaacctgattgaggagaccggccacttccacatcaccaacaccacctttgattttgacctgtgcagcctggacaagaccaccgtgaggaagctgcagagctacctggagaccagcggcaccagctag

SEQ ID NO: 160641 - DNA, 1698 bp, synthetic construct
  misc_feature 1..1698: note = Description of Artificial Sequence: Synthetic coding sequence
  source 1..1698: mol_type = other DNA
atgtgtgctgtgcaggtgaagctggagctgggccaccgggcccaggtgaggaagaagcccaccgtggagggcttcacccatgactggatggtgtttgtgcggggccctgagcacagcaacatccagcactttgtggagaaggtggtgttccacctgcacgagagcttcccccggcccaagagggtgtgcaaggaccccccctacaaggtggaggagagcggctacgccggcttcatcctgcccatcgaggtgtacttcaagaacaaggaggagcccaggaaggtgcgctttgattatgacctcttcctgcacctggagggccacccccctgtgaaccacctgcgctgtgagaagctgaccttcaacaaccccacagaggacttccggaggaagctgctgaaggccggcggggaccccaacagaagcatccacaccagcagcagcagcagcagcagcagcagcagcagcagcagcagcagcagcagcagcagcagcagcagcagcagcagcagcagcagcagcagcagcagcagcagcagcagcagcagcagcagcagcagcaccagcttcagcaagccccacaagctgatgaaggagcacaaggagaagcccagcaaggacagccgggagcacaagagcgccttcaaggagcccagccgggaccacaacaagagcagcaaggagagcagcaagaagcccaaggagaacaagcccctgaaggaggagaagatcgtgcccaagatggccttcaaggagcccaagcccatgagcaaggagcccaagccagacagcaacctgctgaccatcaccagcggccaggacaagaaggcccccagcaagaggcctcccatcagtgacagcgaggagctgagcgccaagaagaggaagaagagcagcagcgaggccctcttcaagagcttcagcagcgcccctcctctcatcctgacctgcagcgctgacaagaagcagatcaaggacaagagccacgtgaagatgggcaaggtgaagattgaaagtgagaccagcgagaagaagaagagcaccctgcccccatttgatgacatcgtggaccccaatgacagtgatgtggaggagaacatcagcagcaagagtgacagcgagcagcccagccctgccagcagcagcagcagcagcagcagcagcttcacccccagccagacccggcagcagggccccctgcggagcatcatgaaggacctgcacagtgatgacaatgaggaggagagtgatgaggtggaggacaatgacaatgacagcgagatggagaggcctgtgaacagaggaggcagccgcagccggcgggtgtccctgagtgatggcagtgacagcgagagcagcagcgccagcagccccctgcaccacgagcccccaccacccctgctgaagaccaacaacaaccagatcctggaggtgaagagccccatcaagcagagcaagagtgacaagcagatcaagaatggagaatgtgacaaggcctacctggatgagctggtggagctgcaccggcggctgatgaccctgcgggagcggcacatcctgcagcagatcgtgaacctgattgaggagaccggccacttccacatcaccaacaccacctttgattttgacctgtgcagcctggacaagaccaccgtgaggaagctgcagagctacctggagaccagcggcaccagctag

SEQ ID NO: 160642 - DNA, 1824 bp, synthetic construct
  misc_feature 1..1824: note = Description of Artificial Sequence: Synthetic coding sequence
  source 1..1824: mol_type = other DNA
atgcagagggccccacccttccccttcatgtgtgtgtccagaagaaggaagaagtgccaggcccagaggagcctgcccaagccccggctgcctgtgatccacggctgcctgagcagcccctgcccccagtgtgctgtgcaggtgaagctggagctgggccaccgggcccaggtgaggaagaagcccaccgtggagggcttcacccatgactggatggtgtttgtgcggggccctgagcacagcaacatccagcactttgtggagaaggtggtgttccacctgcacgagagcttcccccggcccaagagggtgtgcaaggaccccccctacaaggtggaggagagcggctacgccggcttcatcctgcccatcgaggtgtacttcaagaacaaggaggagcccaggaaggtgcgctttgattatgacctcttcctgcacctggagggccacccccctgtgaaccacctgcgctgtgagaagctgaccttcaacaaccccacagaggacttccggaggaagctgctgaaggccggcggggaccccaacagaagcatccacaccagcagcagcagcagcagcagcagcagcagcagcagcagcagcagcagcagcagcagcagcagcagcagcagcagcagcagcagcagcagcagcagcagcagcagcagcagcagcagcagcagcagcaccagcttcagcaagccccacaagctgatgaaggagcacaaggagaagcccagcaaggacagccgggagcacaagagcgccttcaaggagcccagccgggaccacaacaagagcagcaaggagagcagcaagaagcccaaggagaacaagcccctgaaggaggagaagatcgtgcccaagatggccttcaaggagcccaagcccatgagcaaggagcccaagccagacagcaacctgctgaccatcaccagcggccaggacaagaaggcccccagcaagaggcctcccatcagtgacagcgaggagctgagcgccaagaagaggaagaagagcagcagcgaggccctcttcaagagcttcagcagcgcccctcctctcatcctgacctgcagcgctgacaagaagcagatcaaggacaagagccacgtgaagatgggcaaggtgaagattgaaagtgagaccagcgagaagaagaagagcaccctgcccccatttgatgacatcgtggaccccaatgacagtgatgtggaggagaacatcagcagcaagagtgacagcgagcagcccagccctgccagcagcagcagcagcagcagcagcagcttcacccccagccagacccggcagcagggccccctgcggagcatcatgaaggacctgcacagtgatgacaatgaggaggagagtgatgaggtggaggacaatgacaatgacagcgagatggagaggcctgtgaacagaggaggcagccgcagccggcgggtgtccctgagtgatggcagtgacagcgagagcagcagcgccagcagccccctgcaccacgagcccccaccacccctgctgaagaccaacaacaaccagatcctggaggtgaagagccccatcaagcagagcaagagtgacaagcagatcaagaatggagaatgtgacaaggcctacctggatgagctggtggagctgcaccggcggctgatgaccctgcgggagcggcacatcctgcagcagatcgtgaacctgattgaggagaccggccacttccacatcaccaacaccacctttgattttgacctgtgcagcctggacaagaccaccgtgaggaagctgcagagctacctggagaccagcggcaccagctag

SEQ ID NO: 160643 - DNA, 4986 bp, synthetic construct
  misc_feature 1..4986: note = Description of Artificial Sequence: Synthetic coding sequence
  source 1..4986: mol_type = other DNA
atgtctgctgggggcagagatgaggagaggaggaagctggccgacatcatccaccactggaatgccaaccggctggacctgtttgagatcagccagcccacagaggacctggagttccacggcgtgatgaggttctacttccaggacaaggccgccggcaactttgccaccaagtgcatccgggtgagcagcacagccaccacccaggacgtcatcgagaccctggccgagaagttccggccagacatgaggatgctgagcagccccaagtacagcctgtatgaggtgcacgtgtctggagagcggcggctggacattgatgagaagcccctggtggtgcagctgaactggaacaaggatgaccgggagggccgctttgtgctgaagaatgaaaatgatgccatcccccccaagaaggcccagagcaatggacctgagaagcaggagaaggagggcgtcatccagaacttcaagaggaccctgagcaagaaggagaagaaggagaagaagaagcgggagaaggaggccctgcggcaggccagtgacaaggatgaccggcccttccagggagaagatgtggagaacagccggctggccgctgaggtgtacaaggacatgcctgagaccagcttcaccaggaccatcagcaaccctgaggtggtgatgaagagaagacggcagcagaagctggagaagaggatgcaggagttccgcagcagtgatggccgcccagacagcggcggcaccctgcgcatctatgctgacagcctgaagcccaacatcccctacaagaccatcctgctgagcaccacagatcctgctgactttgctgtggccgaggccctggagaagtatggcctggagaaggagaaccccaaggactactgcatcgcccgggtgatgctgcccccaggggcccagcacagtgatgagaagggggccaaggagatcatcctggatgatgatgaatgtcccctgcagatcttccgggagtggcccagcgacaagggcatcctggtgttccagctgaagagaagacctccagaccacatccccaagaagaccaagaagcacctggagggcaagacccccaagggcaaggagcgggcagatggcagcggctacggcagcaccctgcccccagagaagctgccctacctggtggagctgagccctggaagaagaaaccactttgcctactacaactaccacacctatgaagatggcagtgacagccgggacaagcccaagctgtaccgcctgcagctgtctgtgacagaggtgggcacagagaagctggatgacaacagcatccagctgtttggacctggcatccagccccaccactgtgacctgaccaacatggatggagtggtgacagtgacccccaggtccatggatgctgagacctacgtggagggccagaggatcagcgagaccaccatgctgcagagcggcatgaaggtgcagtttggagccagccacgtgttcaagtttgtggaccccagccaggaccacgccctggccaagaggtctgtggatggcggcctgatggtgaagggccccaggcacaagccaggcatcgtgcaggagaccacctttgacctgggcggggacatccacagcggcacagccctgcccaccagcaagagcaccacccggctggacagcgacagagtgagcagcgccagcagcacagctgagcggggcatggtgaagcccatgatccgggtggagcagcagcctgactaccgccggcaggagagcaggacccaggatgccagcggccctgagctgatcctgcctgccagcattgagttccgggagagcagcgaggacagcttcctgagcgccatcatcaactacaccaacagcagcacagtgcacttcaagctgagccccacctacgtgctgtacatggcctgccgctacgtgctgagcaaccagtacagaccagacatcagccccacagagaggacccacaaggtgattgctgtggtgaacaagatggtgtccatgatggagggcgtcatccagaagcagaagaacattgctggggccctggccttctggatggccaatgccagcgagctgctgaacttcatcaagcaggaccgggacctgagccgcatcaccctggatgcccaggatgtgctggcccacctggtgcagatggccttcaagtacctggtgcactgcctgcagagcgagctgaacaactacatgcctgccttcctggatgatcctgaggagaacagcctgcagaggcccaagattgatgatgtgctgcacaccctgactggagccatgagcctgctgcggcgctgccgggtgaatgctgccctgaccatccagctgttcagccagctgttccacttcatcaacatgtggctgttcaaccggctggtgacagatcctgacagcggcctgtgcagccactactggggcgccatcatccggcagcagctgggccacatcgaggcctgggccgagaagcagggcctggagctggccgctgactgccacctgagccgcatcgtgcaggccaccaccctgctgaccatggacaagtatgccccagatgacatccccaacatcaacagcacctgcttcaagctgaacagcctgcagctgcaggccctgctgcagaactaccactgtgccccagatgagcccttcatccccacagacctgattgaaaatgtggtgacagtggctgaaaatacagcagatgagctggcccggagtgatggccgggaggtgcagctggaggaggaccctgacctgcagctgcccttcctgctgcctgaagatggctacagctgtgatgtggtgaggaacatccccaacggcctgcaggagttcctggaccccctgtgccagaggggcttctgccgcctcatcccccacaccaggagccctggcacctggaccatctactttgaaggagctgactatgagagccacctgctgagagaaaatacagagctggccatccccctgaggaaggagcctgagatcatcaccgtgaccctgaagaagcagaatggcatgggcctgagcatcgtggccgccaagggggccggccaggacaagctgggcatctacgtgaagtctgtggtgaagggcggcgctgctgatgtggatggccgcctggccgccggggaccagctgctgtctgtggatggccgcagcctggtgggcctgagccaggagagagctgctgagctgatgaccaggaccagctctgtggtgaccctggaggtggccaagcagggcgccatctaccacggcctggccaccctgctgaaccagcccagccccatgatgcagaggatcagtgaccggcggggcagcggcaagccccggcccaagtctgagggctttgagctgtacaacaacagcacccagaatggcagccctgagagcccccagctgccctgggccgagtacagcgagcccaagaagctgcctggagatgaccggctgatgaagaacagagctgaccacaggagcagccccaacgtggccaaccagccccccagccctgggggcaagagcgcctatgccagcggcaccacagccaagatcacctctgtgtccacaggcaacctgtgcacagaggagcagaccccaccacccaggcctgaggcctaccccatccccacccagacctacacccgggagtacttcaccttccctgccagcaagagccaggacaggatggccccaccccagaaccagtggcccaactatgaggagaagccccacatgcacacagacagcaaccacagcagcatcgccatccagagggtgaccaggagccaggaggagctgcgggaggacaaggcctaccagctggagcggcaccgcatcgaggccgccatggacaggaagagtgacagcgacatgtggatcaaccagagcagcagcctggacagcagcaccagcagccaggagcacctgaaccacagcagcaagtctgtgaccccagccagcaccctgaccaagagcggccctggccgctggaagaccccagctgccatcccagccacccctgtggccgtgtcccagcccatcagaacagacctgcccccacctcctcctcctcctcctgtgcactacgccggggactttgatggcatgtccatggacctgcccctgcccccacctccttctgccaaccagatcggcctgcccagcgcccaggtggccgctgctgagaggaggaagcgggaggagcaccagcgctggtatgagaaggagaaggcccggctggaggaggagcgggagaggaagaggcgggagcaggagaggaagctgggccagatgaggacccagagcctgaacccagcccccttcagccccctgacagcccagcagatgaagccagagaagcccagcaccctgcagaggccccaggagaccgtcatccgggagctgcagccccagcagcagcccaggaccatcgagcggcgggacctgcagtacatcaccgtgtccaaggaggagctgagcagcggggacagcctgagcccagacccctggaagagagatgccaaggagaagctggagaagcagcagcagatgcacatcgtggacatgctgagcaaggagatccaggagctgcagagcaagccagacagatctgctgaggagagtgaccggctgaggaagctgatgctggagtggcagttccagaagaggctgcaggagagcaagcagaaggatgaagatgatgaggaggaggaggatgatgatgtggacaccatgctgatcatgcagaggctggaggccgagcggcgggcccggcagacagccatgcctgccatctctgtgctggacctgctgcaggatgaggagcggcggcggcagcagcagctggaggagatgaggaagcgggaggctgaagatcgggcccggcaggaggaggagcggcggcggcaggaggaggagaggaccaagagagatgctgaggagaagtag

SEQ ID NO: 160644 - DNA, 4998 bp, synthetic construct
  misc_feature 1..4998: note = Description of Artificial Sequence: Synthetic coding sequence
  source 1..4998: mol_type = other DNA
atgtctgctgggggcagagatgaggagaggaggaagctggccgacatcatccaccactggaatgccaaccggctggacctgtttgagatcagccagcccacagaggacctggagttccacggcgtgatgaggttctacttccaggacaaggccgccggcaactttgccaccaagtgcatccgggtgagcagcacagccaccacccaggacgtcatcgagaccctggccgagaagttccggccagacatgaggatgctgagcagccccaagtacagcctgtatgaggtgcacgtgtctggagagcggcggctggacattgatgagaagcccctggtggtgcagctgaactggaacaaggatgaccgggagggccgctttgtgctgaagaatgaaaatgatgccatcccccccaagaaggcccagagcaatggacctgagaagcaggagaaggagggcgtcatccagaacttcaagaggaccctgagcaagaaggagaagaaggagaagaagaagcgggagaaggaggccctgcggcaggccagtgacaaggatgaccggcccttccagggagaagatgtggagaacagccggctggccgctgaggtgtacaaggacatgcctgagaccagcttcaccaggaccatcagcaaccctgaggtggtgatgaagagaagacggcagcagaagctggagaagaggatgcaggagttccgcagcagtgatggccgcccagacagcggcggcaccctgcgcatctatgctgacagcctgaagcccaacatcccctacaagaccatcctgctgagcaccacagatcctgctgactttgctgtggccgaggccctggagaagtatggcctggagaaggagaaccccaaggactactgcatcgcccgggtgatgctgcccccaggggcccagcacagtgatgagaagggggccaaggagatcatcctggatgatgatgaatgtcccctgcagatcttccgggagtggcccagcgacaagggcatcctggtgttccagctgaagagaagacctccagaccacatccccaagaagaccaagaagcacctggagggcaagacccccaagggcaaggagcgggcagatggcagcggctacggcagcaccctgcccccagagaagctgccctacctggtggagctgagccctggaagaagaaaccactttgcctactacaactaccacacctatgaagatggcagtgacagccgggacaagcccaagctgtaccgcctgcagctgtctgtgacagaggtgggcacagagaagctggatgacaacagcatccagctgtttggacctggcatccagccccaccactgtgacctgaccaacatggatggagtggtgacagtgacccccaggtccatggatgctgagacctacgtggagggccagaggatcagcgagaccaccatgctgcagagcggcatgaaggtgcagtttggagccagccacgtgttcaagtttgtggaccccagccaggaccacgccctggccaagaggtctgtggatggcggcctgatggtgaagggccccaggcacaagccaggcatcgtgcaggagaccacctttgacctgggcggggacatccacagcggcacagccctgcccaccagcaagagcaccacccggctggacagcgacagagtgagcagcgccagcagcacagctgagcggggcatggtgaagcccatgatccgggtggagcagcagcctgactaccgccggcaggagagcaggacccaggatgccagcggccctgagctgatcctgcctgccagcattgagttccgggagagcagcgaggacagcttcctgagcgccatcatcaactacaccaacagcagcacagtgcacttcaagctgagccccacctacgtgctgtacatggcctgccgctacgtgctgagcaaccagtacagaccagacatcagccccacagagaggacccacaaggtgattgctgtggtgaacaagatggtgtccatgatggagggcgtcatccagaagcagaagaacattgctggggccctggccttctggatggccaatgccagcgagctgctgaacttcatcaagcaggaccgggacctgagccgcatcaccctggatgcccaggatgtgctggcccacctggtgcagatggccttcaagtacctggtgcactgcctgcagagcgagctgaacaactacatgcctgccttcctggatgatcctgaggagaacagcctgcagaggcccaagattgatgatgtgctgcacaccctgactggagccatgagcctgctgcggcgctgccgggtgaatgctgccctgaccatccagctgttcagccagctgttccacttcatcaacatgtggctgttcaaccggctggtgacagatcctgacagcggcctgtgcagccactactggggcgccatcatccggcagcagctgggccacatcgaggcctgggccgagaagcagggcctggagctggccgctgactgccacctgagccgcatcgtgcaggccaccaccctgctgaccatggacaagtatgccccagatgacatccccaacatcaacagcacctgcttcaagctgaacagcctgcagctgcaggccctgctgcagaactaccactgtgccccagatgagcccttcatccccacagacctgattgaaaatgtggtgacagtggctgaaaatacagcagatgagctggcccggagtgatggccgggaggtgcagctggaggaggaccctgacctgcagctgcccttcctgctgcctgaagatggctacagctgtgatgtggtgaggaacatccccaacggcctgcaggagttcctggaccccctgtgccagaggggcttctgccgcctcatcccccacaccaggagccctggcacctggaccatctactttgaaggagctgactatgagagccacctgctgagagaaaatacagagctggcccagcccctgaggaaggagcctgagatcatcaccgtgaccctgaagaagcagaatggcatgggcctgagcatcgtggccgccaagggggccggccaggacaagctgggcatctacgtgaagtctgtggtgaagggcggcgctgctgatgtggatggccgcctggccgccggggaccagctgctgtctgtggatggccgcagcctggtgggcctgagccaggagagagctgctgagctgatgaccaggaccagctctgtggtgaccctggaggtggccaagcagggcgccatctaccacggcctggccaccctgctgaaccagcccagccccatgatgcagaggatcagtgaccggcggggcagcggcaagccccggcccaagtctgagggctttgagctgtacaacaacagcacccagaatggcagccctgagagcccccagctgccctgggccgagtacagcgagcccaagaagctgcctggagatgaccggctgatgaagaacagagctgaccacaggagcagccccaacgtggccaaccagccccccagccctgggggcaagagcgcctatgccagcggcaccacagccaagatcacctctgtgtccacaggcaacctgtgcacagaggagcagaccccaccacccaggcctgaggcctaccccatccccacccagacctacacccgggagtacttcaccttccctgccagcaagagccaggacaggatggccccaccccagaaccagtggcccaactatgaggagaagccccacatgcacacagacagcaaccacagcagcatcgccatccagagggtgaccaggagccaggaggagctgcgggaggacaaggcctaccagctggagcggcaccgcatcgaggccgccatggacaggaagagtgacagcgacatgtggatcaaccagagcagcagcctggacagcagcaccagcagccaggagcacctgaaccacagcagcaagtctgtgaccccagccagcaccctgaccaagagcggccctggccgctggaagaccccagctgccatcccagccacccctgtggccgtgtcccagcccatcagaacagacctgcccccacctcctcctcctcctcctgtgcactacgccggggactttgatggcatgtccatggacctgcccctgcccccacctccttctgccaaccagatcggcctgcccagcgcccaggtggccgctgctgagaggaggaagcgggaggagcaccagcgctggtatgagaaggagaaggcccggctggaggaggagcgggagaggaagaggcgggagcaggagaggaagctgggccagatgaggacccagagcctgaacccagcccccttcagccccctgacagcccagcagatgaagccagagaagcccagcaccctgcagaggccccaggagaccgtcatccgggagctgcagccccagcagcagcccaggaccatcgagcggcgggacctgcagtacatcaccgtgtccaaggaggagctgagcagcggggacagcctgagcccagacccctggaagagagatgccaaggagaagctggagaagcagcagcagatgcacatcgtggacatgctgagcaaggagatccaggagctgcagagcaagccagacagatctgctgaggagagtgaccggctgaggaagctgatgctggagtggcagttccagaagaggctgcaggagagcaagcagaaggatgaagatgatgaggaggaggaggatgatgatgtggacaccatgctgatcatgcagaggctggaggccgagcggcgggcccggcagacagccatgcctgccatctctgtgctggacctgctgcaggatgaggagcggcggcggcagcagcagctggaggagatgaggaagcgggaggctgaagatcgggcccggcaggaggaggagcggcggcggcaggaggaggagaggaccaagagagatgctgaggagaaggtgatggtgctgtag

SEQ ID NO: 160645 - DNA, 5475 bp, synthetic construct
  misc_feature 1..5475: note = Description of Artificial Sequence: Synthetic coding sequence
  source 1..5475: mol_type = other DNA
atgtctgctgggggcagagatgaggagaggaggaagctggccgacatcatccaccactggaatgccaaccggctggacctgtttgagatcagccagcccacagaggacctggagttccacggcgtgatgaggttctacttccaggacaaggccgccggcaactttgccaccaagtgcatccgggtgagcagcacagccaccacccaggacgtcatcgagaccctggccgagaagttccggccagacatgaggatgctgagcagccccaagtacagcctgtatgaggtgcacgtgtctggagagcggcggctggacattgatgagaagcccctggtggtgcagctgaactggaacaaggatgaccgggagggccgctttgtgctgaagaatgaaaatgatgccatcccccccaagaaggcccagagcaatggacctgagaagcaggagaaggagggcgtcatccagaacttcaagaggaccctgagcaagaaggagaagaaggagaagaagaagcgggagaaggaggccctgcggcaggccagtgacaaggatgaccggcccttccagggagaagatgtggagaacagccggctggccgctgaggtgtacaaggacatgcctgagaccagcttcaccaggaccatcagcaaccctgaggtggtgatgaagagaagacggcagcagaagctggagaagaggatgcaggagttccgcagcagtgatggccgcccagacagcggcggcaccctgcgcatctatgctgacagcctgaagcccaacatcccctacaagaccatcctgctgagcaccacagatcctgctgactttgctgtggccgaggccctggagaagtatggcctggagaaggagaaccccaaggactactgcatcgcccgggtgatgctgcccccaggggcccagcacagtgatgagaagggggccaaggagatcatcctggatgatgatgaatgtcccctgcagatcttccgggagtggcccagcgacaagggcatcctggtgttccagctgaagagaagacctccagaccacatccccaagaagaccaagaagcacctggagggcaagacccccaagggcaaggagcgggcagatggcagcggctacggcagcaccctgcccccagagaagctgccctacctggtggagctgagccctggaagaagaaaccactttgcctactacaactaccacacctatgaagatggcagtgacagccgggacaagcccaagctgtaccgcctgcagctgtctgtgacagaggtgggcacagagaagctggatgacaacagcatccagctgtttggacctggcatccagccccaccactgtgacctgaccaacatggatggagtggtgacagtgacccccaggtccatggatgctgagacctacgtggagggccagaggatcagcgagaccaccatgctgcagagcggcatgaaggtgcagtttggagccagccacgtgttcaagtttgtggaccccagccaggaccacgccctggccaagaggtctgtggatggcggcctgatggtgaagggccccaggcacaagccaggcatcgtgcaggagaccacctttgacctgggcggggacatccacagcggcacagccctgcccaccagcaagagcaccacccggctggacagcgacagagtgagcagcgccagcagcacagctgagcggggcatggtgaagcccatgatccgggtggagcagcagcctgactaccgccggcaggagagcaggacccaggatgccagcggccctgagctgatcctgcctgccagcattgagttccgggagagcagcgaggacagcttcctgagcgccatcatcaactacaccaacagcagcacagtgcacttcaagctgagccccacctacgtgctgtacatggcctgccgctacgtgctgagcaaccagtacagaccagacatcagccccacagagaggacccacaaggtgattgctgtggtgaacaagatggtgtccatgatggagggcgtcatccagaagcagaagaacattgctggggccctggccttctggatggccaatgccagcgagctgctgaacttcatcaagcaggaccgggacctgagccgcatcaccctggatgcccaggatgtgctggcccacctggtgcagatggccttcaagtacctggtgcactgcctgcagagcgagctgaacaactacatgcctgccttcctggatgatcctgaggagaacagcctgcagaggcccaagattgatgatgtgctgcacaccctgactggagccatgagcctgctgcggcgctgccgggtgaatgctgccctgaccatccagctgttcagccagctgttccacttcatcaacatgtggctgttcaaccggctggtgacagatcctgacagcggcctgtgcagccactactggggcgccatcatccggcagcagctgggccacatcgaggcctgggccgagaagcagggcctggagctggccgctgactgccacctgagccgcatcgtgcaggccaccaccctgctgaccatggacaagtatgccccagatgacatccccaacatcaacagcacctgcttcaagctgaacagcctgcagctgcaggccctgctgcagaactaccactgtgccccagatgagcccttcatccccacagacctgattgaaaatgtggtgacagtggctgaaaatacagcagatgagctggcccggagtgatggccgggaggtgcagctggaggaggaccctgacctgcagctgcccttcctgctgcctgaagatggctacagctgtgatgtggtgaggaacatccccaacggcctgcaggagttcctggaccccctgtgccagaggggcttctgccgcctcatcccccacaccaggagccctggcacctggaccatctactttgaaggagctgactatgagagccacctgctgagagaaaatacagagctggccatccccctgaggaaggagcctgagatcatcaccgtgaccctgaagaagcagaatggcatgggcctgagcatcgtggccgccaagggggccggccaggacaagctgggcatctacgtgaagtctgtggtgaagggcggcgctgctgatgtggatggccgcctggccgccggggaccagctgctgtctgtggatggccgcagcctggtgggcctgagccaggagagagctgctgagctgatgaccaggaccagctctgtggtgaccctggaggtggccaagcagggcgccatctaccacggcctggccaccctgctgaaccagcccagccccatgatgcagaggatcagtgaccggcggggcagcggcaagccccggcccaagtctgagggctttgagctgtacaacaacagcacccagaatggcagccctgagagcccccagctgccctgggccgagtacagcgagcccaagaagctgcctggagatgaccggctgatgaagaacagagctgaccacaggagcagccccaacgtggccaaccagccccccagccctgggggcaagagcgcctatgccagcggcaccacagccaagatcacctctgtgtccacaggcaacctgtgcacagaggagcagaccccaccacccaggcctgaggcctaccccatccccacccagacctacacccgggagtacttcaccttccctgccagcaagagccaggacaggatggccccaccccagaaccagtggcccaactatgaggagaagccccacatgcacacagacagcaaccacagcagcatcgccatccagagggtgaccaggagccaggaggagctgcgggaggacaaggcctaccagctggagcggcaccgcatcgaggccgccatggacaggaagagtgacagcgacatgtggatcaaccagagcagcagcctggacagcagcaccagcagccaggagcacctgaaccacagcagcaagtctgtgaccccagccagcaccctgaccaagagcggccctggccgctggaagaccccagctgccatcccagccacccctgtggccgtgtcccagcccatcagaacagacctgcccccacctcctcctcctcctcctgtgcactacgccggggactttgatggcatgtccatggacctgcccctgcccccacctccttctgccaaccagatcggcctgcccagcgcccaggtggccgctgctgagaggaggaagcgggaggagcaccagcgctggtatgagaaggagaaggcccggctggaggaggagcgggagaggaagaggcgggagcaggagaggaagctgggccagatgaggacccagagcctgaacccagcccccttcagccccctgacagcccagcagatgaagccagagaagcccagcaccctgcagaggccccaggagaccgtcatccgggagctgcagccccagcagcagcccaggaccatcgagcggcgggacctgcagtacatcaccgtgtccaaggaggagctgagcagcggggacagcctgagcccagacccctggaagagagatgccaaggagaagctggagaagcagcagcagatgcacatcgtggacatgctgagcaaggagatccaggagctgcagagcaagccagacagatctgctgaggagagtgaccggctgaggaagctgatgctggagtggcagttccagaagaggctgcaggagagcaagcagaaggatgaagatgatgaggaggaggaggatgatgatgtggacaccatgctgatcatgcagaggctggaggccgagcggcgggcccggctgcaggatgaggagcggcggcggcagcagcagctggaggagatgaggaagcgggaggctgaagatcgggcccggcaggaggaggagcggcggcggcaggaggaggagaggaccaagagagatgctgaggagaagaggcggcaggaggagggctactacagccggctggaggccgagcggcggcggcagcatgatgaagctgcccggcggctgctggagcctgaggcccctggcctgtgccggccccccctgccccgggactatgagccccccagccccagccctgcccctggggcccctcctcctccaccccagagaaatgccagctacctgaagacccaggtgctgagcccagacagcctcttcaccgccaagtttgtggcctacaatgaggaggaggaggaggaggactgcagcctggccggccccaacagctacccaggcagcactggagctgctgtgggcgcccatgatgcctgcagagatgccaaggagaagaggagcaagagccaggatgctgacagccctggcagcagcggggcccctgagaacctgaccttcaaggagcggcagaggctcttcagccagggccaggatgtgagcaacaaggtgaaggccagcaggaagctgacagagctggagaatgagctgaacaccaagtag

SEQ ID NO: 160646 - DNA, 4956 bp, synthetic construct
  misc_feature 1..4956: note = Description of Artificial Sequence: Synthetic coding sequence
  source 1..4956: mol_type = other DNA
atgtctgctgggggcagagatgaggagaggaggaagctggccgacatcatccaccactggaatgccaaccggctggacctgtttgagatcagccagcccacagaggacctggagttccacggcgtgatgaggttctacttccaggacaaggccgccggcaactttgccaccaagtgcatccgggtgagcagcacagccaccacccaggacgtcatcgagaccctggccgagaagttccggccagacatgaggatgctgagcagccccaagtacagcctgtatgaggtgcacgtgtctggagagcggcggctggacattgatgagaagcccctggtggtgcagctgaactggaacaaggatgaccgggagggccgctttgtgctgaagaatgaaaatgatgccatcccccccaagaaggcccagagcaatggacctgagaagcaggagaaggagggcgtcatccagaacttcaagaggaccctgagcaagaaggagaagaaggagaagaagaagcgggagaaggaggccctgcggcaggccagtgacaaggatgaccggcccttccagggagaagatgtggagaacagccggctggccgctgaggtgtacaaggacatgcctgagaccagcttcaccaggaccatcagcaaccctgaggtggtgatgaagagaagacggcagcagaagctggagaagaggatgcaggagttccgcagcagtgatggccgcccagacagcggcggcaccctgcgcatctatgctgacagcctgaagcccaacatcccctacaagaccatcctgctgagcaccacagatcctgctgactttgctgtggccgaggccctggagaagtatggcctggagaaggagaaccccaaggactactgcatcgcccgggtgatgctgcccccaggggcccagcacagtgatgagaagggggccaaggagatcatcctggatgatgatgaatgtcccctgcagatcttccgggagtggcccagcgacaagggcatcctggtgttccagctgaagagaagacctccagaccacatccccaagaagaccaagaagcacctggagggcaagacccccaagggcaaggagcgggcagatggcagcggctacggcagcaccctgcccccagagaagctgccctacctggtggagctgagccctggaagaagaaaccactttgcctactacaactaccacacctatgaagatggcagtgacagccgggacaagcccaagctgtaccgcctgcagctgtctgtgacagaggtgggcacagagaagctggatgacaacagcatccagctgtttggacctggcatccagccccaccactgtgacctgaccaacatggatggagtggtgacagtgacccccaggtccatggatgctgagacctacgtggagggccagaggatcagcgagaccaccatgctgcagagcggcatgaaggtgcagtttggagccagccacgtgttcaagtttgtggaccccagccaggaccacgccctggccaagaggtctgtggatggcggcctgatggtgaagggccccaggcacaagccaggcatcgtgcaggagaccacctttgacctgggcggggacatccacagcggcacagccctgcccaccagcaagagcaccacccggctggacagcgacagagtgagcagcgccagcagcacagctgagcggggcatggtgaagcccatgatccgggtggagcagcagcctgactaccgccggcaggagagcaggacccaggatgccagcggccctgagctgatcctgcctgccagcattgagttccgggagagcagcgaggacagcttcctgagcgccatcatcaactacaccaacagcagcacagtgcacttcaagctgagccccacctacgtgctgtacatggcctgccgctacgtgctgagcaaccagtacagaccagacatcagccccacagagaggacccacaaggtgattgctgtggtgaacaagatggtgtccatgatggagggcgtcatccagaagcagaagaacattgctggggccctggccttctggatggccaatgccagcgagctgctgaacttcatcaagcaggaccgggacctgagccgcatcaccctggatgcccaggatgtgctggcccacctggtgcagatggccttcaagtacctggtgcactgcctgcagagcgagctgaacaactacatgcctgccttcctggatgatcctgaggagaacagcctgcagaggcccaagattgatgatgtgctgcacaccctgactggagccatgagcctgctgcggcgctgccgggtgaatgctgccctgaccatccagctgttcagccagctgttccacttcatcaacatgtggctgttcaaccggctggtgacagatcctgacagcggcctgtgcagccactactggggcgccatcatccggcagcagctgggccacatcgaggcctgggccgagaagcagggcctggagctggccgctgactgccacctgagccgcatcgtgcaggccaccaccctgctgaccatggacaagtatgccccagatgacatccccaacatcaacagcacctgcttcaagctgaacagcctgcagctgcaggccctgctgcagaactaccactgtgccccagatgagcccttcatccccacagacctgattgaaaatgtggtgacagtggctgaaaatacagcagatgagctggcccggagtgatggccgggaggtgcagctggaggaggaccctgacctgcagctgcccttcctgctgcctgaagatggctacagctgtgatgtggtgaggaacatccccaacggcctgcaggagttcctggaccccctgtgccagaggggcttctgccgcctcatcccccacaccaggagccctggcacctggaccatctactttgaaggagctgactatgagagccacctgctgagagaaaatacagagctggcccagcccctgaggaaggagcctgagatcatcaccgtgaccctgaagaagcagaatggcatgggcctgagcatcgtggccgccaagggggccggccaggacaagctgggcatctacgtgaagtctgtggtgaagggcggcgctgctgatgtggatggccgcctggccgccggggaccagctgctgtctgtggatggccgcagcctggtgggcctgagccaggagagagctgctgagctgatgaccaggaccagctctgtggtgaccctggaggtggccaagcagggcgccatctaccacggcctggccaccctgctgaaccagcccagccccatgatgcagaggatcagtgaccggcggggcagcggcaagccccggcccaagtctgagggctttgagctgtacaacaacagcacccagaatggcagccctgagagcccccagctgccctgggccgagtacagcgagcccaagaagctgcctggagatgaccggctgatgaagaacagagctgaccacaggagcagccccaacgtggccaaccagccccccagccctgggggcaagagcgcctatgccagcggcaccacagccaagatcacctctgtgtccacaggcaacctgtgcacagaggagcagaccccaccacccaggcctgaggcctaccccatccccacccagacctacacccgggagtacttcaccttccctgccagcaagagccaggacaggatggccccaccccagaaccagtggcccaactatgaggagaagccccacatgcacacagacagcaaccacagcagcatcgccatccagagggtgaccaggagccaggaggagctgcgggaggacaaggcctaccagctggagcggcaccgcatcgaggccgccatggacaggaagagtgacagcgacatgtggatcaaccagagcagcagcctggacagcagcaccagcagccaggagcacctgaaccacagcagcaagtctgtgaccccagccagcaccctgaccaagagcggccctggccgctggaagaccccagctgccatcccagccacccctgtggccgtgtcccagcccatcagaacagacctgcccccacctcctcctcctcctcctgtgcactacgccggggactttgatggcatgtccatggacctgcccctgcccccacctccttctgccaaccagatcggcctgcccagcgcccaggtggccgctgctgagaggaggaagcgggaggagcaccagcgctggtatgagaaggagaaggcccggctggaggaggagcgggagaggaagaggcgggagcaggagaggaagctgggccagatgaggacccagagcctgaacccagcccccttcagccccctgacagcccagcagatgaagccagagaagcccagcaccctgcagaggccccaggagaccgtcatccgggagctgcagccccagcagcagcccaggaccatcgagcggcgggacctgcagtacatcaccgtgtccaaggaggagctgagcagcggggacagcctgagcccagacccctggaagagagatgccaaggagaagctggagaagcagcagcagatgcacatcgtggacatgctgagcaaggagatccaggagctgcagagcaagccagacagatctgctgaggagagtgaccggctgaggaagctgatgctggagtggcagttccagaagaggctgcaggagagcaagcagaaggatgaagatgatgaggaggaggaggatgatgatgtggacaccatgctgatcatgcagaggctggaggccgagcggcgggccagagatgaggagcggcggcggcagcagcagctggaggagatgaggaagcgggaggctgaagatcgggcccggcaggaggaggagcggcggcggcaggaggaggagaggaccaagagagatgctgaggagaaggtgatggtgctgtag

SEQ ID NO: 160647 - DNA, 5232 bp, synthetic construct
  misc_feature 1..5232: note = Description of Artificial Sequence: Synthetic coding sequence
  source 1..5232: mol_type = other DNA
atgtctgctgggggcagagatgaggagaggaggaagctggccgacatcatccaccactggaatgccaaccggctggacctgtttgagatcagccagcccacagaggacctggagttccacggcgtgatgaggttctacttccaggacaaggccgccggcaactttgccaccaagtgcatccgggtgagcagcacagccaccacccaggacgtcatcgagaccctggccgagaagttccggccagacatgaggatgctgagcagccccaagtacagcctgtatgaggtgcacgtgtctggagagcggcggctggacattgatgagaagcccctggtggtgcagctgaactggaacaaggatgaccgggagggccgctttgtgctgaagaatgaaaatgatgccatcccccccaaggcccagagcaatggacctgagaagcaggagaaggagggcgtcatccagaacttcaagaggaccctgagcaagaaggagaagaaggagaagaagaagcgggagaaggaggccctgcggcaggccagtgacaaggatgaccggcccttccagggagaagatgtggagaacagccggctggccgctgaggtgtacaaggacatgcctgagaccagcttcaccaggaccatcagcaaccctgaggtggtgatgaagagaagacggcagcagaagctggagaagaggatgcaggagttccgcagcagtgatggccgcccagattctgggggcaccctgcgcatctatgctgacagcctgaagcccaacatcccctacaagaccatcctgctgagcaccacagatcctgctgactttgctgtggccgaggccctggagaagtatggcctggagaaggagaaccccaaggactactgcatcgcccgggtgatgctgcccccaggggcccagcacagtgatgagaagggggccaaggagatcatcctggatgatgatgagtgccccctgcagatcttccgggagtggcccagcgacaagggcatcctggtgttccagctgaagaggcggcccccagaccacatccccaagaagaccaagaagcacctggagggcaagacccccaagggcaaggagcgggcagatggcagcggctacggcagcaccctgcccccagagaagctgccctacctggtggagctgagcccagatggcagtgacagccgggacaagcccaagctgtaccgcctgcagctgtctgtgacagaggtgggcacagagaagctggatgacaacagcatccagctgtttggacctggcatccagccccaccactgtgacctgaccaacatggatggagtggtgacagtgacccccaggtccatggatgctgagacctacgtggagggccagaggatcagcgagaccaccatgctgcagagcggcatgaaggtgcagtttggagccagccacgtgttcaagtttgtggaccccagccaggaccacgccctggccaagaggtctgtggatggcggcctgatggtgaagggccccaggcacaagccaggcatcgtgcaggagaccacctttgacctgggcggggacatccacagcggcacagccctgcccaccagcaagagcaccacccggctggacagcgacagagtgagcagcgccagcagcacagctgagcggggcatggtgaagcccatgatccgggtggagcagcagcctgactaccgccggcaggagagcaggacccaggatgccagcggccctgagctgatcctgcctgccagcattgagttccgggagagcagcgaggacagcttcctgagcgccatcatcaactacaccaacagcagcacagtgcacttcaagctgagccccacctacgtgctgtacatggcctgccgctacgtgctgagcaaccagtacagaccagacatcagccccacagagaggacccacaaggtgattgctgtggtgaacaagatggtgtccatgatggagggcgtcatccagaagcagaagaacattgctggggccctggccttctggatggccaatgccagcgagctgctgaacttcatcaagcaggaccgggacctgagccgcatcaccctggatgcccaggatgtgctggcccacctggtgcagatggccttcaagtacctggtgcactgcctgcagagcgagctgaacaactacatgcctgccttcctggatgatcctgaggagaacagcctgcagaggcccaagattgatgatgtgctgcacaccctgactggagccatgagcctgctgcggcgctgccgggtgaatgctgccctgaccatccagctgttcagccagctgttccacttcatcaacatgtggctgttcaaccggctggtgacagatcctgacagcggcctgtgcagccactactggggcgccatcatccggcagcagctgggccacatcgaggcctgggccgagaagcagggcctggagctggccgctgactgccacctgagccgcatcgtgcaggccaccaccctgctgaccatggacaagtatgccccagatgacatccccaacatcaacagcacctgcttcaagctgaacagcctgcagctgcaggccctgctgcagaactaccactgtgccccagatgagcccttcatccccacagacctgattgaaaatgtggtgacagtggctgaaaatacagcagatgagctggcccggagtgatggccgggaggtgcagctggaggaggaccctgacctgcagctgcccttcctgctgcctgaagatggctacagctgtgatgtggtgaggaacatccccaacggcctgcaggagttcctggaccccctgtgccagaggggcttctgccgcctcatcccccacaccaggagccctggcacctggaccatctactttgaaggagctgactatgagagccacctgctgagagaaaatacagagctggccatccccctgaggaaggagcctgagatcatcaccgtgaccctgaagaagcagaatggcatgggcctgagcatcgtggccgccaagggggccggccaggacaagctgggcatctacgtgaagtctgtggtgaagggcggcgctgctgatgatggccgcctggccgccggggaccagctgctgtctgtggatggccgcagcctggtgggcctgagccaggagagagctgctgagctgatgaccaggaccagctctgtggtgaccctggaggtggccaagcagggcgccatctaccacggcctggccaccctgctgaaccagcccagccccatgatgcagaggatcagtgacagaagaggcagcggcaagccccggcccaagtctgagggctttgagctgtacaacaacagcacccagaatggcagccctgagagcccccagctgccctgggccgagtacagcgagcccaagaagctgcctggagatgaccggctgatgaagaacagagctgaccacaggagcagccccaacgtggccaaccagccccccagccctgggggcaagagcgcctatgccagcggcaccacagccaagatcacctctgtgtccactggaaacctgtgcacagaggagcagaccccaccacccaggcctgaggcctaccccatccccacccagacctacacccgggagtacttcaccttccctgccagcaagagccaggacaggatggccccaccccagaaccagtggcccaactatgaggagaagccccacatgcacacagacagcaaccacagcagcatcgccatccagagggtgaccaggagccaggaggagctgcgggaggacaaggcctaccagctggagcggcacagaattgaagctgccatggacaggaagagtgacagcgacatgtggatcaaccagagcagcagcctggacagcagcaccagcagccaggagcacctgaaccacagcagcaagtctgtgaccccagccagcaccctgaccaagagcggccctggccgctggaagaccccagctgccatcccagccacccctgtggccgtgtcccagcccatcagaacagacctgcccccacctcctcctcctcctcctgtgcactacgccggggactttgatggcatgtccatggacctgcccctgcccccaccacccagcgccaaccagatcggcctgcccagcgcccaggtggccgctgctgagaggaggaagcgggaggagcaccagcgctggtatgagaaggagaaggcccggctggaggaggagcgggagaggaagagaagagagcaggagaggaagctgggccagatgaggacccagagcctgaacccagcccccttcagccccctgacagcccagcagatgaagccagagaagcccagcaccctgcagaggccccaggagaccgtcatccgggagctgcagccccagcagcagcccaggaccattgaaagaagagacctgcagtacatcaccgtgtccaaggaggagctgagcagcggggacagcctgagcccagacccctggaagagagatgccaaggagaagctggagaagcagcagcagatgcacatcgtggacatgctgagcaaggagatccaggagctgcagagcaagccagacagatctgctgaggagagtgaccggctgaggaagctgatgctggagtggcagttccagaagaggctgcaggagagcaagcagaaggatgaagatgatgaggaggaggaggatgatgatgtggacaccatgctgatcatgcagaggctggaggccgagcggcgggcccggctgcaggatgaggagcggcggcggcagcagcagctggaggagatgaggaagcgggaggccgaggaccgggcccggcaggaggaggagcggcggcggcaggaggaggagaggaccaagagagatgctgaggagaagaggcggcaggaggagggctactacagccggctggaggccgagcggcggcggcagcatgatgaggccgcccggcggctgctggagcctgaggcccctggccccaacagctacccaggcagcactggagctgctgtgggcgcccatgatgcctgcagagatgccaaggagaagaggagcaagagccaggatgctgacagccctggcagcagcggggcccctgagaacctgaccttcaaggagcggcagaggctcttcagccagggccaggatgtgagcaacaaggtgaaggccagcaggaagctgacagagctggagaatgagctgaacaccaagtag

SEQ ID NO: 160648 - DNA, 5475 bp, synthetic construct
  misc_feature 1..5475: note = Description of Artificial Sequence: Synthetic coding sequence
  source 1..5475: mol_type = other DNA
atgtctgctgggggcagagatgaggagaggaggaagctggccgacatcatccaccactggaatgccaaccggctggacctgtttgagatcagccagcccacagaggacctggagttccacggcgtgatgaggttctacttccaggacaaggccgccggcaactttgccaccaagtgcatccgggtgagcagcacagccaccacccaggacgtcatcgagaccctggccgagaagttccggccagacatgaggatgctgagcagccccaagtacagcctgtatgaggtgcacgtgtctggagagcggcggctggacattgatgagaagcccctggtggtgcagctgaactggaacaaggatgaccgggagggccgctttgtgctgaagaatgaaaatgatgccatcccccccaagaaggcccagagcaatggacctgagaagcaggagaaggagggcgtcatccagaacttcaagaggaccctgagcaagaaggagaagaaggagaagaagaagcgggagaaggaggccctgcggcaggccagtgacaaggatgaccggcccttccagggagaagatgtggagaacagccggctggccgctgaggtgtacaaggacatgcctgagaccagcttcaccaggaccatcagcaaccctgaggtggtgatgaagagaagacggcagcagaagctggagaagaggatgcaggagttccgcagcagtgatggccgcccagacagcggcggcaccctgcgcatctatgctgacagcctgaagcccaacatcccctacaagaccatcctgctgagcaccacagatcctgctgactttgctgtggccgaggccctggagaagtatggcctggagaaggagaaccccaaggactactgcatcgcccgggtgatgctgcccccaggggcccagcacagtgatgagaagggggccaaggagatcatcctggatgatgatgaatgtcccctgcagatcttccgggagtggcccagcgacaagggcatcctggtgttccagctgaagagaagacctccagaccacatccccaagaagaccaagaagcacctggagggcaagacccccaagggcaaggagcgggcagatggcagcggctacggcagcaccctgcccccagagaagctgccctacctggtggagctgagccctggaagaagaaaccactttgcctactacaactaccacacctatgaagatggcagtgacagccgggacaagcccaagctgtaccgcctgcagctgtctgtgacagaggtgggcacagagaagctggatgacaacagcatccagctgtttggacctggcatccagccccaccactgtgacctgaccaacatggatggagtggtgacagtgacccccaggtccatggatgctgagacctacgtggagggccagaggatcagcgagaccaccatgctgcagagcggcatgaaggtgcagtttggagccagccacgtgttcaagtttgtggaccccagccaggaccacgccctggccaagaggtctgtggatggcggcctgatggtgaagggccccaggcacaagccaggcatcgtgcaggagaccacctttgacctgggcggggacatccacagcggcacagccctgcccaccagcaagagcaccacccggctggacagcgacagagtgagcagcgccagcagcacagctgagcggggcatggtgaagcccatgatccgggtggagcagcagcctgactaccgccggcaggagagcaggacccaggatgccagcggccctgagctgatcctgcctgccagcattgagttccgggagagcagcgaggacagcttcctgagcgccatcatcaactacaccaacagcagcacagtgcacttcaagctgagccccacctacgtgctgtacatggcctgccgctacgtgctgagcaaccagtacagaccagacatcagccccacagagaggacccacaaggtgattgctgtggtgaacaagatggtgtccatgatggagggcgtcatccagaagcagaagaacattgctggggccctggccttctggatggccaatgccagcgagctgctgaacttcatcaagcaggaccgggacctgagccgcatcaccctggatgcccaggatgtgctggcccacctggtgcagatggccttcaagtacctggtgcactgcctgcagagcgagctgaacaactacatgcctgccttcctggatgatcctgaggagaacagcctgcagaggcccaagattgatgatgtgctgcacaccctgactggagccatgagcctgctgcggcgctgccgggtgaatgctgccctgaccatccagctgttcagccagctgttccacttcatcaacatgtggctgttcaaccggctggtgacagatcctgacagcggcctgtgcagccactactggggcgccatcatccggcagcagctgggccacatcgaggcctgggccgagaagcagggcctggagctggccgctgactgccacctgagccgcatcgtgcaggccaccaccctgctgaccatggacaagtatgccccagatgacatccccaacatcaacagcacctgcttcaagctgaacagcctgcagctgcaggccctgctgcagaactaccactgtgccccagatgagcccttcatccccacagacctgattgaaaatgtggtgacagtggctgaaaatacagcagatgagctggcccggagtgatggccgggaggtgcagctggaggaggaccctgacctgcagctgcccttcctgctgcctgaagatggctacagctgtgatgtggtgaggaacatccccaacggcctgcaggagttcctggaccccctgtgccagaggggcttctgccgcctcatcccccacaccaggagccctggcacctggaccatctactttgaaggagctgactatgagagccacctgctgagagaaaatacagagctggcccagcccctgaggaaggagcctgagatcatcaccgtgaccctgaagaagcagaatggcatgggcctgagcatcgtggccgccaagggggccggccaggacaagctgggcatctacgtgaagtctgtggtgaagggcggcgctgctgatgtggatggccgcctggccgccggggaccagctgctgtctgtggatggccgcagcctggtgggcctgagccaggagagagctgctgagctgatgaccaggaccagctctgtggtgaccctggaggtggccaagcagggcgccatctaccacggcctggccaccctgctgaaccagcccagccccatgatgcagaggatcagtgaccggcggggcagcggcaagccccggcccaagtctgagggctttgagctgtacaacaacagcacccagaatggcagccctgagagcccccagctgccctgggccgagtacagcgagcccaagaagctgcctggagatgaccggctgatgaagaacagagctgaccacaggagcagccccaacgtggccaaccagccccccagccctgggggcaagagcgcctatgccagcggcaccacagccaagatcacctctgtgtccacaggcaacctgtgcacagaggagcagaccccaccacccaggcctgaggcctaccccatccccacccagacctacacccgggagtacttcaccttccctgccagcaagagccaggacaggatggccccaccccagaaccagtggcccaactatgaggagaagccccacatgcacacagacagcaaccacagcagcatcgccatccagagggtgaccaggagccaggaggagctgcgggaggacaaggcctaccagctggagcggcaccgcatcgaggccgccatggacaggaagagtgacagcgacatgtggatcaaccagagcagcagcctggacagcagcaccagcagccaggagcacctgaaccacagcagcaagtctgtgaccccagccagcaccctgaccaagagcggccctggccgctggaagaccccagctgccatcccagccacccctgtggccgtgtcccagcccatcagaacagacctgcccccacctcctcctcctcctcctgtgcactacgccggggactttgatggcatgtccatggacctgcccctgcccccacctccttctgccaaccagatcggcctgcccagcgcccaggtggccgctgctgagaggaggaagcgggaggagcaccagcgctggtatgagaaggagaaggcccggctggaggaggagcgggagaggaagaggcgggagcaggagaggaagctgggccagatgaggacccagagcctgaacccagcccccttcagccccctgacagcccagcagatgaagccagagaagcccagcaccctgcagaggccccaggagaccgtcatccgggagctgcagccccagcagcagcccaggaccatcgagcggcgggacctgcagtacatcaccgtgtccaaggaggagctgagcagcggggacagcctgagcccagacccctggaagagagatgccaaggagaagctggagaagcagcagcagatgcacatcgtggacatgctgagcaaggagatccaggagctgcagagcaagccagacagatctgctgaggagagtgaccggctgaggaagctgatgctggagtggcagttccagaagaggctgcaggagagcaagcagaaggatgaagatgatgaggaggaggaggatgatgatgtggacaccatgctgatcatgcagaggctggaggccgagcggcgggcccggctgcaggatgaggagcggcggcggcagcagcagctggaggagatgaggaagcgggaggctgaagatcgggcccggcaggaggaggagcggcggcggcaggaggaggagaggaccaagagagatgctgaggagaagaggcggcaggaggagggctactacagccggctggaggccgagcggcggcggcagcatgatgaagctgcccggcggctgctggagcctgaggcccctggcctgtgccggccccccctgccccgggactatgagccccccagccccagccctgcccctggggcccctcctcctccaccccagagaaatgccagctacctgaagacccaggtgctgagcccagacagcctcttcaccgccaagtttgtggcctacaatgaggaggaggaggaggaggactgcagcctggccggccccaacagctacccaggcagcactggagctgctgtgggcgcccatgatgcctgcagagatgccaaggagaagaggagcaagagccaggatgctgacagccctggcagcagcggggcccctgagaacctgaccttcaaggagcggcagaggctcttcagccagggccaggatgtgagcaacaaggtgaaggccagcaggaagctgacagagctggagaatgagctgaacaccaagtag

SEQ ID NO: 160649 - DNA, 3282 bp, synthetic construct
  misc_feature 1..3282: note = Description of Artificial Sequence: Synthetic coding sequence
  source 1..3282: mol_type = other DNA
atgaaggagatggtgggcggctgctgcgtgtgcagtgatgagcggggctgggccgagaaccccctggtgtactgtgatggccacgcctgcagcgtggtggtgcaccaggcctgctatggaattgtgcaggtgcccaccggcccctggttctgcaggaaatgtgagagccaggagcgggccgcccgggtgcgctgtgagctgtgcccccacaaggatggagccctgaagaggacagacaatggaggctgggcccacgtggtgtgtgccctgtacatccctgaggtgcagtttgccaacgtgctgaccatggagcccatcgtgctgcagtatgtgccccatgaccgcttcaacaagacctgctacatctgtgaggagcagggccgggagagcaaggccgccagcggggcctgcatgacctgcaacagacatggctgccggcaggccttccacgtgacctgtgcccagatggccggcctgctgtgtgaggaggaggtgctggaggtggacaacgtgaagtactgcggctactgcaagtaccacttcagcaagatgaagaccagccgccacagcagcggcggcggcggcggcggggccggcggcggcggcggctccatgggcggcggcggcagcggcttcatcagcggccgccgcagccgcagcgccagccccagcacccagcaggagaagcaccccacccaccacgagcggggccagaagaagagcaggaaggacaaggagcggctgaagcagaagcacaagaagaggcctgagagccccccatccatcctgaccccacctgtggtgcccacagctgacaaggtgagcagcagcgccagcagcagcagccaccacgaggccagcacccaggagaccagcgagagcagccgggagagcaagggcaagaagagcagcagccacagcctgagccacaagggcaagaagctgagcagtggaaaaggagtgtcctccttcaccagcgccagcagcagcagcagcagcagcagcagcagcagcggcggccccttccagcctgctgtgagcagcctgcagagcagcccagacttcagcgccttccccaagctggagcagcctgaggaggacaagtacagcaagcccacagccccagcccccagcgccccacccagccccagcgcccctgagccccccaaggctgacctgtttgagcagaaggtggtgttttctggcttcggccccatcatgaggttcagcaccaccaccagcagcagcggccgggcccgggcccccagccctggggactacaagagcccccacgtgactggaagtggggccagcgctggcacccacaagaggatgcctgccctgagcgccacccctgtgcctgcagatgagaccccagagaccggcctgaaggagaagaagcacaaggccagcaagaggagccgccacggccctggccggcccaagggcagcaggaacaaggagggcaccggcggccctgctgcccccagcctgcccagcgcccagctggccggcttcaccgccacagctgccagccccttcagcggcggcagcctggtgagcagcggcctgggcggcctgagcagcaggaccttcggccccagcggcagcctgcccagcctgagcctggagagccccctgctgggcgccggcatctacaccagcaacaaggaccccatcagccacagcggcggcatgctgcgggctgtgtgcagcacccccctgagcagcagcctgctgggccccccaggcaccagcgccctgccccggctgagccgcagccccttcaccagcaccctgcccagcagcagcgccagcatcagcaccacccaggtgttcagcctggccggcagcaccttcagcctgcccagcacccacatcttcggcacccccatgggcgctgtgaaccccctgctgagccaggccgagagcagccacacagagccagacctggaggactgcagcttccgctgccggggcaccagcccccaggagagcctgagctccatgagccccatcagcagcctgcctgccctgtttgaccagacagccagcgccccctgtggcggcggccagctggaccctgctgcccctggcaccaccaacatggagcagctgctggagaagcagggagatggagaggccggcgtgaacatcgtggagatgctgaaggccctgcacgccctgcagaaggagaaccagaggctgcaggagcagatcctgagcctgacagccaagaaggagcggctgcagatcctgaatgtgcagctgtctgtgcccttccctgccctgcctgctgccctgcctgctgccaacggccctgtgcccggcccctacggcctgcccccccaggccggcagcagtgacagcctgagcaccagcaagagccccccaggcaagagcagcctgggcctggacaacagcctgagcaccagcagcgaggacccccacagcggctgccccagccgcagcagcagcagcctgtccttccacagcaccccaccacccctgcccctgctgcagcagagccctgccaccctgcccctggccctgcccggggccccagcccccctgcccccccagccccagaatggcctgggccgggcccctggagctgctggcctgggcgccatgcccatggccgagggcctgctgggcggcctggccggcagcggcggcctgcccctgaatggcctgctgggcggcctgaatggagctgctgcccccaacccagccagcctgagccaggccggcggggcccccaccctgcagctgcccggctgcctgaacagcctgacagagcagcagaggcacctgctgcagcagcaggagcagcagctgcagcagctgcagcagctgctggccagcccccagctgaccccagagcaccagacagtggtgtaccagatgatccagcagatccagcagaagcgggagctgcagaggctgcagatggccggcggcagccagctgcccatggccagcctgctggccggcagcagcacccccctgctgtctgctggcaccccaggcctgctgcccacagccagcgccccacccctgctgcctgctggggccctggtggcccccagcctgggcaacaacaccagcctgatggctgctgctgctgctgctgctgctgtggccgctgctgggggcccccctgtgctgacagcccagaccaaccccttcctgagcctgagcggggctgagggcagcggcggcggccccaagggcggcacagctgacaagggggccagcgccaaccaggagaagggctag

SEQ ID NO: 160650 - DNA, 978 bp, synthetic construct
  misc_feature 1..978: note = Description of Artificial Sequence: Synthetic coding sequence
  source 1..978: mol_type = other DNA
atgaaggagatggtgggcggctgctgcgtgtgcagtgatgagcggggctgggccgagaaccccctggtgtactgtgatggccacgcctgcagcgtggtggtgcaccaggcctgctatggaattgtgcaggtgcccaccggcccctggttctgcaggaaatgtgagagccaggagcgggccgcccgggtgcgctgtgagctgtgcccccacaaggatggagccctgaagaggacagacaatggaggctgggcccacgtggtgtgtgccctgtacatccctgaggtgcagtttgccaacgtgctgaccatggagcccatcgtgctgcagtatgtgccccatgaccgcttcaacaagacctgctacatctgtgaggagcagggccgggagagcaaggccgccagcggggcctgcatgacctgcaacagacatggctgccggcaggccttccacgtgacctgtgcccagatggccggcctgctgtgtgaggaggaggtgctggaggtggacaacgtgaagtactgcggctactgcaagtaccacttcagcaagatgaagaccagccgccacagcagcggcggcggcggcggcggggccggcggcggcggcggctccatgggcggcggcggcagcggcttcatcagcggccgccgcagccgcagcgccagccccagcacccagcaggagaagcaccccacccaccacgagcggggccagaagaagagcaggaaggacaaggagcggctgaagcagaagcacaagaagaggcctgagagccccccatccatcctgaccccacctgtggtgcccacagctgacaagccccggcggggccaccagagccccaccaaccacggcatcggcagcctgggctgctgcctgcctgacacccccatctgcctgtgcccagagggcctgagccctggcctgctgtctgctgagagcggcggccgccacagcggcctgctgagcaagttctag

SEQ ID NO: 160651 - DNA, 16614 bp, synthetic construct
  misc_feature 1..16614: note = Description of Artificial Sequence: Synthetic coding sequence
  source 1..16614: mol_type = other DNA
atggacagccagaagctggccggggaggacaaggacagcgagcctgctgctgatggccctgctgccagcgaggaccccagcgccacagaaagtgacctgcccaacccccacgtgggggaggtgtctgtgctgagcagcggcagcccccggctgcaggagaccccccaggactgcagcggcggccctgtgcggcgctgtgccctgtgcaactgtggggagcccagcctgcacggccagcgggagctgcggagatttgagctgccctttgactggccccgctgccctgtggtgtccccaggcggcagccctggccccaatgaggccgtgctgcccagcgaggacctgagccagatcggcttccctgagggcctgaccccagcccacctgggggagcccggcggcagctgctgggcccaccactggtgtgccgcctggagcgctggggtgtggggccaggagggccctgagctgtgtggggtggacaaggccatcttcagcggcatcagccagcgctgcagccactgcacccggctgggcgccagcatcccctgccgcagccctggctgcccccggctgtaccacttcccctgtgccacagccagcggcagcttcctgtccatgaagaccctgcagctgctgtgcccagagcacagcgagggcgccgcctacctggaggaggcccgctgtgctgtgtgtgagggccctggagagctgtgtgacctcttcttctgcaccagctgtggccaccactaccacggggcctgcctggacacagccctgacagccaggaagagagctggctggcagtgcccagagtgcaaggtgtgccaggcctgcaggaagccaggaaatgacagcaagatgctggtgtgtgagacctgtgacaagggctaccacaccttctgcctgaagccacccatggaggagctgcctgcccacagctggaagtgcaaggcctgccgggtgtgccgggcctgtggggccggcagcgctgagctgaaccccaacagcgagtggtttgagaactacagcctgtgccaccgctgccacaaggcccagggcggccagaccatccgctctgtggccgagcagcacacccctgtgtgcagccgcttcagccccccagagcccggggacacccccacagatgagccagatgccctgtatgtggcctgccagggccagcccaagggcggccacgtgacctccatgcagcccaaggagcccggccccctgcagtgtgaggccaagcccctgggcaaggccggcgtgcagctggagccccagctggaggcccccctgaatgaggagatgcccctgctgcccccacctgaggagagccccctgagccccccacctgaggagagccccaccagccccccacctgaggccagccggctgagccccccacctgaggagctgcctgccagccccctgcctgaggccctgcacctgagccggcccctggaggagagccccctgagccccccacctgaggagagccccctgagccccccacctgagagcagccccttcagccccctggaggagagccccctgagccccccagaggagagcccccccagccctgccctggagacccccctgagccccccacctgaggccagccccctgagccccccatttgaggagagccccctgagccccccacctgaggagctgcccaccagccccccacctgaggccagccggctgagccccccacctgaggagagccccatgagccccccacctgaggagagccccatgagccccccacctgaggccagccgcctcttccccccatttgaggagagccccctgagccccccacctgaggagagccccctgagccccccacctgaggccagccggctgagccccccacctgaggacagccccatgagccccccacctgaggagagccccatgagccccccacctgaggtgtcccggctgagccccctgcctgtggtgtcccggctgagccccccacctgaggagagccccctgagccccccacctgaggagagccccaccagccccccacctgaggccagccggctgagccccccacctgaggacagccccaccagccccccacctgaggacagccctgccagccccccacctgaggacagcctgatgagcctgcccctggaggagagccccctgctgcccctgcctgaggagccccagctgtgccccaggtctgagggcccccacctgagccccaggcctgaggagccccacctgagccccaggcctgaggagccccacctgagcccccaggccgaggagccccacctgagcccccagcctgaggagccctgcctgtgtgctgtgcctgaggagccccacctgagcccccaggccgagggcccccacctgagcccccagcctgaggagctgcacctgagcccccagacagaggagccccacctgagccctgtgcctgaggagccctgcctgagcccccagcctgaggagagccacctgagcccccagagcgaggagccctgcctgagccccaggcctgaggagagccacctgagccctgagctggagaagccacccctgagccccaggcctgagaagcccccagaggagcccggccagtgcccagcccctgaggagctgcccctcttccccccacctggagagcccagcctgagccccctgctgggggagcccgccctgtctgagcctggagagccccccctgagccccctgcctgaggagctgcccctgagccccagcggggagcccagcctgagcccccagctgatgcccccagaccccctgcccccacccctgagccccatcatcacagctgctgcccccccagccctgagccccctgggggagctggagtacccctttggagccaagggggacagcgaccctgagagccccctggccgcccccatcctggagacccccatcagccccccacctgaggccaactgcacagatcctgagcctgtgccccccatgatcctgccccccagccctggcagccctgtgggccctgccagccccatcctgatggagcccctgcccccccagtgcagccccctgctgcagcacagcctggtgccccagaacagcccccccagccagtgcagccccccagccctgcccctgtctgtgcccagccccctgagccccatcggcaaggtggtgggcgtgtctgatgaggccgagctgcacgagatggagacagagaaggtgtctgagcctgagtgcccagccctggagcccagcgccaccagccccctgcccagccccatgggagacctgagctgcccagcccccagccctgccccagccctggatgacttcagcggcctgggggaggacacagcccccctggatggcattgatgcccctggcagccagcctgagcccggccagaccccaggcagcctggccagcgagctgaagggcagccctgtgctgctggaccctgaggagctggcccctgtgacccccatggaggtgtacccagagtgcaagcagacagctggccagggcagcccctgtgaggagcaggaggagccccgggcccctgtggcccccaccccacccaccctcatcaagagtgacatcgtgaatgagatcagcaacctgagccagggagatgccagcgccagcttccctggcagcgagcccctgctgggcagcccagaccctgagggcggcggcagcctgtccatggagctgggcgtgtccacagatgtgtccccagccagagatgagggcagcctgcggctgtgcacagacagcctgcctgagacagatgacagcctgctgtgtgatgctggaacagccatcagcggcggcaaggccgagggggagaagggcagaagaagaagcagccctgcccggagccgcatcaagcagggccgcagcagcagcttccctggaagaagaagaccccggggcggggcccatggaggccggggccggggccgggcccggctgaagagcacagccagcagcattgagaccctggtggtggccgacatcgacagcagccccagcaaggaggaggaggaggaggatgatgacaccatgcagaacacagtggtgctcttcagcaacacagacaagtttgtgctgatgcaggacatgtgtgtggtgtgtggcagctttggccgcggggctgagggccacctgctggcctgcagccagtgcagccagtgctaccacccctactgtgtgaacagcaagatcaccaaggtgatgctgctgaagggctggaggtgtgtggagtgcatcgtgtgtgaggtgtgtggccaggccagtgaccccagccggctgctgctgtgtgatgactgtgacatctcctaccacacctactgcctggacccccccctgctgactgtgcccaagggcggctggaagtgcaagtggtgtgtgtcctgcatgcagtgtggggccgccagccctggcttccactgtgagtggcagaacagctacacccactgcggcccctgtgccagcctggtgacctgccccatctgccacgccccctacgtggaggaggacctgctgatccagtgccgccactgtgagcgctggatgcacgccggctgtgagagcctcttcacagaagatgatgtggagcaggccgcagatgagggctttgactgtgtgtcctgccagccctacgtggtgaagcctgtggcccctgtggcccctcctgagctggtgcccatgaaggtgaaggagcctgagccccagtacttccgctttgaaggagtgtggctgacagaaacaggcatggccctgctgaggaacctgaccatgagccccctgcacaagaggcggcagaggcggggccgcctgggcctgcctggagaggccggcctggagggcagcgagcccagtgatgccctgggcccagatgacaagaaggatggagacctggacacagatgagctgctgaagggggagggcggcgtggagcacatggagtgtgagatcaagctggagggccctgtgtccccagatgtggagcccgggaaggaggagacagaggagagcaagaagaggaagaggaagccctaccggcccggcatcggcggcttcatggtgcggcagaggaagagccacaccaggaccaagaagggccctgctgcccaggccgaggtgctgtctggagatggccagccagatgaggtgatcccagctgacctgcctgctgagggcgctgtggagcagagcctggccgagggagatgagaagaagaagcagcagaggcggggcaggaagaagagcaagctggaggacatgtttcctgcctacctgcaggaggccttcttcggcaaggagctgctggacctgagcaggaaggccctgtttgctgtgggcgtgggccggcccagctttggcctgggcacccccaaggccaagggagatggcggcagcgagaggaaggagctgcccaccagccagaagggagatgatggccctgacattgctgatgaggagagccggggcctggagggcaaggctgacaccccaggcccagaagatggcggcgtgaaggccagccctgtgcccagcgaccctgagaagccaggcaccccaggagagggcatgctgagcagtgacctggaccgcatcagcacagaggagctgcccaagatggagagcaaggacctgcagcagctgttcaaggatgtgctgggcagcgagcgggagcagcacctgggctgcggcaccccaggcctggagggcagcaggacccccctgcagaggcccttcctgcagggcggcctgcccctgggcaacctgcccagcagcagccccatggacagctacccaggcctgtgccagagccccttcctggacagccgggagcggggcggcttcttcagccctgagcccggggagccagacagcccctggacaggcagcggcggcaccacccccagcacccccaccacccccaccacagaaggagaaggagatggcctgagctacaaccagaggagcctgcagcgctgggagaaggatgaggagctgggccagctgagcaccatcagccctgtgctgtatgccaacatcaacttccccaacctgaagcaggactacccagactggagcagccgctgcaagcagatcatgaagctgtggaggaaggtgcctgctgctgacaaggccccctacctgcagaaggccaaggacaacagagctgcccaccgcatcaacaaggtgcagaagcaggccgagagccagatcaacaagcagaccaaggtgggggacatcgccaggaagacagacaggcctgccctgcacctgcgcatccccccccagcccggggccctgggcagccccccacctgctgctgcccccaccatcttcatcggcagccccaccaccccagctggcctgagcaccagcgcagatggcttcctgaagcccccagctggctctgtgcccggccctgacagccctggagagctgttcctgaagctgcccccccaggtgcctgcccaggtgcccagccaggaccccttcggcctggccccagcctaccccctggagccccgcttccccacagccccacccacctacccaccctaccccagccccactggagccccagcccagccccccatgctgggcgccagcagcaggcctggggccggccagcctggagagttccacaccaccccacctggcacccccaggcaccagcccagcaccccagaccccttcctgaagccccgctgccccagcctggacaacctggccgtgcctgagagccctggggtgggcggcggcaaggccagcgagcccctgctgagccccccaccatttggagagagcaggaaggccctggaggtgaagaaggaggagctgggcgccagcagccccagctatggcccccccaacctgggctttgtggacagccccagcagcggcacccacctgggcggcctggagctgaagaccccagatgtgttcaaggcccccctgaccccccgggccagccaggtggagccccagagccctggcctgggcctgcggccccaggagcccccaccagcccaggccctggcccccagcccccccagccacccagacatcttccggcccggcagctacacagacccctatgcccagccccccctgaccccccggccccagcccccacctcctgagagctgctgtgccctgcccccaagaagcctgcccagcgaccccttcagccgggtgcctgccagcccccagagccagagcagcagccagagccccctgaccccccggcccctgtctgctgaggccttctgccccagccctgtgaccccccgcttccagagcccagacccctacagcaggcctcccagccggccccagagccgggacccctttgcccccctgcacaagccaccccggccccagcccccagaggtggccttcaaggccggcagcctggcccacaccagcctgggcgccggcggcttccctgctgccctgcctgctggccctgctggggagctgcacgccaaggtgcccagcggccagccccccaactttgtgcgcagccctggcaccggggcctttgtgggcacccccagccccatgaggttcaccttcccccaggccgtgggggagcccagcctgaagccccctgtgccccagcccggcctgcccccaccccacggcatcaacagccacttcggccctggccccaccctgggcaagccccagagcaccaactacacagtggccaccggcaacttccaccccagcggcagccccctgggccccagcagcggcagcactggagagagctatggcctgagccccctgcggccccccagcgtgctgcccccaccagccccagatggcagcctgccctacctgagccacggggccagccagaggagcggcatcaccagccctgtggagaagcgggaggaccccggcaccggcatgggcagcagcctggccacagctgagctgcccggcacccaggaccccggcatgagcggcctgagccagacagagctggagaagcagaggcagaggcagaggctgcgggagctgctgatccggcagcagatccagaggaacaccctgcggcaggagaaggagacagctgctgctgctgctggagctgtgggccccccaggctcctggggcgctgagcccagcagccctgcctttgagcagctgagccggggccagaccccatttgctggcacccaggacaagagcagcctggtgggcctgccccccagcaagctgagcggccccatcctgggccctggcagcttccccagtgatgaccggctgagcaggcctcctcctccagccacccccagctccatggatgtgaacagccggcagctggtgggcggcagccaggccttctaccagagggccccctacccaggcagcctgcccctgcagcagcagcagcagcagctgtggcagcagcagcaggccacagctgccacctccatgagatttgccatgtctgcccgcttccccagcaccccaggccctgagctgggccggcaggccctgggcagccccctggccggcatcagcacccggctgcccggccctggagagcctgtgcccggccctgctggccctgcccagttcatcgagctgcggcacaacgtgcagaagggcctgggccctgggggcacccccttccctggccagggccccccccagaggccccgcttctaccctgtgtctgaggacccccaccggctggcccctgagggcctgcggggcctggccgtgtctggcctgcccccccagaagcccagcgcccccccagcccctgagctgaacaacagcctgcaccccaccccccacaccaagggccccaccctgcccaccggcctggagctggtgaacagaccacccagcagcacagagctgggccggcccaaccccctggccctggaggccggcaagctgccctgtgaagatcctgagctggatgatgactttgatgcccacaaggccctggaggatgatgaggagctggcccacctgggcctgggcgtggatgtggccaagggagatgatgagctgggcaccctggagaacctggagaccaatgacccccacctggatgacctgctgaatggagatgaatttgacctgctggcctacacagatcctgagctggacacaggagacaagaaggacatcttcaatgagcacctgcggctggtggagagcgccaatgagaaggccgagcgggaggccctgctgcggggcgtggagcccggccccctgggccctgaggagcggcccccacctgctgctgatgccagcgagccccggctggcctctgtgctgcctgaggtgaagcccaaggtggaggagggcggccgccaccccagcccctgccagttcaccatcgccacccccaaggtggagcccgccccagctgccaacagcctgggcctgggcctgaagccaggccagagcatgatgggcagccgggacaccaggatgggcaccggccccttcagcagcagcggccacacagctgagaaggccagctttggagccaccggcggccccccagcccacctgctgacccccagccccctgagcggccctgggggcagcagcctgctggagaagtttgagctggagagcggggccctgaccctgcccggcggccctgctgccagcggagatgagctggacaagatggagagcagcctggtggccagcgagctgcccctgctgattgaggacctgctggagcacgagaagaaggagctgcagaagaagcagcagctgagcgcccagctgcagcctgcccagcagcagcagcagcagcagcagcagcacagcctgctgagcgcccctggccctgcccaggccatgagcctgccccatgagggcagcagccccagcctggccggcagccagcagcagctgagcctgggcctggccggggcccggcagcccggcctgccccagcccctgatgcccacccagcccccagcccacgccctgcagcagaggctggcccccagcatggccatggtgagcaaccagggccacatgctgagcggccagcacggcggccaggccggcctggtgccccagcagagcagccagcctgtgctgagccagaagcccatgggcaccatgccacccagcatgtgcatgaagccccagcagctggccatgcagcagcagctggccaacagcttcttcccagacacagacctggacaagtttgctgctgaggacatcatcgaccccatcgccaaggccaagatggtggccctgaagggcatcaagaaggtgatggcccagggcagcattggagtggcccctggcatgaaccggcagcaggtgtccctgctggcccagaggctgagcggcggccccagcagtgacctgcagaaccacgtggccgccggcagcggccaggagaggtctgctggggaccccagccagccccggcccaacccccccacctttgcccagggcgtcatcaatgaagctgaccagaggcagtatgaggagtggctgttccacacccagcagctgctgcagatgcagctgaaggtgctggaggagcagatcggcgtgcacaggaagagcaggaaggccctgtgtgccaagcagaggacagccaagaaggccggccgggagttccctgaggctgatgctgagaagctgaagctggtgacagagcagcagagcaagatccagaagcagctggaccaggtgaggaagcagcagaaggagcacaccaacctgatggccgagtacagaaacaagcagcagcagcagcagcagcagcagcagcagcagcagcagcagcacagcgctgtgctggccctgagccccagccagagcccccggctgctgaccaagctgcccggccagctgctgcccggccacggcctgcagcccccccagggccccccaggcggccaggccggcggcctgcggctgaccccaggcggcatggccctgcccggccagcccggcggccccttcctgaacacagccctggcccagcagcagcagcagcagcacagcggcggggccggcagcctggccggccccagcggcggcttcttccctggcaacctggccctgcggagcctgggccctgacagccggctgctgcaggagcggcagctgcagctgcagcagcagaggatgcagctggcccagaagctgcagcagcagcagcagcagcagcagcagcagcagcacctgctgggccaggtggccatccagcagcagcagcagcagggccctggggtgcagaccaaccaggccctgggccccaagccccagggcctgatgccacccagcagccaccagggcctgctggtgcagcagctgagcccccagcccccccagggcccccagggcatgctgggccctgcccaggtggccgtgctgcagcagcagcaccctggggccctgggcccccagggcccccaccggcaggtgctgatgacccagagccgggtgctgagcagcccccagctggcccagcagggccagggcctgatgggccaccggctggtgacagcccagcagcagcagcagcagcagcagcaccagcagcagggctccatggccggcctgagccacctgcagcagagcctgatgagccacagcggccagcccaagctgagcgcccagcccatgggcagcctgcagcagctgcagcagcagcagcagctgcagcagcagcagcagctgcagcagcagcagcagcagcagctgcagcagcagcagcagctgcagcagcagcagctgcagcagcagcagcagcagcagcagctgcagcagcagcagcagcagcagctgcagcagcagcagcagcagctgcagcagcagcagcagcagcagcagcagcagttccagcagcagcagcagcagcagcagatgggcctgctgaaccagagcaggaccctgctgagcccccagcagcagcagcagcagcaggtggccctgggccctggcatgcctgccaagcccctgcagcacttcagcagccctggggccctgggccccaccctgctgctgaccgggaaggagcagaacacagtggaccctgctgtgtcctctgaggccacagagggccccagcacccaccagggcggccccctggccatcggcaccaccccagagagcatggccacagagcccggggaggtgaagcccagcctgagcggggacagccagctgctgctggtgcagccccagccccagccccagcccagcagcctgcagctgcagccccccctgcggctgcccggccagcagcagcagcaggtgtccctgctgcacacagctgggggcggcagccacggccagctgggcagcggcagcagcagcgaggccagctctgtgccccacctgctggcccagcccagcgtgtccctgggggaccagcccggctccatgacccagaacctgctgggcccccagcagcccatgctggagcggcccatgcagaacaacacaggcccccagccccccaagccaggccctgtgctgcagagcggccagggcctgcccggggtgggcatcatgcccaccgtgggccagctgcgggcccagctgcagggcgtgctggccaagaacccccagctgcggcacctgagcccccagcagcagcagcagctgcaggccctgctgatgcagaggcagctgcagcagagccaggccgtgcggcagaccccaccctaccaggagcccggcacccagaccagccccctgcagggcctgctgggctgccagccccagctgggcggcttccctggcccccagacaggccccctgcaggagctgggcgccggcccccggccccagggccccccccggctgcctgcccctcctggggccctgagcacaggccctgtgctgggccctgtgcaccccaccccaccacccagcagcccccaggagcccaagaggcccagccagctgcccagccccagcagccagctgcccacagaggcccagctgccccccacccaccctggcacccccaagccccagggccccaccctggagcccccacctggccgggtgtccccagctgctgcccagctggccgacaccctcttcagcaagggcctgggcccctgggaccccccagacaacctggccgagacccagaagccagagcagagcagcctggtgcccggccacctggaccaggtgaatggccaggtggtgcctgaggccagccagctgagcatcaagcaggagccccgggaggagccctgtgccctgggcgcccagagcgtgaagcgggaggccaacggggagcccatcggggcccctggcaccagcaaccacctgctgctggccggccccaggtctgaggccggccacctgctgctgcagaagctgctgcgggccaagaatgtgcagctgagcacaggccggggcagcgagggcctgcgggcagagatcaatggccacatcgacagcaagctggccggcctggagcagaagctgcagggcacccccagcaacaaggaggatgctgctgccaggaagcccctgacccccaagcccaagagggtgcagaaggccagtgaccggctggtgagcagcaggaagaagctgaggaaggaggatggagtgcgggccagcgaggccctgctgaagcagctgaagcaggagctgagcctgctgcccctgacagagcccgccatcacagccaacttcagcctgtttgccccctttggaagtggctgccctgtgaatggccagagccagctgcggggggcctttggaagtggggccctgcccaccggccctgactactacagccagctgctgaccaagaacaacctgagcaacccccccaccccacccagcagcctgccccccaccccacctccttctgtgcagcagaagatggtgaatggagtgaccccatctgaggagctgggggagcaccccaaggatgctgccagcgcccgggacagcgagcgggccctgcgggacaccagcgaggtgaagagcctggacctgctggccgccctgcccaccccaccccacaaccagacagaagatgtgaggatggagagtgatgaagattctgacagcccagacagcatcgtgcctgccagcagccctgagagcatcctgggggaggaggccccccgcttcccccacctgggcagcggccgctgggagcaggaggaccgggccctgagccctgtgatccccctcatcccccgggccagcatccctgtgtttcctgacaccaagccctacggggccctgggcctggaggtgcctgggaagctgcctgtgaccacctgggagaagggcaagggcagcgaggtgtctgtgatgctgactgtgtctgctgctgctgccaagaacctgaatggagtgatggtggccgtggccgagctgctgtccatgaagatccccaacagctatgaggtgctcttccctgagagccctgcccgggccggcacagagcccaagaagggggaggccgagggccctgggggcaaggagaagggcctggagggcaagagcccagacaccggccctgactggctgaagcagtttgatgctgtgctgcccggctacaccctgaagagccagctggacatcctgagcctgctgaagcaggagagccctgcccctgagccccccacccagcacagctacacctacaacgtgagcaacctggatgtgcggcagctgagcgcccctcctcctgaggagcccagccccccacccagccccctggcccccagccctgccagccccccaacagagcccctggtggagctgcccacagagcccctggccgagccccctgtgcccagccccctgcccctggccagcagccctgagagcgcccggcccaagccccgggcccggcccccagaggagggggaggacagccggcccccccggctgaagaagtggaagggcgtgcgctggaagaggctgcggctgctgctgaccatccagaagggcagcggccggcaggaggatgagcgggaggtggccgagttcatggagcagctgggcacagccctgcggccagacaaggtgccccgggacatgaggcgctgctgcttctgccacgaggagggagatggagccacagatggccctgcccggctgctgaacctggacctggacctgtgggtgcacctgaactgtgccctgtggagcacagaggtgtatgagacccagggcggggccctgatgaatgtggaggtggccctgcaccggggcctgctgaccaagtgcagcctgtgccagaggactggagccaccagcagctgcaacaggatgcgctgccccaacgtgtaccactttgcctgtgccatccgggccaagtgcatgttcttcaaggacaagaccatgctgtgccccatgcacaagatcaagggcccctgtgagcaggagctgagcagctttgctgtgttcagaagagtgtacatcgagagagatgaggtgaagcagatcgccagcatcatccagagaggagagcggctgcacatgttccgggtgggcggcctggtgttccacgccatcggccagctgctgccccaccagatggctgacttccacagcgccacagccctgtaccctgtgggctatgaggccacccgcatctactggagcctgcggaccaacaacagacgctgctgctaccgctgcagcatcggggagaacaacggccggcctgagtttgtgatcaaggtgattgagcagggcctggaggacctggtgttcacagatgccagcccccaggccgtgtggaaccgcatcatcgagcctgtggccgccatgaggaaggaggccgacatgctgcggctcttccctgagtacctgaagggggaggagctgtttggcctgactgtgcatgctgtgctgagaattgctgagagcctgcccggggtggagagctgccagaactacctgttccgctatggccgccaccccctgatggagctgcccctgatgatcaaccccaccggctgtgcccggtctgagcccaagatcctgacccactacaagaggccccacaccctgaacagcacctccatgagcaaggcctaccagagcaccttcaccggggagaccaacaccccctacagcaagcagtttgtgcacagcaagagcagccagtacagaaggctgaggacagagtggaagaacaacgtgtacctggcccggagccgcatccagggcctgggcctgtatgctgccaaggacctggagaagcacaccatggtgattgagtacatcggcaccatcatcagaaatgaggtggccaacagaagagagaagatctatgaggagcagaacagaggcatctacatgttccgcatcaacaatgaacatgtgattgatgccaccctgaccggcggccctgcccgctacatcaaccacagctgtgcccccaactgtgtggccgaggtggtgacctttgacaaggaggacaagatcatcatcatcagcagccgccgcatccccaagggggaggagctgacctatgactaccagtttgattttgaagatgaccagcacaagatcccctgccactgtggggcctggaactgcaggaagtggatgaactag

SEQ ID NO: 160652 - DNA, 441 bp, synthetic construct
  misc_feature 1..441: note = Description of Artificial Sequence: Synthetic coding sequence
  source 1..441: mol_type = other DNA
atggacagccagaagctggccggggaggacaaggacagcgagcctgctgctgatggccctgctgccagcgaggaccccagcgccacagaaagtgacctgcccaacccccacgtgggggaggtgtctgtgctgagcagcggcagcccccggctgcaggagaccccccaggactgcagcggcggccctgtgcggcgctgtgccctgtgcaactgtggggagcccagcctgcacggccagcgggagctgcggagatttgagctgccctttgactggccccgctgccctgtggtgtccccaggcggcagccctggccccaatgaggccgtgctgcccagcgaggacctgagccagatcggcttccctgagggcctgaccccagcccacctgggggagcccggcggcagctgctgggcccaccactggtgtgccgcctggagctag

SEQ ID NO: 160653 - DNA, 14736 bp, synthetic construct
  misc_feature 1..14736: note = Description of Artificial Sequence: Synthetic coding sequence
  source 1..14736: mol_type = other DNA
atgagcagcgaggaggacaagtctgtggagcagccccagcccccacctcctcctcctgaggagcccggggccccagcccccagccctgctgctgctgacaagaggccccggggccggcccaggaaggatggagccagccccttccagagggccaggaagaagcccaggagccggggcaagacagctgtggaggatgaggacagcatggatggcctggagaccacagaaacagagaccatcgtggagacagagatcaaggagcagagcgctgaggaggatgctgaggccgaggtggacaacagcaagcagctgatccccaccctgcagaggtctgtgtctgaggagagcgccaacagcctggtgtctgtgggcgtggaggccaagatcagcgagcagctgtgtgccttctgctactgtggggagaagagcagcctgggccagggcgacctgaagcagttccgcatcaccccaggcttcatcctgccctggaggaaccagcccagcaacaagaaggacattgatgacaacagcaatggcacctatgagaagatgcagaacagcgcccccaggaagcagaggggccagaggaaggagaggagcccccagcagaacatcgtgtcctgtgtgtctgtgtccacccagacagccagtgatgaccaggccggcaagctgtgggatgagctgagcctggtgggcctgcctgatgccatcgacatccaggccctgtttgacagcacaggcacctgctgggcccaccaccgctgtgtggagtggagcctgggcgtgtgccagatggaggagcccctgctggtgaatgtggacaaggctgtggtgtctggcagcacagagcgctgtgccttctgcaagcacctgggcgccaccatcaagtgctgtgaggagaagtgcacccagatgtaccactacccctgtgccgccggggccggcaccttccaggacttcagccacatcttcctgctgtgcccagagcacatcgaccaggcccctgagaggagcaaggaggatgccaactgtgctgtgtgtgacagccctggggacctgctggaccagttcttctgcaccacctgtggccagcactaccacggcatgtgcctggacattgctgtgacccccctgaagagagctggctggcagtgcccagagtgcaaggtgtgccagaactgcaagcagagcggggaggacagcaagatgctggtgtgtgacacctgtgacaagggctaccacaccttctgcctgcagcctgtgatgaagtctgtgcccaccaacggctggaagtgcaagaactgccgcatctgcattgaatgtggcaccaggagcagcagccagtggcaccacaactgcctgatctgtgacaactgctaccagcagcaggacaacctgtgccccttctgtgggaagtgctaccaccctgagctgcagaaggacatgctgcactgcaacatgtgcaagcgctgggtgcacctggagtgtgacaagcccacagaccacgagctggacacccagctgaaggaggagtacatctgcatgtactgcaagcacctgggcgctgagatggaccggctgcagcctggagaggaggtggagattgctgagctgaccacagactacaacaatgagatggaggtggagggccctgaggaccagatggtgttcagcgagcaggccgccaacaaggatgtgaatggccaggagagcaccccaggcatcgtgcctgatgctgtgcaggtgcacacagaggagcagcagaagagccaccccagcgagagcctggacacagacagcctgctgattgctgtgagcagccagcacacagtgaacacagagctggagaagcagatcagcaatgaggtggacagcgaggacctgaagatgagcagcgaggtgaagcacatctgtggggaggaccagatcgaggacaagatggaggtgacagaaaatattgaggtggtgacccaccagatcaccgtgcagcaggagcagctgcagctgctggaggagcctgagaccgtggtgtcccgggaggagagccggccccccaagctggtgatggagagcgtgaccctgcccctggagaccctggtgagcccccatgaggagagcatcagcctgtgcccagaggagcagctggtgattgagcggctgcagggcgagaaggagcagaaggagaacagcgagctgagcacaggcctgatggattctgagatgacccccaccatcgagggctgtgtgaaggatgtgtcctaccagggcggcaagagcatcaagctgagcagcgagacagagagcagcttcagcagcagcgctgacatcagcaaggcagatgtgagcagcagccccacccccagcagtgacctgcccagccatgacatgctgcacaactaccccagcgccctgagcagcagcgctggcaacatcatgcccaccacctacatctctgtgacccccaagattggcatgggcaagccagccatcaccaagaggaagttcagccctggccggcccaggagcaagcagggcgcctggagcacccacaacacagtgtccccacccagctggagcccagacatcagcgagggccgggagatcttcaagccccggcagctgcccggcagcgccatctggagcatcaaggtgggccggggcagcggcttccctgggaagaggcggcccagaggagctggcctgagcggccggggcggccggggccgcagcaagctgaagagcggcatcggggctgtggtgctgcccggggtgtccacagctgacatcagcagcaacaaggatgatgaagaaaattccatgcacaacacagtggtgctcttcagcagcagtgacaagttcaccctgaaccaggacatgtgtgtggtgtgtggcagctttggccagggcgctgagggccgcctgctggcctgcagccagtgtggccagtgctaccacccctactgtgtgtccatcaagatcaccaaggtggtgctgagcaagggctggcgctgcctggagtgcaccgtgtgtgaggcctgtgggaaggccacagatcctggccgcctgctgctgtgtgatgactgtgacatctcctaccacacctactgcctggacccccccctgcagacagtgcccaagggcggctggaagtgcaagtggtgtgtgtggtgccgccactgtggggccaccagcgctggcctgcgctgtgagtggcagaacaactacacccagtgtgccccctgtgccagcctgagcagctgccctgtgtgctacagaaactaccgggaggaggacctgatcctgcagtgccggcagtgtgaccgctggatgcatgctgtgtgccagaacctgaacacagaggaggaggtggagaatgtggccgacattggatttgactgcagcatgtgccggccctacatgcctgccagcaatgtgcccagcagtgactgctgtgagagcagcctggtggcccagatcgtgaccaaggtgaaggagctggacccccccaagacctacacccaggatggagtgtgcctgacagagagcggcatgacccagctgcagagcctgactgtgacagtgcccaggaggaagaggagcaagcccaagctgaagctgaagatcatcaaccagaacagcgtggccgtgctgcagaccccaccagacatccagagcgagcacagcagagatggagagatggatgacagccgggagggggagctgatggactgtgatggcaagtctgagagcagccctgagcgggaggccgtggatgatgagaccaagggcgtggagggcacagatggagtgaagaagaggaagaggaagccctaccggcccggcatcggcggcttcatggtgcggcagaggagcaggacaggccagggcaagaccaagaggagcgtcatcaggaaggacagcagcggcagcatcagcgagcagctgccctgcagagatgatggctggagcgagcagctgcctgacaccctggtggatgagagcgtgtctgtgacagagagcacagagaagatcaagaagcgctacaggaagaggaagaacaagctggaggagaccttccctgcctacctgcaggaggccttcttcggcaaggacctgctggacaccagccggcagagcaagatcagcctggacaacctgtctgaagatggagcccagctgctgtacaagaccaacatgaacacaggcttcctggaccccagcctggaccccctgctgagcagcagcagcgcccccaccaagagcggcacccacggccctgcagatgaccccctggccgacatcagcgaggtgctgaacacagatgatgacatcctgggcatcatcagtgatgacctggccaagtctgtggaccacagcgacatcggccctgtgacagatgaccccagcagcctgccccagcccaacgtgaaccagagcagccggcccctgtctgaggagcagctggatggcatcctgagccctgagctggacaagatggtgacagatggagccatcctgggcaagctgtacaagatccctgagctgggcggcaaggatgtggaggacctcttcaccgctgtgctgagccctgccaacacccagcccacccccctgccccagcccccaccacccacccagctgctgcccatccacaaccaggatgccttcagcaggatgcccctgatgaatggcctcatcggcagcagcccccacctgccccacaacagcctgcccccaggcagcggcctgggcaccttcagcgccatcgcccagagcagctacccagatgcccgggacaagaacagcgccttcaaccccatggccagtgaccccaacaacagctggaccagcagcgcccccaccgtggagggagaaaatgacaccatgagcaatgcccagaggagcaccctgaagtgggagaaggaggaggccctgggggagatggccaccgtggcccctgtgctgtacaccaacatcaacttccccaacctgaaggaggagttcccagactggaccaccagggtgaagcagatcgccaagctgtggaggaaggccagcagccaggagcgggccccctacgtgcagaaggcccgggacaacagagctgccctgcgcatcaacaaggtgcagatgagcaatgacagcatgaagaggcagcagcagcaggacagcattgaccccagcagcagaattgattctgagctgttcaaggaccccctgaagcagcgggagagcgagcacgagcaggagtggaagttccggcagcagatgaggcagaagagcaagcagcaggccaagattgaggccacccagaagctggagcaggtgaagaatgagcagcagcagcagcagcagcagcagtttggcagccagcacctgctggtgcagagcggcagtgacacccccagcagcggcatccagagccccctgaccccccagcctggaaatggaaacatgagccctgcccagagcttccacaaggagctgttcaccaagcagccccccagcacccccaccagcaccagcagtgatgatgtgtttgtgaagccccaggcccctcctcctcctccagcccccagccgcatccccatccaggacagcctgagccaggcccagaccagccagccccccagcccccaggtgttcagccctggcagcagcaacagcaggcctcccagccccatggacccctatgccaagatggtgggcacccccaggcctcctcctgtgggccacagcttcagcagaagaaattctgctgcccctgtggagaactgcacccccctgagctctgtgtcccggcccctgcagatgaatgagaccacagccaaccggcccagccctgtgcgggacctgtgcagcagcagcaccaccaacaatgacccctatgccaagcccccagacacccccaggcctgtgatgacagaccagttccccaagagcctgggcctgagccgcagccctgtggtgtctgagcagacagccaagggccccatcgctgctggcaccagtgaccacttcaccaagcccagccccagggcagatgtgttccagaggcagaggatcccagacagctatgcccggcccctgctgaccccagcccccctggacagcggccctggccccttcaagacccccatgcagcccccacccagcagccaggacccctacggctctgtgtcccaggccagccggcggctgtctgtggacccctatgaaagacctgccctgaccccccggcccatcgacaacttcagccacaaccagagcaatgacccctacagccagccccccctgaccccccaccctgctgtgaatgaaagctttgcccaccccagccgggccttcagccagcccggcaccatcagccggcccaccagccaggacccctacagccagcccccaggcacccccaggcctgtggtggacagctacagccagagcagcggcacagcccggagcaacacagacccctacagccagcccccaggcaccccccggcccaccaccgtggacccctacagccagcagccccagaccccccggcccagcacccagacagacctgtttgtgacccctgtgaccaaccagaggcacagcgacccctatgcccaccccccaggcaccccccggcccggcatctctgtgccctacagccagcccccagccaccccccggccccgcatcagcgagggcttcaccaggagctccatgaccaggcctgtgctgatgcccaaccaggaccccttcctgcaggccgcccagaacagaggccctgccctgcccggccccctggtgcggcccccagacacctgcagccagaccccccggcccccaggccctggcctgagtgacaccttcagccgggtgagccccagcgctgcccgggacccctatgaccagagccccatgacccccaggagccagagcgacagctttggcaccagccagacagcccatgatgtggccgaccagccccggcccggcagcgagggcagcttctgtgccagcagcaacagccccatgcacagccagggccagcagttcagcggcgtgtcccagctgcccggccctgtgcccaccagcggcgtgacagacacccagaacacagtgaacatggcccaggccgacacagagaagctgcggcagaggcagaagctgcgggagatcatcctgcagcagcagcagcagaagaagattgctggccggcaggagaagggcagccaggacagccctgctgtgccccaccctggccccctgcagcactggcagccagaaaatgtgaaccaggccttcaccaggcctcctccaccctacccaggcaacatccgcagccctgtggccccacccctgggccccaggtatgctgtgttccccaaggaccagaggggcccctaccccccagatgtggcctccatgggcatgaggccccacggcttccgcttcggcttccctgggggcagccacggcaccatgcccagccaggagcgcttcctggtgcccccccagcagatccagggcagcggcgtgagcccccagctgcggcgctctgtgtctgtggacatgccccggcccctgaacaacagccagatgaacaaccctgtgggcctgccccagcacttcagcccccagagcctgcctgtgcagcagcacaacatcctgggccaggcctacatcgagctgcggcaccgggccccagatggccggcagaggctgcccttcagcgcccctcctggctctgtggtggaggccagcagcaacctgcggcacggcaacttcatccccaggccagacttccctggccccaggcacacagaccccatgagaagaccaccccagggcctgcccaaccagctgcctgtgcacccagacctggagcaggtgccccccagccagcaggagcagggccacagcgtgcacagcagctccatggtgatgaggaccctgaaccaccccctgggcggggagttcagcgaggcccccctgagcacctctgtgcccagcgagaccaccagtgacaacctgcagatcaccacccagcccagtgatggcctggaggagaagctggacagtgatgaccccagcgtgaaggagctggatgtgaaggacctggagggcgtggaggtgaaggacctggatgatgaggacctggagaacctgaacctggacacagaagatggcaaggtggtggagctggacaccctggacaacctggagaccaatgaccccaacctggatgacctgctgcggtctggagaatttgacatcatcgcctacacagatcctgagctggacatgggagacaagaagtccatgtttaatgaggagctggacctgcccattgatgacaagctggacaaccagtgtgtgtctgtggagcccaagaagaaggagcaggagaacaagaccctggtgctgagtgacaagcacagcccccagaagaagagcacagtgaccaatgaggtgaagacagaggtgctgagccccaacagcaaggtggagagcaaatgtgaaacagagaagaatgatgagaacaaggacaacgtggacaccccctgcagccaggccagcgcccacagcgacctgaatgatggagagaagaccagcctgcacccctgtgaccctgacctgtttgagaagaggaccaaccgggagacagctggccccagcgccaacgtcatccaggccagcacccagctgcctgcccaggacgtcatcaacagctgtggcatcaccggcagcacccctgtgctgagcagcctgctggccaatgagaagagtgacaacagcgacatccggcccagcggcagccccccaccacccaccctgcctgccagccccagcaaccacgtgagcagcctgccccccttcatcgcccctcctggccgggtgctggacaatgccatgaacagcaatgtgacagtggtgtcccgggtgaaccacgtgttcagccagggcgtgcaggtgaaccctggcctcatccctggccagagcacagtgaaccacagcctgggcaccgggaagccagccacccagacaggcccccagaccagccagagcggcaccagctccatgagcggcccccagcagctgatgatcccccagaccctggcccagcagaaccgggagcggcccctgctgctggaggagcagcccctgctgctgcaggacctgctggaccaggagcggcaggagcagcagcagcagaggcagatgcaggccatgatccggcagaggtctgagcccttcttccccaacatcgactttgatgccatcacagaccccatcatgaaggccaagatggtggccctgaagggcatcaacaaggtgatggcccagaacaacctgggcatgccacccatggtgatgagccgcttccccttcatgggccaggtggtgacaggcacccagaacagcgagggccagaacctgggcccccaggccatcccccaggacggcagcatcacccaccagatcagccggcccaacccccccaactttggacctggctttgtgaatgacagccagaggaagcagtatgaggagtggctgcaggagacccagcagctgctgcagatgcagcagaagtacctggaggagcagatcggggcccacaggaagagcaagaaggccctgagcgccaagcagaggacagccaagaaggccggccgggagttcccagaagaagatgctgagcagctgaagcacgtgacagagcagcagagcatggtgcagaagcagctggagcagatcaggaagcagcagaaggagcacgccgagctgattgaggactaccgcatcaagcagcagcagcagtgtgccatggccccacccaccatgatgcccagcgtgcagccccagcccccactcatccctggggccaccccacccaccatgagccagcccaccttccccatggtgccccagcagctgcagcaccagcagcacaccaccgtcatcagcggccacaccagccctgtgaggatgcccagcctgcccggctggcagcccaacagcgccccagcccacctgcccctgaaccccccacgcatccagccccccatcgcccagctgcccatcaagacctgcaccccagcccctggcaccgtgtccaatgccaacccccagagcggccccccaccccgggtggagtttgatgacaacaaccccttcagcgagagcttccaggagcgggagaggaaggagcggctgcgggagcagcaggagcggcagaggatccagctgatgcaggaggtggaccggcagagggccctgcagcagaggatggagatggagcagcacggcatggtgggcagcgagatcagcagcagcaggacctctgtgtcccagatccccttctacagcagtgacctgccctgtgacttcatgcagcccctgggccccctgcagcagagcccccagcaccagcagcagatgggccaggtgctgcagcagcagaacatccagcagggcagcatcaacagccccagcacccagaccttcatgcagaccaatgaaagacggcaggtgggcccccccagctttgtgcctgacagccccagcatccctgtgggcagccccaacttcagctctgtgaagcagggccacggcaacctgagcggcaccagcttccagcagagccctgtgcggcccagcttcaccccagccctgcctgctgcccctcctgtggccaacagcagcctgccctgtggccaggacagcaccatcacccacggccacagctacccaggcagcacccagagcctcatccagctgtacagcgacatcatccctgaggagaagggcaagaagaagaggaccaggaagaagaagagagatgatgatgctgagagcaccaaggcccccagcaccccccacagcgacatcacagccccacccaccccaggcatcagcgagaccaccagcaccccagctgtgtccacccccagcgagctgccccagcaggccgaccaggagagcgtggagcctgtgggccccagcacccccaacatggctgctggccagctgtgcacagagctggagaacaagctgcccaacagcgacttcagccaggccacccccaaccagcagacctacgccaacagcgaggtggacaagctgtccatggagaccccagccaagacagaggagatcaagctggagaaggccgagacagagagctgccccggccaggaggagcccaagctggaggagcagaatggcagcaaggtggagggcaatgctgtggcctgccctgtgtcctctgcccagagccccccccacagcgctggggccccagctgccaagggggacagcggaaatgagctgctgaagcacctgctgaagaacaagaagagcagcagcctgctgaaccagaagccagagggcagcatctgcagtgaagatgactgcaccaaggacaacaagctggtggagaagcagaacccagctgagggcctgcagaccctgggcgcccagatgcagggcggcttcggctgcggcaaccagctgcccaagacagatggcggcagcgagaccaagaagcagaggagcaagaggacccagaggactggagagaaggccgcccccaggagcaagaagaggaagaaggatgaggaggagaagcaggccatgtacagcagcacagacaccttcacccacctgaagcagcagaacaacctgagcaacccccccaccccaccagccagcctgccccccaccccaccacccatggcctgccagaagatggccaacggctttgccaccacagaggagctggccggcaaggccggcgtgctggtgtcccatgaggtgaccaagaccctgggccccaagcccttccagctgcccttccggccccaggatgacctgctggcccgggccctggcccagggccccaagacagtggatgtgcctgccagcctgcccaccccaccccacaacaaccaggaggagctgcgcatccaggaccactgtggggaccgggacaccccagacagctttgtgcccagcagcagccctgagagcgtggtgggcgtggaggtgagccgctacccagacctgagcctggtgaaggaggagcccccagagcctgtgcccagccccatcatccccatcctgcccagcacagctgggaagagcagcgagagcagaagaaatgacatcaagacagagcccggcaccctgtactttgccagccccttcggccccagccccaacggccccaggagcggcctcatctctgtggccatcaccctgcaccccacagctgctgagaacatcagctctgtggtggccgccttcagtgacctgctgcacgtgcgcatccccaacagctatgaggtgtcctctgccccagatgtgcccagcatgggcctggtgagcagccaccgcatcaaccctggcctggagtaccggcagcacctgctgctgcggggccccccacctggcagcgccaaccccccccggctggtgagcagctaccgcctgaagcagcccaacgtgcccttcccccccaccagcaatggcctgagcggctacaaggacagcagccatggaattgctgagagcgctgccctgcggccccagtggtgctgccactgcaaggtggtgatcctgggcagcggcgtgaggaagagcttcaaggacctgaccctgctgaacaaggacagccgggagagcaccaagagggtggagaaggacatcgtgttctgcagcaacaactgcttcatcctgtacagcagcacagcccaggccaagaacagcgagaacaaggagagcatccccagcctgccccagagccccatgagggagacccccagcaaggccttccaccagtacagcaacaacatcagcaccctggatgtgcactgcctgccccagctgcctgagaaggccagccccccagccagcccccccatcgccttccccccagcctttgaagctgcccaggtggaggccaagccagatgagctgaaggtgacagtgaagctgaagccccggctgcgggctgtgcatggaggctttgaggactgccggcccctgaacaagaagtggaggggcatgaagtggaagaagtggagcatccacatcgtcatccccaagggcaccttcaagccaccctgtgaagatgaaattgatgagttcctgaagaagctgggcaccagcctgaagccagaccctgtgcccaaggactacaggaagtgctgcttctgccacgaggagggagatggcctgacagatggccctgcccggctgctgaacctggacctggacctgtgggtgcacctgaactgtgccctgtggagcacagaggtgtatgagacccaggccggggccctgatcaacgtggagctggccctgcggcggggcctgcagatgaagtgtgtgttctgccacaagacaggagccaccagcggctgccaccgcttccgctgcaccaacatctaccacttcacctgtgccatcaaggcccagtgcatgttcttcaaggacaagaccatgctgtgccccatgcacaagcccaagggcatccacgagcaggagctgagctactttgctgtgttcagaagagtgtatgtgcagagagatgaggtgcggcagatcgccagcatcgtgcagagaggagagcgggaccacaccttccgggtgggcagcctcatcttccacaccatcggccagctgctgccccagcagatgcaggccttccacagccccaaggccctcttccctgtgggctatgaggccagccggctgtactggagcaccaggtatgccaacagacgctgccgctacctgtgcagcattgaggagaaggatggccggcctgtgtttgtgatcagaattgtggagcagggccacgaggacctggtgctgagtgacatcagccccaagggcgtgtgggacaagatcctggagcctgtggcctgtgtgaggaagaagtctgagatgctgcagctgtttcctgcctacctgaagggggaggacctgtttggcctgactgtgtctgctgtggccagaattgctgagagcctgcccggggtggaggcctgtgagaactacaccttccgctatggaagaaaccccctgatggagctgcccctggccgtgaaccccaccggctgtgcccggtctgagcccaagatgtctgcccacgtgaagagatttgtgctgcggccccacaccctgaacagcaccagcaccagcaagagcttccagagcacagtgactggagagctgaatgccccctacagcaagcagtttgtgcacagcaagagcagccagtacaggaagatgaagacagagtggaagagcaatgtgtacctggcccggagccgcatccagggcctgggcctgtatgctgcccgggacatcgagaagcacaccatggtgattgagtacatcggcaccatcatcagaaatgaggtggccaacaggaaggagaagctgtatgagagccagaacagaggagtgtacatgttcaggatggacaatgaccacgtgattgatgccaccctgaccggcggccctgcccgctacatcaaccacagctgtgcccccaactgtgtggccgaggtggtgacctttgagcggggccacaagatcatcatcagcagcagccgccgcatccagaagggggaggagctgtgctatgactacaagtttgattttgaagatgaccagcacaagatcccctgccactgtggggctgtgaactgcaggaagtggatgaactag

SEQ ID NO: 160654 - DNA, 14907 bp, synthetic construct
  misc_feature 1..14907: note = Description of Artificial Sequence: Synthetic coding sequence
  source 1..14907: mol_type = other DNA
atgagcagcgaggaggacaagtctgtggagcagccccagcccccacctcctcctcctgaggagcccggggccccagcccccagccctgctgctgctgacaagaggccccggggccggcccaggaaggatggagccagccccttccagagggccaggaagaagcccaggagccggggcaagacagctgtggaggatgaggacagcatggatggcctggagaccacagaaacagagaccatcgtggagacagagatcaaggagcagagcgctgaggaggatgctgaggccgaggtggacaacagcaagcagctgatccccaccctgcagaggtctgtgtctgaggagagcgccaacagcctggtgtctgtgggcgtggaggccaagatcagcgagcagctgtgtgccttctgctactgtggggagaagagcagcctgggccagggcgacctgaagcagttccgcatcaccccaggcttcatcctgccctggaggaaccagcccagcaacaagaaggacattgatgacaacagcaatggcacctatgagaagatgcagaacagcgcccccaggaagcagaggggccagaggaaggagaggagcccccagcagaacatcgtgtcctgtgtgtctgtgtccacccagacagccagtgatgaccaggccggcaagctgtgggatgagctgagcctggtgggcctgcctgatgccatcgacatccaggccctgtttgacagcacaggcacctgctgggcccaccaccgctgtgtggagtggagcctgggcgtgtgccagatggaggagcccctgctggtgaatgtggacaaggctgtggtgtctggcagcacagagcgctgtgccttctgcaagcacctgggcgccaccatcaagtgctgtgaggagaagtgcacccagatgtaccactacccctgtgccgccggggccggcaccttccaggacttcagccacatcttcctgctgtgcccagagcacatcgaccaggcccctgagaggagcaaggaggatgccaactgtgctgtgtgtgacagccctggggacctgctggaccagttcttctgcaccacctgtggccagcactaccacggcatgtgcctggacattgctgtgacccccctgaagagagctggctggcagtgcccagagtgcaaggtgtgccagaactgcaagcagagcggggaggacagcaagatgctggtgtgtgacacctgtgacaagggctaccacaccttctgcctgcagcctgtgatgaagtctgtgcccaccaacggctggaagtgcaagaactgccgcatctgcattgaatgtggcaccaggagcagcagccagtggcaccacaactgcctgatctgtgacaactgctaccagcagcaggacaacctgtgccccttctgtgggaagtgctaccaccctgagctgcagaaggacatgctgcactgcaacatgtgcaagcgctgggtgcacctggagtgtgacaagcccacagaccacgagctggacacccagctgaaggaggagtacatctgcatgtactgcaagcacctgggcgctgagatggaccggctgcagcctggagaggaggtggagattgctgagctgaccacagactacaacaatgagatggaggtggagggccctgaggaccagatggtgttcagcgagcaggccgccaacaaggatgtgaatggccaggagagcaccccaggcatcgtgcctgatgctgtgcaggtgcacacagaggagcagcagaagagccaccccagcgagagcctggacacagacagcctgctgattgctgtgagcagccagcacacagtgaacacagagctggagaagcagatcagcaatgaggtggacagcgaggacctgaagatgagcagcgaggtgaagcacatctgtggggaggaccagatcgaggacaagatggaggtgacagaaaatattgaggtggtgacccaccagatcaccgtgcagcaggagcagctgcagctgctggaggagcctgagaccgtggtgtcccgggaggagagccggccccccaagctggtgatggagagcgtgaccctgcccctggagaccctggtgagcccccatgaggagagcatcagcctgtgcccagaggagcagctggtgattgagcggctgcagggcgagaaggagcagaaggagaacagcgagctgagcacaggcctgatggattctgagatgacccccaccatcgagggctgtgtgaaggatgtgtcctaccagggcggcaagagcatcaagctgagcagcgagacagagagcagcttcagcagcagcgctgacatcagcaaggcagatgtgagcagcagccccacccccagcagtgacctgcccagccatgacatgctgcacaactaccccagcgccctgagcagcagcgctggcaacatcatgcccaccacctacatctctgtgacccccaagattggcatgggcaagccagccatcaccaagaggaagttcagccctggccggcccaggagcaagcagggcgcctggagcacccacaacacagtgtccccacccagctggagcccagacatcagcgagggccgggagatcttcaagccccggcagctgcccggcagcgccatctggagcatcaaggtgggccggggcagcggcttccctgggaagaggcggcccagaggagctggcctgagcggccggggcggccggggccgcagcaagctgaagagcggcatcggggctgtggtgctgcccggggtgtccacagctgacatcagcagcaacaaggatgatgaagaaaattccatgcacaacacagtggtgctcttcagcagcagtgacaagttcaccctgaaccaggacatgtgtgtggtgtgtggcagctttggccagggcgctgagggccgcctgctggcctgcagccagtgtggccagtgctaccacccctactgtgtgtccatcaagatcaccaaggtggtgctgagcaagggctggcgctgcctggagtgcaccgtgtgtgaggcctgtgggaaggccacagatcctggccgcctgctgctgtgtgatgactgtgacatctcctaccacacctactgcctggacccccccctgcagacagtgcccaagggcggctggaagtgcaagtggtgtgtgtggtgccgccactgtggggccaccagcgctggcctgcgctgtgagtggcagaacaactacacccagtgtgccccctgtgccagcctgagcagctgccctgtgtgctacagaaactaccgggaggaggacctgatcctgcagtgccggcagtgtgaccgctggatgcatgctgtgtgccagaacctgaacacagaggaggaggtggagaatgtggccgacattggatttgactgcagcatgtgccggccctacatgcctgccagcaatgtgcccagcagtgactgctgtgagagcagcctggtggcccagatcgtgaccaaggtgaaggagctggacccccccaagacctacacccaggatggagtgtgcctgacagagagcggcatgacccagctgcagagcctgactgtgacagtgcccaggaggaagaggagcaagcccaagctgaagctgaagatcatcaaccagaacagcgtggccgtgctgcagaccccaccagacatccagagcgagcacagcagagatggagagatggatgacagccgggagggggagctgatggactgtgatggcaagtctgagagcagccctgagcgggaggccgtggatgatgagaccaagggcgtggagggcacagatggagtgaagaagaggaagaggaagccctaccggcccggcatcggcggcttcatggtgcggcagaggagcaggacaggccagggcaagaccaagaggagcgtcatcaggaaggacagcagcggcagcatcagcgagcagctgccctgcagagatgatggctggagcgagcagctgcctgacaccctggtggatgagagcgtgtctgtgacagagagcacagagaagatcaagaagcgctacaggaagaggaagaacaagctggaggagaccttccctgcctacctgcaggaggccttcttcggcaaggacctgctggacaccagccggcagagcaagatcagcctggacaacctgtctgaagatggagcccagctgctgtacaagaccaacatgaacacaggcttcctggaccccagcctggaccccctgctgagcagcagcagcgcccccaccaagagcggcacccacggccctgcagatgaccccctggccgacatcagcgaggtgctgaacacagatgatgacatcctgggcatcatcagtgatgacctggccaagtctgtggaccacagcgacatcggccctgtgacagatgaccccagcagcctgccccagcccaacgtgaaccagagcagccggcccctgtctgaggagcagctggatggcatcctgagccctgagctggacaagatggtgacagatggagccatcctgggcaagctgtacaagatccctgagctgggcggcaaggatgtggaggacctcttcaccgctgtgctgagccctgccaacacccagcccacccccctgccccagcccccaccacccacccagctgctgcccatccacaaccaggatgccttcagcaggatgcccctgatgaatggcctcatcggcagcagcccccacctgccccacaacagcctgcccccaggcagcggcctgggcaccttcagcgccatcgcccagagcagctacccagatgcccgggacaagaacagcgccttcaaccccatggccagtgaccccaacaacagctggaccagcagcgcccccaccgtggagggagaaaatgacaccatgagcaatgcccagaggagcaccctgaagtgggagaaggaggaggccctgggggagatggccaccgtggcccctgtgctgtacaccaacatcaacttccccaacctgaaggaggagttcccagactggaccaccagggtgaagcagatcgccaagctgtggaggaaggccagcagccaggagcgggccccctacgtgcagaaggcccgggacaacagagctgccctgcgcatcaacaaggtgcagatgagcaatgacagcatgaagaggcagcagcagcaggacagcattgaccccagcagcagaattgattctgagctgttcaaggaccccctgaagcagcgggagagcgagcacgagcaggagtggaagttccggcagcagatgaggcagaagagcaagcagcaggccaagattgaggccacccagaagctggagcaggtgaagaatgagcagcagcagcagcagcagcagcagtttggcagccagcacctgctggtgcagagcggcagtgacacccccagcagcggcatccagagccccctgaccccccagcctggaaatggaaacatgagccctgcccagagcttccacaaggagctgttcaccaagcagccccccagcacccccaccagcaccagcagtgatgatgtgtttgtgaagccccaggcccctcctcctcctccagcccccagccgcatccccatccaggacagcctgagccaggcccagaccagccagccccccagcccccaggtgttcagccctggcagcagcaacagcaggcctcccagccccatggacccctatgccaagatggtgggcacccccaggcctcctcctgtgggccacagcttcagcagaagaaattctgctgcccctgtggagaactgcacccccctgagctctgtgtcccggcccctgcagatgaatgagaccacagccaaccggcccagccctgtgcgggacctgtgcagcagcagcaccaccaacaatgacccctatgccaagcccccagacacccccaggcctgtgatgacagaccagttccccaagagcctgggcctgagccgcagccctgtggtgtctgagcagacagccaagggccccatcgctgctggcaccagtgaccacttcaccaagcccagccccagggcagatgtgttccagaggcagaggatcccagacagctatgcccggcccctgctgaccccagcccccctggacagcggccctggccccttcaagacccccatgcagcccccacccagcagccaggacccctacggctctgtgtcccaggccagccggcggctgtctgtggacccctatgaaagacctgccctgaccccccggcccatcgacaacttcagccacaaccagagcaatgacccctacagccagccccccctgaccccccaccctgctgtgaatgaaagctttgcccaccccagccgggccttcagccagcccggcaccatcagccggcccaccagccaggacccctacagccagcccccaggcacccccaggcctgtggtggacagctacagccagagcagcggcacagcccggagcaacacagacccctacagccagcccccaggcaccccccggcccaccaccgtggacccctacagccagcagccccagaccccccggcccagcacccagacagacctgtttgtgacccctgtgaccaaccagaggcacagcgacccctatgcccaccccccaggcaccccccggcccggcatctctgtgccctacagccagcccccagccaccccccggccccgcatcagcgagggcttcaccaggagctccatgaccaggcctgtgctgatgcccaaccaggaccccttcctgcaggccgcccagaacagaggccctgccctgcccggccccctggtgcggcccccagacacctgcagccagaccccccggcccccaggccctggcctgagtgacaccttcagccgggtgagccccagcgctgcccgggacccctatgaccagagccccatgacccccaggagccagagcgacagctttggcaccagccagacagcccatgatgtggccgaccagccccggcccggcagcgagggcagcttctgtgccagcagcaacagccccatgcacagccagggccagcagttcagcggcgtgtcccagctgcccggccctgtgcccaccagcggcgtgacagacacccagaacacagtgaacatggcccaggccgacacagagaagctgcggcagaggcagaagctgcgggagatcatcctgcagcagcagcagcagaagaagattgctggccggcaggagaagggcagccaggacagccctgctgtgccccaccctggccccctgcagcactggcagccagaaaatgtgaaccaggccttcaccaggcctcctccaccctacccaggcaacatccgcagccctgtggccccacccctgggccccaggtatgctgtgttccccaaggaccagaggggcccctaccccccagatgtggcctccatgggcatgaggccccacggcttccgcttcggcttccctgggggcagccacggcaccatgcccagccaggagcgcttcctggtgcccccccagcagatccagggcagcggcgtgagcccccagctgcggcgctctgtgtctgtggacatgccccggcccctgaacaacagccagatgaacaaccctgtgggcctgccccagcacttcagcccccagagcctgcctgtgcagcagcacaacatcctgggccaggcctacatcgagctgcggcaccgggccccagatggccggcagaggctgcccttcagcgcccctcctggctctgtggtggaggccagcagcaacctgcggcacggcaacttcatccccaggccagacttccctggccccaggcacacagaccccatgagaagaccaccccagggcctgcccaaccagctgcctgtgcacccagacctggagcaggtgccccccagccagcaggagcagggccacagcgtgcacagcagctccatggtgatgaggaccctgaaccaccccctgggcggggagttcagcgaggcccccctgagcacctctgtgcccagcgagaccaccagtgacaacctgcagatcaccacccagcccagtgatggcctggaggagaagctggacagtgatgaccccagcgtgaaggagctggatgtgaaggacctggagggcgtggaggtgaaggacctggatgatgaggacctggagaacctgaacctggacacagaagatggcaaggtggtggagctggacaccctggacaacctggagaccaatgaccccaacctggatgacctgctgcggtctggagaatttgacatcatcgcctacacagatcctgagctggacatgggagacaagaagtccatgtttaatgaggagctggacctgcccattgatgacaagctggacaaccagtgtgtgtctgtggagcccaagaagaaggagcaggagaacaagaccctggtgctgagtgacaagcacagcccccagaagaagagcacagtgaccaatgaggtgaagacagaggtgctgagccccaacagcaaggtggagagcaaatgtgaaacagagaagaatgatgagaacaaggacaacgtggacaccccctgcagccaggccagcgcccacagcgacctgaatgatggagagaagaccagcctgcacccctgtgaccctgacctgtttgagaagaggaccaaccgggagacagctggccccagcgccaacgtcatccaggccagcacccagctgcctgcccaggacgtcatcaacagctgtggcatcaccggcagcacccctgtgctgagcagcctgctggccaatgagaagagtgacaacagcgacatccggcccagcggcagccccccaccacccaccctgcctgccagccccagcaaccacgtgagcagcctgccccccttcatcgcccctcctggccgggtgctggacaatgccatgaacagcaatgtgacagtggtgtcccgggtgaaccacgtgttcagccagggcgtgcaggtgaaccctggcctcatccctggccagagcacagtgaaccacagcctgggcaccgggaagccagccacccagacaggcccccagaccagccagagcggcaccagctccatgagcggcccccagcagctgatgatcccccagaccctggcccagcagaaccgggagcggcccctgctgctggaggagcagcccctgctgctgcaggacctgctggaccaggagcggcaggagcagcagcagcagaggcagatgcaggccatgatccggcagaggtctgagcccttcttccccaacatcgactttgatgccatcacagaccccatcatgaaggccaagatggtggccctgaagggcatcaacaaggtgatggcccagaacaacctgggcatgccacccatggtgatgagccgcttccccttcatgggccaggtggtgacaggcacccagaacagcgagggccagaacctgggcccccaggccatcccccaggacggcagcatcacccaccagatcagccggcccaacccccccaactttggacctggctttgtgaatgacagccagaggaagcagtatgaggagtggctgcaggagacccagcagctgctgcagatgcagcagaagtacctggaggagcagatcggggcccacaggaagagcaagaaggccctgagcgccaagcagaggacagccaagaaggccggccgggagttcccagaagaagatgctgagcagctgaagcacgtgacagagcagcagagcatggtgcagaagcagctggagcagatcaggaagcagcagaaggagcacgccgagctgattgaggactaccgcatcaagcagcagcagcagtgtgccatggccccacccaccatgatgcccagcgtgcagccccagcccccactcatccctggggccaccccacccaccatgagccagcccaccttccccatggtgccccagcagctgcagcaccagcagcacaccaccgtcatcagcggccacaccagccctgtgaggatgcccagcctgcccggctggcagcccaacagcgccccagcccacctgcccctgaaccccccacgcatccagccccccatcgcccagctgcccatcaagacctgcaccccagcccctggcaccgtgtccaatgccaacccccagagcggccccccaccccgggtggagtttgatgacaacaaccccttcagcgagagcttccaggagcgggagaggaaggagcggctgcgggagcagcaggagcggcagaggatccagctgatgcaggaggtggaccggcagagggccctgcagcagaggatggagatggagcagcacggcatggtgggcagcgagatcagcagcagcaggacctctgtgtcccagatccccttctacagcagtgacctgccctgtgacttcatgcagcccctgggccccctgcagcagagcccccagcaccagcagcagatgggccaggtgctgcagcagcagaacatccagcagggcagcatcaacagccccagcacccagaccttcatgcagaccaatgaaagacggcaggtgggcccccccagctttgtgcctgacagccccagcatccctgtgggcagccccaacttcagctctgtgaagcagggccacggcaacctgagcggcaccagcttccagcagagccctgtgcggcccagcttcaccccagccctgcctgctgcccctcctgtggccaacagcagcctgccctgtggccaggacagcaccatcacccacggccacagctacccaggcagcacccagagcctcatccagctgtacagcgacatcatccctgaggagaagggcaagaagaagaggaccaggaagaagaagagagatgatgatgctgagagcaccaaggcccccagcaccccccacagcgacatcacagccccacccaccccaggcatcagcgagaccaccagcaccccagctgtgtccacccccagcgagctgccccagcaggccgaccaggagagcgtggagcctgtgggccccagcacccccaacatggctgctggccagctgtgcacagagctggagaacaagctgcccaacagcgacttcagccaggccacccccaaccagcagacctacgccaacagcgaggtggacaagctgtccatggagaccccagccaagacagaggagatcaagctggagaaggccgagacagagagctgccccggccaggaggagcccaagctggaggagcagaatggcagcaaggtggagggcaatgctgtggcctgccctgtgtcctctgcccagagccccccccacagcgctggggccccagctgccaagggggacagcggaaatgagctgctgaagcacctgctgaagaacaagaagagcagcagcctgctgaaccagaagccagagggcagcatctgcagtgaagatgactgcaccaaggacaacaagctggtggagaagcagaacccagctgagggcctgcagaccctgggcgcccagatgcagggcggcttcggctgcggcaaccagctgcccaagacagatggcggcagcgagaccaagaagcagaggagcaagaggacccagaggactggagagaaggccgcccccaggagcaagaagaggaagaaggatgaggaggagaagcaggccatgtacagcagcacagacaccttcacccacctgaagcaggtgcggcagctgagcctgctgcccctgatggagcccatcatcggcgtgaactttgcccacttcctgccctacggcagcggccagttcaacagcggcaaccggctgctgggcacctttggaagtgccaccctggagggcgtgtctgactactacagccagctgatctacaagcagaacaacctgagcaacccccccaccccaccagccagcctgccccccaccccaccacccatggcctgccagaagatggccaatggatttgccaccacagaggagctggccggcaaggccggcgtgctggtgtcccatgaggtgaccaagaccctgggccccaagcccttccagctgcccttccggccccaggatgacctgctggcccgggccctggcccagggccccaagacagtggatgtgcctgccagcctgcccaccccaccccacaacaaccaggaggagctgcgcatccaggaccactgtggggaccgggacaccccagacagctttgtgcccagcagcagccctgagagcgtggtgggcgtggaggtgagccgctacccagacctgagcctggtgaaggaggagcccccagagcctgtgcccagccccatcatccccatcctgcccagcacagctgggaagagcagcgagagcagaagaaatgacatcaagacagagcccggcaccctgtactttgccagccccttcggccccagccccaacggccccaggagcggcctcatctctgtggccatcaccctgcaccccacagctgctgagaacatcagctctgtggtggccgccttcagtgacctgctgcacgtgcgcatccccaacagctatgaggtgagcagcgccccagatgtgcccagcatgggcctggtgagcagccaccgcatcaaccctggcctggagtaccggcagcacctgctgctgcggggccccccacctggcagcgccaaccccccccggctggtgtcctcctaccgcctgaagcagcccaacgtgcccttcccccccaccagcaatggcctgagcggctacaaggacagcagccacggcattgctgagagcgctgccctgcggccccagtggtgctgccactgcaaggtggtgatcctgggcagcggcgtgaggaagagcttcaaggacctgaccctgctgaacaaggacagccgggagagcaccaagagggtggagaaggacatcgtgttctgcagcaacaactgcttcatcctgtacagcagcacagcccaggccaagaacagcgagaacaaggagagcatccccagcctgccccagagccccatgagggagacccccagcaaggccttccaccagtacagcaacaacatcagcaccctggatgtgcactgcctgccccagctgcctgagaaggccagccccccagccagcccccccatcgccttccccccagcctttgaggccgcccaggtggaggccaagccagatgagctgaaggtgacagtgaagctgaagccccggctgcgggctgtgcacggcggctttgaggactgccggcccctgaacaagaagtggaggggcatgaagtggaagaagtggagcatccacatcgtcatccccaagggcaccttcaagccaccctgtgaagatgaaattgatgagttcctgaagaagctgggcaccagcctgaagccagaccctgtgcccaaggactacaggaagtgctgcttctgccacgaggagggagatggcctgacagatggccctgcccggctgctgaacctggacctggacctgtgggtgcacctgaactgtgccctgtggagcacagaggtgtatgagacccaggccggggccctgatcaacgtggagctggccctgcggcggggcctgcagatgaagtgtgtgttctgccacaagacaggagccaccagcggctgccaccgcttccgctgcaccaacatctaccacttcacctgtgccatcaaggcccagtgcatgttcttcaaggacaagaccatgctgtgccccatgcacaagcccaagggcatccacgagcaggagctgagctactttgctgtgttccggcgggtgtatgtgcagagagatgaggtgcggcagatcgccagcatcgtgcagagaggagagcgggaccacaccttccgggtgggcagcctcatcttccacaccatcggccagctgctgccccagcagatgcaggccttccacagccccaaggccctcttccctgtgggctatgaggccagccggctgtactggagcaccaggtatgccaacagacgctgccgctacctgtgcagcattgaggagaaggatggccggcctgtgtttgtgatccgcatcgtggagcagggccacgaggacctggtgctgagtgacatcagccccaagggcgtgtgggacaagatcctggagcctgtggcctgtgtgaggaagaagtctgagatgctgcagctgtttcctgcctacctgaagggggaggacctgtttggcctgactgtgtctgctgtggccagaattgctgagagcctgcccggggtggaggcctgtgagaactacaccttccgctatggcaggaaccccctgatggagctgcccctggccgtgaaccccaccggctgtgcccggtctgagcccaagatgtctgcccacgtgaagagatttgtgctgcggccccacaccctgaacagcaccagcaccagcaagagcttccagagcacagtgactggagagctgaatgccccctacagcaagcagtttgtgcacagcaagagcagccagtacaggaagatgaagacagagtggaagagcaatgtgtacctggcccggagccgcatccagggcctgggcctgtatgctgcccgggacatcgagaagcacaccatggtgattgagtacatcggcaccatcatcagaaatgaggtggccaacaggaaggagaagctgtatgagagccagaacagaggagtgtacatgttcaggatggacaatgaccacgtgattgatgccaccctgactggaggccctgcccgctacatcaaccacagctgtgcccccaactgtgtggccgaggtggtgacctttgagcggggccacaagatcatcatcagcagcagccgccgcatccagaagggggaggagctgtgctatgactacaagtttgattttgaagatgaccagcacaagatcccctgccactgtggggctgtgaactgcaggaagtggatgaactag

SEQ ID NO: 160655 - DNA, 4575 bp, synthetic construct
  misc_feature 1..4575: note = Description of Artificial Sequence: Synthetic coding sequence
  source 1..4575: mol_type = other DNA
ctgatgcaggaggtggaccggcagagggccctgcagcagaggatggagatggagcagcacggcatggtgggcagcgagatcagcagcagcaggacctctgtgtcccagatccccttctacagcagtgacctgccctgtgacttcatgcagcccctgggccccctgcagcagagcccccagcaccagcagcagatgggccaggtgctgcagcagcagaacatccagcagggcagcatcaacagccccagcacccagaccttcatgcagaccaatgaaagacggcaggtgggcccccccagctttgtgcctgacagccccagcatccctgtgggcagccccaacttcagctctgtgaagcagggccacggcaacctgagcggcaccagcttccagcagagccctgtgcggcccagcttcaccccagccctgcctgctgcccctcctgtggccaacagcagcctgccctgtggccaggacagcaccatcacccacggccacagctacccaggcagcacccagagcctcatccagctgtacagcgacatcatccctgaggagaagggcaagaagaagaggaccaggaagaagaagagagatgatgatgctgagagcaccaaggcccccagcaccccccacagcgacatcacagccccacccaccccaggcatcagcgagaccaccagcaccccagctgtgtccacccccagcgagctgccccagcaggccgaccaggagagcgtggagcctgtgggccccagcacccccaacatggctgctggccagctgtgcacagagctggagaacaagctgcccaacagcgacttcagccaggccacccccaaccagcagacctacgccaacagcgaggtggacaagctgtccatggagaccccagccaagacagaggagatcaagctggagaaggccgagacagagagctgccccggccaggaggagcccaagctggaggagcagaatggcagcaaggtggagggcaatgctgtggcctgccctgtgtcctctgcccagagccccccccacagcgctggggccccagctgccaagggggacagcggaaatgagctgctgaagcacctgctgaagaacaagaagagcagcagcctgctgaaccagaagccagagggcagcatctgcagtgaagatgactgcaccaaggacaacaagctggtggagaagcagaacccagctgagggcctgcagaccctgggcgcccagatgcagggcggcttcggctgcggcaaccagctgcccaagacagatggcggcagcgagaccaagaagcagaggagcaagaggacccagaggactggagagaaggccgcccccaggagcaagaagaggaagaaggatgaggaggagaagcaggccatgtacagcagcacagacaccttcacccacctgaagcagcagctgagcctgctgcccctgatggagcccatcatcggcgtgaactttgcccacttcctgccctacggcagcggccagttcaacagcggcaaccggctgctgggcacctttggaagtgccaccctggagggcgtgtctgactactacagccagctgatctacaagaagatggccaatggatttgccaccacagaggagctggccggcaaggccggcgtgctggtgtcccatgaggtgaccaagaccctgggccccaagcccttccagctgcccttccggccccaggatgacctgctggcccgggccctggcccagggccccaagacagtggatgtgcctgccagcctgcccaccccaccccacaacaaccaggaggagctgcgcatccaggaccactgtggggaccgggacaccccagacagctttgtgcccagcagcagccctgagagcgtggtgggcgtggaggtgagccgctacccagacctgagcctggtgaaggaggagcccccagagcctgtgcccagccccatcatccccatcctgcccagcacagctgggaagagcagcgagagcagaagaaatgacatcaagacagagcccggcaccctgtactttgccagccccttcggccccagccccaacggccccaggagcggcctcatctctgtggccatcaccctgcaccccacagctgctgagaacatcagctctgtggtggccgccttcagtgacctgctgcacgtgcgcatccccaacagctatgaggtgagcagcgccccagatgtgcccagcatgggcctggtgagcagccaccgcatcaaccctggcctggagtaccggcagcacctgctgctgcggggccccccacctggcagcgccaaccccccccggctggtgtcctcctaccgcctgaagcagcccaacgtgcccttcccccccaccagcaatggcctgagcggctacaaggacagcagccacggcattgctgagagcgctgccctgcggccccagtggtgctgccactgcaaggtggtgatcctgggcagcggcgtgaggaagagcttcaaggacctgaccctgctgaacaaggacagccgggagagcaccaagagggtggagaaggacatcgtgttctgcagcaacaactgcttcatcctgtacagcagcacagcccaggccaagaacagcgagaacaaggagagcatccccagcctgccccagagccccatgagggagacccccagcaaggccttccaccagtacagcaacaacatcagcaccctggatgtgcactgcctgccccagctgcctgagaaggccagccccccagccagcccccccatcgccttccccccagcctttgaggccgcccaggtggaggccaagccagatgagctgaaggtgacagtgaagctgaagccccggctgcgggctgtgcacggcggctttgaggactgccggcccctgaacaagaagtggaggggcatgaagtggaagaagtggagcatccacatcgtcatccccaagggcaccttcaagccaccctgtgaagatgaaattgatgagttcctgaagaagctgggcaccagcctgaagccagaccctgtgcccaaggactacaggaagtgctgcttctgccacgaggagggagatggcctgacagatggccctgcccggctgctgaacctggacctggacctgtgggtgcacctgaactgtgccctgtggagcacagaggtgtatgagacccaggccggggccctgatcaacgtggagctggccctgcggcggggcctgcagatgaagtgtgtgttctgccacaagacaggagccaccagcggctgccaccgcttccgctgcaccaacatctaccacttcacctgtgccatcaaggcccagtgcatgttcttcaaggacaagaccatgctgtgccccatgcacaagcccaagggcatccacgagcaggagctgagctactttgctgtgttccggcgggtgtatgtgcagagagatgaggtgcggcagatcgccagcatcgtgcagagaggagagcgggaccacaccttccgggtgggcagcctcatcttccacaccatcggccagctgctgccccagcagatgcaggccttccacagccccaaggccctcttccctgtgggctatgaggccagccggctgtactggagcaccaggtatgccaacagacgctgccgctacctgtgcagcattgaggagaaggatggccggcctgtgtttgtgatccgcatcgtggagcagggccacgaggacctggtgctgagtgacatcagccccaagggcgtgtgggacaagatcctggagcctgtggcctgtgtgaggaagaagtctgagatgctgcagctgtttcctgcctacctgaagggggaggacctgtttggcctgactgtgtctgctgtggccagaattgctgagagcctgcccggggtggaggcctgtgagaactacaccttccgctatggcaggaaccccctgatggagctgcccctggccgtgaaccccaccggctgtgcccggtctgagcccaagatgtctgcccacgtgaagaggccccacaccctgaacagcaccagcaccagcaagagcttccagagcacagtgactggagagctgaatgccccctacagcaagcagtttgtgcacagcaagagcagccagtacaggaagatgaagacagagtggaagagcaatgtgtacctggcccggagccgcatccagggcctgggcctgtatgctgcccgggacatcgagaagcacaccatggtgattgagtacatcggcaccatcatcagaaatgaggtggccaacaggaaggagaagctgtatgagagccagaacagaggagtgtacatgttcaggatggacaatgaccacgtgattgatgccaccctgactggaggccctgcccgctacatcaaccacagctgtgcccccaactgtgtggccgaggtggtgacctttgagcggggccacaagatcatcatcagcagcagccgccgcatccagaagggggaggagctgtgctatgactacaagtttgattttgaagatgaccagcacaagatcccctgccactgtggggctgtgaactgcaggaagtggatgaactag

SEQ ID NO: 160656 - DNA, 351 bp, synthetic construct
  misc_feature 1..351: note = Description of Artificial Sequence: Synthetic coding sequence
  source 1..351: mol_type = other DNA
atggtgattgagtacatcggcaccatcatcagaaatgaggtggccaacaggaaggagaagctgtatgagagccagaacagaggagtgtacatgttcaggatggacaatgaccacgtgattgatgccaccctgactggaggccctgcccgctacatcaaccacagctgtgcccccaactgtgtggccgaggtggtgacctttgagcggggccacaagatcatcatcagcagcagccgccgcatccagaagggggaggagctgtgctatgactacaagtttgattttgaagatgaccagcacaagatcccctgccactgtggggctgtgaactgcaggaagtggatgaactag

SEQ ID NO: 160657 - DNA, 5577 bp, synthetic construct
  misc_feature 1..5577: note = Description of Artificial Sequence: Synthetic coding sequence
  source 1..5577: mol_type = other DNA
atgagcatcgtcatccccctgggcgtggacacagctgagaccagctacctggagatggctgctggcagcgagcctgagagcgtggaggccagccctgtggtggtggagaagagcaacagctacccccaccagctgtacaccagcagcagccaccacagccacagctacatcggcctgccctatgctgaccacaactacggggcccggcccccacccaccccaccagccagccccccaccttctgtgctgatcagcaagaatgaggtgggcatcttcaccacccccaactttgatgagaccagcagcgccaccaccatcagcaccagtgaagatggcagctatggaacagatgtgacccgctgcatctgtggcttcacccatgatgatggctacatgatctgctgtgacaagtgcagcgtgtggcagcacatcgactgcatgggcatcgaccggcagcacatcccagacacctacctgtgtgagcgctgccagcccaggaacctggacaaggagagagctgtgctgctgcagaggaggaagcgggagaacatgtctgatggagacaccagcgccacagagagcggagatgaggtgcctgtggagctgtacacagccttccagcacacccccaccagcatcaccctgacagccagccgggtgtccaaggtgaatgacaagaggaggaagaagtctggagagaaggagcagcacatcagcaagtgcaagaaggccttccgggagggcagcaggaagagcagccgggtgaagggcagcgcccctgagattgaccccagcagtgatggcagcaactttggctgggagaccaagatcaaggcctggatggacagatatgaggaggccaacaacaaccagtacagcgagggcgtgcagcgggaggcccagagaattgccctgcggctgggcaatggaaatgacaagaaggagatgaacaagagtgacctgaacaccaacaacctgctcttcaagccccctgtggagagccacatccagaagaacaagaagatcctgaagagcgccaaggacctgcccccagatgccctgatcatcgagtaccggggcaagttcatgctgcgggagcagtttgaggccaacggctacttcttcaagaggccctacccctttgtgctcttctacagcaagttccacggcctggagatgtgtgtggatgcccggacctttggaaatgaggcccgcttcatccgccgcagctgcaccccaaatgctgaggtgagacatgagatccaggacggcaccatccacctgtacatctacagcatccacagcatccccaagggcacagagatcaccatcgcctttgattttgattatggcaactgcaagtacaaggtggactgtgcctgcctgaaggagaacccagaatgtcctgtgctgaagaggagcagcgagagcatggagaacatcaacagcggctatgagaccaggaggaagaagggcaagaaggacaaggacatcagcaaggagaaggacacccagaaccagaacatcaccctggactgtgagggcaccaccaacaagatgaagagccctgagaccaagcagaggaagctgagccccctgcggctgtctgtgagcaacaaccaggagccagacttcattgatgacatcgaggagaagacccccatcagcaatgaggtggagatggagagcgaggagcagattgctgagaggaagaggaagatgacccgggaggagaggaagatggaggccatcctgcaggcctttgcccggctggagaagcgggagaagagaagagagcaggccctggagcgcatcagcacagccaagacagaggtgaagacagagtgcaaggacacccagatcgtgtctgatgctgaggtgatccaggagcaggccaaggaggagaatgccagcaagcccaccccagccaaggtgaacagaaccaagcagaggaagagcttcagccgcagcaggacccacatcggccagcagaggcggcggcacaggacagtgtccatgtgcagcgacatccagcccagcagcccagacatcgaggtgaccagccagcagaatgacatcgagaacacagtgctgaccatcgagcctgagacagaaacagccctggccgagatcatcacagaaacagaggtgcctgccctgaacaagtgccccaccaagtaccccaagaccaagaagcacctggtgaatgagtggctgtctgagaagaatgagaagacaggcaagcccagtgatggcctgtctgagcggcccctgcgcatcaccacagatcctgaggtgctggccacccagctgaacagcctgcccggcctgacctacagcccccacgtgtacagcacccccaagcactacatccgcttcaccagccccttcctgtctgagaagagaagaaggaaggagcccacagagaacatcagcggcagctgcaagaagcgctggctgaagcaggccctggaggaggagaacagcgccatcctgcaccgcttcaacagcccctgccaggagaggagccgcagccctgctgtgaatggagagaacaagagccccctgctgctgaatgacagctgcagcctgcctgacctgaccacccccctgaagaagaggcgcttctaccagctgctggacagcgtgtacagcgagaccagcacccccacccccagcccctatgccacccccacccacacagacatcacccccatggaccccagctttgccaccccaccccgcatcaagagtgatgatgagacctgcagaaatggctacaagcccatctacagccctgtgacccctgtgaccccaggcaccccaggcaacaccatgcactttgagaacatcagcagccctgagagcagccctgagatcaagaggaggacctacagccaggagggctatgacaggagcagcaccatgctgaccctgggccccttcaggaacagcaacctgacagagctgggcctgcaggagatcaagaccatcggctacaccagccccaggagcaggacagaggtgaaccggcagtgccctggagagaaggagcctgtgtctgacctgcagctgggcctggatgctgtggagcccacagccctgcacaagaccctggagaccccagcccatgacagagctgagcccaacagccagctggacagcacccacagcggccggggcaccatgtacagctcctgggtgaagagcccagacagaactggagtgaacttctctgtgaacagcaacctgcgggacctgacccccagccaccagctggaggtgggcggcggcttccgcatcagcgagagcaagtgcctgatgcaggatgacacccggggcatgttcatggagaccaccgtcttctgcaccagtgaagatggcctggtgtctggctttggaagaacagtgaatgacaacctgattgatggcaactgcaccccccagaaccccccccagaagaagaaggtgtccctgctggagtacaggaagaggcagcgggaggccaggaagagcggcagcaagacagagaacttccccctcatctctgtgagcccccacgccagcggcagcctgagcaacaatggagatggctgtgccagcagcaatgacaatggagagcaggtggaccacacagccagcctgcccctgcccaccccagccaccgtgtacaatgccaccagcgaggagaccagcaacaactgccctgtgaaggatgccacagccagcgagaagaatgaacctgaggtgcagtggacagccagcacctctgtggagcaggtgcgggagaggagctaccagagggccctgctgctgagtgaccacaggaaggacaaggacagcggcggggagagcccctgtgtgtcctgcagccccagccacgtgcagagcagccccagcagccacagcaaccacatcccccagctgcaggccaagggccctgtgcccagcttcagcgagctgatggaggaccctgaccctgagaaccctgagcccaccaccaccaatgaatgtcccagcccagacaccagccagaacacctgcaagagcccccccaagatgagcaagccaggcagccctggcagcgtcatcccagcccaggcccacggcaagatcttcaccaagccagacccccagtgggacagcacagtgtctgccagcgaggccgagaatggagtgcacctgaagacagagctgcagcagaagcagctgagcaacaacaaccaggccctgagcaagaaccaccccccccagacccacgtgaggaacagcagcgagcagctgagccagaagctgcccagcgtgcccaccaagctgcactgcccccccagcccccacctggagaacccccccaagagcagcaccccccacacccctgtgcagcacggctacctgagccccaagccacccagccagcagctgggcagcccctaccggccccaccacagccagagcccccaggtgggcaccccccagcgggagccccagaggaacttctacccagctgcccagaacctgcctgccaacacccagcaggccaccagcggcaccctcttcacccagacccccagcggccagagcagcgccacctacagccagttcaaccagcagagcctgaacagcacagcccctcctcctcctcctcctcctccacccagcagcagctactaccagaaccagcagcccagcgccaacttccagaactacaaccagctgaagggcagcctgagccagcagaccgtcttcaccagcggccccaaccaggccctgcccggcaccaccagccagcagacagtgcccggccaccacgtgaccccaggccacttcctgcccagccagaaccccaccatccaccaccagacagctgctgctgtggtgcccccacctcctcctcctcctccagcccctggcccccacctggtgcagcagcccaacagccaccagcagcacagcgtggcccacgtggtgggccctgtgcatgctgtgaccccaggcagccacatccacagccagacagctggccaccacctgcccccacctcctcctcctcctggccctgccccccaccaccaccccccaccccaccccagcacaggcctgcagggcctgcaggcccagcaccagcacgtggtgaacagcgcccctcctcctcctcctcctcctccacccagctctgtgctggccagcggccaccacaccaccagcgcccaggccctgcaccaccccccccaccagggccccccactcttccccagcagcgcccaccccaccgtgcccccctaccccagccaggccacccaccacaccaccctgggccctggcccccagcaccagcccagcggcaccggcccccactgccccctgcctgtgacaggcccccacctgcagccccagggccccaacagcatccccacccccacagccagcggcttctgcccccaccctggctctgtggccctgccccacggcgtgcagggcccccagcaggccagccctgtgcccggccagatccccatccaccgggcccaggtgccccccaccttccagaacaactaccacggcagcggctggcactag

SEQ ID NO: 160658 - DNA, 5577 bp, synthetic construct; identical to SEQ ID NO: 160657
  misc_feature 1..5577: note = Description of Artificial Sequence: Synthetic coding sequence
  source 1..5577: mol_type = other DNA

SEQ ID NO: 160659 - DNA, 5451 bp, synthetic construct
  misc_feature 1..5451: note = Description of Artificial Sequence: Synthetic coding sequence
  source 1..5451: mol_type = other DNA
atgagcatcgtcatccccctgggcgtggacacagctgagaccagctacctggagatggctgctggcagcgagcctgagagcgtggaggccagccctgtggtggtggagaagagcaacagctacccccaccagctgtacaccagcagcagccaccacagccacagctacatcggcctgccctatgctgaccacaactacggggcccggcccccacccaccccaccagccagccccccaccttctgtgctgatcagcaagaatgaggtgggcatcttcaccacccccaactttgatgagaccagcagcgccaccaccatcagcaccagtgaagatggcagctatggaacagatgtgacccgctgcatctgtggcttcacccatgatgatggctacatgatctgctgtgacaagtgcagcgtgtggcagcacatcgactgcatgggcatcgaccggcagcacatcccagacacctacctgtgtgagcgctgccagcccaggaacctggacaaggagagagctgtgctgctgcagaggaggaagcgggagaacatgtctgatggagacaccagcgccacagagagcggagatgaggtgcctgtggagctgtacacagccttccagcacacccccaccagcatcaccctgacagccagccgggtgtccaaggtgaatgacaagaggaggaagaagtctggagagaaggagcagcacatcagcaagtgcaagaaggccttccgggagggcagcaggaagagcagccgggtgaagggcagcgcccctgagattgaccccagcagtgatggcagcaactttggctgggagaccaagatcaaggcctggatggacagatatgaggaggccaacaacaaccagtacagcgagggcgtgcagcgggaggcccagagaattgccctgcggctgggcaatggaaatgacaagaaggagatgaacaagagtgacctgaacaccaacaacctgctcttcaagccccctgtggagagccacatccagaagaacaagaagatcctgaagagcgccaaggacctgcccccagatgccctgatcatcgagtaccggggcaagttcatgctgcgggagcagtttgaggccaacggctacttcttcaagaggccctacccctttgtgctcttctacagcaagttccacggcctggagatgtgtgtggatgcccggacctttggaaatgaggcccgcttcatccgccgcagctgcaccccaaatgctgaggtgagacatgagatccaggacggcaccatccacctgtacatctacagcatccacagcatccccaagggcacagagatcaccatcgcctttgattttgattatggcaactgcaagtacaaggtggactgtgcctgcctgaaggagaacccagaatgtcctgtgctgaagaggagcagcgagagcatggagaacatcaacagcggctatgagaccaggaggaagaagggcaagaaggacaaggacatcagcaaggagaaggacacccagaaccagaacatcaccctggactgtgagggcaccaccaacaagatgaagagccctgagaccaagcagaggaagctgagccccctgcggctgtctgtgagcaacaaccaggagccagacttcattgatgacatcgaggagaagacccccatcagcaatgaggtggagatggagagcgaggagcagattgctgagaggaagaggaagatgacccgggaggagaggaagatggaggccatcctgcaggcctttgcccggctggagaagcgggagaagagaagagagcaggccctggagcgcatcagcacagccaagacagaggtgaagacagagtgcaaggacacccagatcgtgtctgatgctgaggtgatccaggagcaggccaaggaggagaatgccagcaagcccaccccagccaaggtgaacagaaccaagcagaggaagagcttcagccgcagcaggacccacatcggccagcagaggcggcggcacaggacagtgtccatgtgcagcgacatccagcccagcagcccagacatcgaggtgaccagccagcagaatgacatcgagaacacagtgctgaccatcgagcctgagacagaaacagccctggccgagatcatcacagaaacagaggtgcctgccctgaacaagtgccccaccaagtaccccaagaccaagaagcacctggtgaatgagtggctgtctgagaagaatgagaagacaggcaagcccagtgatggcctgtctgagcggcccctgcgcatcaccacagatcctgaggtgctggccacccagctgaacagcctgcccggcctgacctacagcccccacgtgtacagcacccccaagcactacatccgcttcaccagccccttcctgtctgagaagagaagaaggaaggagcccacagagaacatcagcggcagctgcaagaagcgctggctgaagcaggccctggaggaggagaacagcgccatcctgcaccgcttcaacagcccctgccaggagaggagccgcagccctgctgtgaatggagagaacaagagccccctgctgctgaatgacagctgcagcctgcctgacctgaccacccccctgaagaagaggcgcttctaccagctgctggacagcgtgtacagcgagaccagcacccccacccccagcccctatgccacccccacccacacagacatcacccccatggaccccagctttgccaccccaccccgcatcaagagtgatgatgagacctgcagaaatggctacaagcccatctacagccctgtgacccctgtgaccccaggcaccccaggcaacaccatgcactttgagaacatcagcagccctgagagcagccctgagatcaagaggaggacctacagccaggagggctatgacaggagcagcaccatgctgaccctgggccccttcaggaacagcaacctgacagagctgggcctgcaggagatcaagaccatcggctacaccagccccaggagcaggacagaggtgaaccggcagtgccctggagagaaggagcctgtgtctgacctgcagctgggcctggatgctgtggagcccacagccctgcacaagaccctggagaccccagcccatgacagagctgagcccaacagccagctggacagcacccacagcggccggggcaccatgtacagctcctgggtgaagagcccagacagaactggagtgaacttctctgtgaacagcaacctgcgggacctgacccccagccaccagctggaggtgggcggcggcttccgcatcagcgagagcaagtgcctgatgcaggatgacacccggggcatgttcatggagaccaccgtcttctgcaccagtgaagatggcctggtgtctggctttggaagaacagtgaatgacaacctgattgatggcaactgcaccccccagaaccccccccagaagaagaaggtgtccctgctggagtacaggaagaggcagcgggaggccaggaagagcggcagcaagacagagaacttccccctcatctctgtgagcccccacgccagcggcagcctgagcaacaatggagatggctgtgccagcagcaatgacaatggagagcaggtggaccacacagccagcctgcccctgcccaccccagccaccgtgtacaatgccaccagcgaggagaccagcaacaactgccctgtgaaggatgccacagccagcgagaagaatgaacctgaggtgcagtggacagccagcacctctgtggagcaggtgcgggagaggagctaccagagggccctgctgctgagtgaccacaggaaggacaaggacagcgaccctgaccctgagaaccctgagcccaccaccaccaatgaatgtcccagcccagacaccagccagaacacctgcaagagcccccccaagatgagcaagccaggcagccctggcagcgtcatcccagcccaggcccacggcaagatcttcaccaagccagacccccagtgggacagcacagtgtctgccagcgaggccgagaatggagtgcacctgaagacagagctgcagcagaagcagctgagcaacaacaaccaggccctgagcaagaaccaccccccccagacccacgtgaggaacagcagcgagcagctgagccagaagctgcccagcgtgcccaccaagctgcactgcccccccagcccccacctggagaacccccccaagagcagcaccccccacacccctgtgcagcacggctacctgagccccaagccacccagccagcagctgggcagcccctaccggccccaccacagccagagcccccaggtgggcaccccccagcgggagccccagaggaacttctacccagctgcccagaacctgcctgccaacacccagcaggccaccagcggcaccctcttcacccagacccccagcggccagagcagcgccacctacagccagttcaaccagcagagcctgaacagcacagcccctcctcctcctcctcctcctccacccagcagcagctactaccagaaccagcagcccagcgccaacttccagaactacaaccagctgaagggcagcctgagccagcagaccgtcttcaccagcggccccaaccaggccctgcccggcaccaccagccagcagacagtgcccggccaccacgtgaccccaggccacttcctgcccagccagaaccccaccatccaccaccagacagctgctgctgtggtgcccccacctcctcctcctcctccagcccctggcccccacctggtgcagcagcccaacagccaccagcagcacagcgtggcccacgtggtgggccctgtgcatgctgtgaccccaggcagccacatccacagccagacagctggccaccacctgcccccacctcctcctcctcctggccctgccccccaccaccaccccccaccccaccccagcacaggcctgcagggcctgcaggcccagcaccagcacgtggtgaacagcgcccctcctcctcctcctcctcctccacccagctctgtgctggccagcggccaccacaccaccagcgcccaggccctgcaccaccccccccaccagggccccccactcttccccagcagcgcccaccccaccgtgcccccctaccccagccaggccacccaccacaccaccctgggccctggcccccagcaccagcccagcggcaccggcccccactgccccctgcctgtgacaggcccccacctgcagccccagggccccaacagcatccccacccccacagccagcggcttctgcccccaccctggctctgtggccctgccccacggcgtgcagggcccccagcaggccagccctgtgcccggccagatccccatccaccgggcccaggtgccccccaccttccagaacaactaccacggcagcggctggcactag

SEQ ID NO: 160660 - DNA, 1770 bp, synthetic construct
  misc_feature 1..1770: note = Description of Artificial Sequence: Synthetic coding sequence
  source 1..1770: mol_type = other DNA
atgcactttgagaacatcagcagccctgagagcagccctgagatcaagaggaggacctacagccaggagggctatgacaggagcagcaccatgctgaccctgggccccttcaggaacagcaacctgacagagctgggcctgcaggagatcaagaccatcggctacaccagccccaggagcaggacagaggtgaaccggcagtgccctggagagaaggagcctgtgtctgacctgcagctgggcctggatgctgtggagcccacagccctgcacaagaccctggagaccccagcccatgacagagctgagcccaacagccagctggacagcacccacagcggccggggcaccatgtacagctcctgggtgaagagcccagacagaactggagtgaacttctctgtgaacagcaacctgcgggacctgacccccagccaccagctggaggtgggcggcggcttccgcatcagcgagagcaagtgcctgatgcaggatgacacccggggcatgttcatggagaccaccgtcttctgcaccagtgaagatggcctggtgtctggcttcggccgcacagtgaatgacaacctgattgatggcaactgcaccccccagaaccccccccagaagaagaaggtgtccctgctggagtacaggaagaggcagcgggaggccaggaagagcggcagcaagacagagaacttccccctcatctctgtgagcccccacgccagcggcagcctgagcaacaatggagatggctgtgccagcagcaatgacaacggggagcaggtggaccacacagccagcctgcccctgcccaccccagccaccgtgtacaatgccaccagcgaggagaccagcaacaactgccctgtgaaggatgccacagccagcgagaagaatgaacctgaggtgcagtggacagccagcacctctgtggagcaggtgcgggagaggagctaccagagggccctgctgctgagtgaccacaggaaggacaaggacagcggcggggagagcccctgtgtgtcctgcagccccagccacgtgcagagcagccccagcagccacagcaaccacatcccccagctgcaggccaagggccctgtgcccagcttcagcgagctgatggaggaccctgaccctgaaaatcctgagcccaccaccaccaatgaatgtcccagcccagacaccagccagaacacctgcaagagcccccccaagatgagcaagccaggcagccctggcagcgtcatcccagcccaggcccacggcaagatcttcaccaagccagacccccagtgggacagcacagtgtctgccagcgaggctgaaaatggagtgcacctgaagacagagctgcagcagaagcagctgagcaacaacaaccaggccctgagcaagaaccaccccccccagacccacgtgaggaacagcagcgagcagctgagccagaagctgcccagcgtgcccaccaagctgcactgcccccccagcccccacctggagaacccccccaagagcagcaccccccacacccctgtgcagcacggctacctgagccccaagccacccagccagcagctgggcagcccctaccggccccaccacagccagagcccccaggtgggcaccccccagcgggagccccagaggaacttctacccagctgcccagaacctgcctgccaacacccagcaggccaccagcggcaccctcttcacccagaccccatctggccagagcagcgccacctacacccagaggtag

SEQ ID NO: 160661 - DNA, 5337 bp, synthetic construct
  misc_feature 1..5337: note = Description of Artificial Sequence: Synthetic coding sequence
  source 1..5337: mol_type = other DNA
atgagcatcgtcatccccctgggcgtggacacagctgagaccagctacctggagatggctgctggcagcgagcctgagagcgtggaggccagccctgtggtggtggagaagagcaacagctacccccaccagctgtacaccagcagcagccaccacagccacagctacatcggcctgccctatgctgaccacaactacggggcccggcccccacccaccccaccagccagccccccaccttctgtgctgatcagcaagaatgaggtgggcatcttcaccacccccaactttgatgagaccagcagcgccaccaccatcagcaccagtgaagatggcagctatggaacagatgtgacccgctgcatctgtggcttcacccatgatgatggctacatgatctgctgtgacaagtgcagcgtgtggcagcacatcgactgcatgggcatcgaccggcagcacatcccagacacctacctgtgtgagcgctgccagcccaggaacctggacaaggagagagctgtgctgctgcagaggaggaagcgggagaacatgtctgatggagacaccagcgccacagagagcggagatgaggtgcctgtggagctgtacacagccttccagcacacccccaccagcatcaccctgacagccagccgggtgtccaaggtgaatgacaagaggaggaagaagtctggagagaaggagcagcacatcagcaagtgcaagaaggccttccgggagggcagcaggaagagcagccgggtgaagggcagcgcccctgagattgaccccagcagtgatggcagcaactttggctgggagaccaagatcaaggcctggatggacagatatgaggaggccaacaacaaccagtacagcgagggcgtgcagcgggaggcccagagaattgccctgcggctgggcaatggaaatgacaagaaggagatgaacaagagtgacctgaacaccaacaacctgctcttcaagccccctgtggagagccacatccagaagaacaagaagatcctgaagagcgccaaggacctgcccccagatgccctgatcatcgagtaccggggcaagttcatgctgcgggagcagtttgaggccaacggctacttcttcaagaggccctacccctttgtgctcttctacagcaagttccacggcctggagatgtgtgtggatgcccggacctttggaaatgaggcccgcttcatccgccgcagctgcaccccaaatgctgaggtgagacatgagatccaggacggcaccatccacctgtacatctacagcatccacagcatccccaagggcacagagatcaccatcgcctttgattttgattatggcaactgcaagtacaaggtggactgtgcctgcctgaaggagaacccagaatgtcctgtgctgaagaggagcagcgagagcatggagaacatcaacagcggctatgagaccaggaggaagaagggcaagaagacccgggaggagaggaagatggaggccatcctgcaggcctttgcccggctggagaagcgggagaagagaagagagcaggccctggagcgcatcagcacagccaagacagaggtgaagacagagtgcaaggacacccagatcgtgtctgatgctgaggtgatccaggagcaggccaaggaggagaatgccagcaagcccaccccagccaaggtgaacagaaccaagcagaggaagagcttcagccgcagcaggacccacatcggccagcagaggcggcggcacaggacagtgtccatgtgcagcgacatccagcccagcagcccagacatcgaggtgaccagccagcagaatgacatcgagaacacagtgctgaccatcgagcctgagacagaaacagccctggccgagatcatcacagaaacagaggtgcctgccctgaacaagtgccccaccaagtaccccaagaccaagaagcacctggtgaatgagtggctgtctgagaagaatgagaagacaggcaagcccagtgatggcctgtctgagcggcccctgcgcatcaccacagatcctgaggtgctggccacccagctgaacagcctgcccggcctgacctacagcccccacgtgtacagcacccccaagcactacatccgcttcaccagccccttcctgtctgagaagagaagaaggaaggagcccacagagaacatcagcggcagctgcaagaagcgctggctgaagcaggccctggaggaggagaacagcgccatcctgcaccgcttcaacagcccctgccaggagaggagccgcagccctgctgtgaatggagagaacaagagccccctgctgctgaatgacagctgcagcctgcctgacctgaccacccccctgaagaagaggcgcttctaccagctgctggacagcgtgtacagcgagaccagcacccccacccccagcccctatgccacccccacccacacagacatcacccccatggaccccagctttgccaccccaccccgcatcaagagtgatgatgagacctgcagaaatggctacaagcccatctacagccctgtgacccctgtgaccccaggcaccccaggcaacaccatgcactttgagaacatcagcagccctgagagcagccctgagatcaagaggaggacctacagccaggagggctatgacaggagcagcaccatgctgaccctgggccccttcaggaacagcaacctgacagagctgggcctgcaggagatcaagaccatcggctacaccagccccaggagcaggacagaggtgaaccggcagtgccctggagagaaggagcctgtgtctgacctgcagctgggcctggatgctgtggagcccacagccctgcacaagaccctggagaccccagcccatgacagagctgagcccaacagccagctggacagcacccacagcggccggggcaccatgtacagctcctgggtgaagagcccagacagaactggagtgaacttctctgtgaacagcaacctgcgggacctgacccccagccaccagctggaggtgggcggcggcttccgcatcagcgagagcaagtgcctgatgcaggatgacacccggggcatgttcatggagaccaccgtcttctgcaccagtgaagatggcctggtgtctggctttggaagaacagtgaatgacaacctgattgatggcaactgcaccccccagaaccccccccagaagaagaaggtgtccctgctggagtacaggaagaggcagcgggaggccaggaagagcggcagcaagacagagaacttccccctcatctctgtgagcccccacgccagcggcagcctgagcaacaatggagatggctgtgccagcagcaatgacaatggagagcaggtggaccacacagccagcctgcccctgcccaccccagccaccgtgtacaatgccaccagcgaggagaccagcaacaactgccctgtgaaggatgccacagccagcgagaagaatgaacctgaggtgcagtggacagccagcacctctgtggagcaggtgcgggagaggagctaccagagggccctgctgctgagtgaccacaggaaggacaaggacagcggcggggagagcccctgtgtgtcctgcagccccagccacgtgcagagcagccccagcagccacagcaaccacatcccccagctgcaggccaagggccctgtgcccagcttcagcgagctgatggaggaccctgaccctgagaaccctgagcccaccaccaccaatgaatgtcccagcccagacaccagccagaacacctgcaagagcccccccaagatgagcaagccaggcagccctggcagcgtcatcccagcccaggcccacggcaagatcttcaccaagccagacccccagtgggacagcacagtgtctgccagcgaggccgagaatggagtgcacctgaagacagagctgcagcagaagcagctgagcaacaacaaccaggccctgagcaagaaccaccccccccagacccacgtgaggaacagcagcgagcagctgagccagaagctgcccagcgtgcccaccaagctgcactgcccccccagcccccacctggagaacccccccaagagcagcaccccccacacccctgtgcagcacggctacctgagccccaagccacccagccagcagctgggcagcccctaccggccccaccacagccagagcccccaggtgggcaccccccagcgggagccccagaggaacttctacccagctgcccagaacctgcctgccaacacccagcaggccaccagcggcaccctcttcacccagacccccagcggccagagcagcgccacctacagccagttcaaccagcagagcctgaacagcacagcccctcctcctcctcctcctcctccacccagcagcagctactaccagaaccagcagcccagcgccaacttccagaactacaaccagctgaagggcagcctgagccagcagaccgtcttcaccagcggccccaaccaggccctgcccggcaccaccagccagcagacagtgcccggccaccacgtgaccccaggccacttcctgcccagccagaaccccaccatccaccaccagacagctgctgctgtggtgcccccacctcctcctcctcctccagcccctggcccccacctggtgcagcagcccaacagccaccagcagcacagcgtggcccacgtggtgggccctgtgcatgctgtgaccccaggcagccacatccacagccagacagctggccaccacctgcccccacctcctcctcctcctggccctgccccccaccaccaccccccaccccaccccagcacaggcctgcagggcctgcaggcccagcaccagcacgtggtgaacagcgcccctcctcctcctcctcctcctccacccagctctgtgctggccagcggccaccacaccaccagcgcccaggccctgcaccaccccccccaccagggccccccactcttccccagcagcgcccaccccaccgtgcccccctaccccagccaggccacccaccacaccaccctgggccctggcccccagcaccagcccagcggcaccggcccccactgccccctgcctgtgacaggcccccacctgcagccccagggccccaacagcatccccacccccacagccagcggcttctgcccccaccctggctctgtggccctgccccacggcgtgcagggcccccagcaggccagccctgtgcccggccagatccccatccaccgggcccaggtgccccccaccttccagaacaactaccacggcagcggctggcactag

SEQ ID NO: 160662 - DNA, 4962 bp, synthetic construct
  misc_feature 1..4962: note = Description of Artificial Sequence: Synthetic coding sequence
  source 1..4962: mol_type = other DNA
atgagcatcgtcatccccctgggcgtggacacagctgagaccagctacctggagatggctgctggcagcgagcctgagagcgtggaggccagccctgtggtggtggagaagagcaacagctacccccaccagctgtacaccagcagcagccaccacagccacagctacatcggcctgccctatgctgaccacaactacggggcccggcccccacccaccccaccagccagccccccaccttctgtgctgatcagcaagaatgaggtgggcatcttcaccacccccaactttgatgagaccagcagcgccaccaccatcagcaccagtgaagatggcagctatggaacagatgtgacccgctgcatctgtggcttcacccatgatgatggctacatgatctgctgtgacaagtgcagcgtgtggcagcacatcgactgcatgggcatcgaccggcagcacatcccagacacctacctgtgtgagcgctgccagcccaggaacctggacaaggagagagctgtgctgctgcagaggaggaagcgggagaacatgtctgatggagacaccagcgccacagagagcggagatgaggtgcctgtggagctgtacacagccttccagcacacccccaccagcatcaccctgacagccagccgggtgtccaaggtgaatgacaagaggaggaagaagtctggagagaaggagcagcacatcagcaagtgcaagaaggccttccgggagggcagcaggaagagcagccgggtgaagggcagcgcccctgagattgaccccagcagtgatggcagcaactttggctgggagaccaagatcaaggcctggatggacagatatgaggaggccaacaacaaccagtacagcgagggcgtgcagcgggaggcccagagaattgccctgcggctgggcaatggaaatgacaagaaggagatgaacaagagtgacctgaacaccaacaacctgctcttcaagccccctgtggagagccacatccagaagaacaagaagatcctgaagagcgccaaggacctgcccccagatgccctgatcatcgagtaccggggcaagttcatgctgcgggagcagtttgaggccaacggctacttcttcaagaggccctacccctttgtgctcttctacagcaagttccacggcctggagatgtgtgtggatgcccggacctttggaaatgaggcccgcttcatccgccgcagctgcaccccaaatgctgaggtgagacatgagatccaggacggcaccatccacctgtacatctacagcatccacagcatccccaagggcacagagatcaccatcgcctttgattttgattatggcaactgcaagtacaaggtggactgtgcctgcctgaaggagaacccagaatgtcctgtgctgaagaggagcagcgagagcatggagaacatcaacagcggctatgagaccaggaggaagaagggcaagaaggacaaggacatcagcaaggagaaggacacccagaaccagaacatcaccctggactgtgagggcaccaccaacaagatgaagagccctgagaccaagcagaggaagctgagccccctgcggctgtctgtgagcaacaaccaggagccagacttcattgatgacatcgaggagaagacccccatcagcaatgaggtggagatggagagcgaggagcagattgctgagaggaagaggaagatgacccgggaggagaggaagatggaggccatcctgcaggcctttgcccggctggagaagcgggagaagagaagagagcaggccctggagcgcatcagcacagccaagacagaggtgaagacagagtgcaaggacacccagatcgtgtctgatgctgaggtgatccaggagcaggccaaggaggagaatgccagcaagcccaccccagccaaggtgaacagaaccaagcagaggaagagcttcagccgcagcaggacccacatcggccagcagaggcggcggcacaggacagtgtccatgtgcagcgacatccagcccagcagcccagacatcgaggtgaccagccagcagaatgacatcgagaacacagtgctgaccatcgagcctgagacagaaacagccctggccgagatcatcacagaaacagaggtgcctgccctgaacaagtgccccaccaagtaccccaagaccaagaagcacctggtgaatgagtggctgtctgagaagaatgagaagacaggcaagcccagtgatggcctgtctgagcggcccctgcgcatcaccacagatcctgaggtgctggccacccagctgaacagcctgcccggcctgacctacagcccccacgtgtacagcacccccaagcactacatccgcttcaccagccccttcctgtctgagaagagaagaaggaaggagcccacagagaacatcagcggcagctgcaagaagcgctggctgaagcaggccctggaggaggagaacagcgccatcctgcaccgcttcaacagcccctgccaggagaggagccgcagccctgctgtgaatggagagaacaagagccccctgctgctgaatgacagctgcagcctgcctgacctgaccacccccctgaagaagaggcgcttctaccagctgctggacagcgtgtacagcgagaccagcacccccacccccagcccctatgccacccccacccacacagacatcacccccatggaccccagctttgccaccccaccccgcatcaagagtgatgatgagacctgcagaaatggctacaagcccatctacagccctgtgacccctgtgaccccaggcaccccaggcaacaccatgcactttgagaacatcagcagccctgagagcagccctgagatcaagaggaggacctacagccaggagggctatgacaggagcagcaccatgctgaccctgggccccttcaggaacagcaacctgacagagctgggcctgcaggagatcaagaccatcggctacaccagccccaggagcaggacagaggtgaaccggcagtgccctggagagaaggagcctgtgtctgacctgcagctgggcctggatgctgtggagcccacagccctgcacaagaccctggagaccccagcccatgacagagctgagcccaacagccagctggacagcacccacagcggccggggcaccatgtacagctcctgggtgaagagcccagacagaactggagtgaacttctctgtgaacagcaacctgcgggacctgacccccagccaccagctggaggtgggcggcggcttccgcatcagcgagagcaagtgcctgatgcaggatgacacccggggcatgttcatggagaccaccgtcttctgcaccagtgaagatggcctggtgtctggctttggaagaacagtgaatgacaacctgattgatggcaactgcaccccccagaaccccccccagaagaagaaggtgtccctgctggagtacaggaagaggcagcgggaggccaggaagagcggcagcaagacagagaacttccccctcatctctgtgagcccccacgccagcggcagcctgagcaacaatggagatggctgtgccagcagcaatgacaatggagagcaggtggaccacacagccagcctgcccctgcccaccccagccaccgtgtacaatgccaccagcgaggagaccagcaacaactgccctgtgaaggatgccacagccagcgagaagaatgaacctgaggtgcagtggacagccagcacctctgtggagcaggtgcgggagaggagctaccagagggccctgctgctgagtgaccacaggaaggacaaggacagcggcggggagagcccctgtgtgtcctgcagccccagccacgtgcagagcagccccagcagccacagcaaccacatcccccagctgcaggccaagggccctgtgcccagcttcagcgagctgatggaggaccctgaccctgagaaccctgagcccaccaccaccaatgaatgtcccagcccagacaccagccagaacacctgcaagagcccccccaagatgagcaagccaggcagccctggcagcgtcatcccagcccaggcccacggcaagatcttcaccaagccagacccccagtgggacagcacagtgtctgccagcgaggccgagaatggagtgcacctgaagacagagctgcagcagaagcagctgagcaacaacaaccaggccctgagcaagaaccaccccccccagacccacgtgaggaacagcagcgagcagctgagccagaagctgcccagcgtgcccaccaagctgcactgcccccccagcccccacctggagaacccccccaagagcagcaccccccacacccctgtgcagcacggctacctgagccccaagccacccagccagcagctgggcagcccctaccggccccaccacagccagagcccccaggtgggcaccccccagcgggagccccagaggaacttctacccagctgcccagaacctgcctgtgttctggctgctgggcatcatcccccaccagctgaagccctacaccacccacctgatcaaggacctgcacttcttcctgcgggtgctgatccagctgtaccaccgcatcccccacaagctgcacatcatccccctgtgggaccgggaccccagcaccagcctgctggagcagggccacatcgtgcactacctgagccaggtgctgatcagcagccccaaggaccagaccgtcttccagcacctgctgctgcagggctctgtgctgatcctggccctgtggccctgccacatgggcttcaaggacctgagccgccacctgcagtgcctggaccgcttccagttcacagagcaccgctgccaccagcacttcaagaccatcaccatgggccagggcggcatcaagatggacagcaagaacatcttcctgaatgtgctgtag

SEQ ID NO: 160663 - DNA, 378 bp, synthetic construct
  misc_feature 1..378: note = Description of Artificial Sequence: Synthetic coding sequence
  source 1..378: mol_type = other DNA
tgaggaagcctgagcaacaatggagatggctgtgccagcagcaatgacaatggagagcaggtggaccacacagccagcctgcccctgcccaccccagccaccgtgtacaatgccaccagcgaggagaccagcaacaactgccctgtgaaggatgccacagccagcgagaagaatgaacctgaggtgcagtggacagccagcacctctgtggagcaggtgcgggagaggagctaccagagggccctgctgctgagtgaccacaggaaggacaaggacagcgaccctgaccctgagaaccctgagcccaccaccaccaatgaatgtcccagcccagacaccagccagaacacctgcaagagcccccccaagatgtcctag

SEQ ID NO: 160664 - DNA, 216 bp, synthetic construct
  misc_feature 1..216: note = Description of Artificial Sequence: Synthetic coding sequence
  source 1..216: mol_type = other DNA
atgagcatcgtcatccccctgggcgtggacacagctgagaccagctacctggagatggctgctggcagcgagcctgagagcgtggaggccagccctgtggtggtggagaagagcaacagctacccccaccagctgtacaccagcagcagccaccacagccacagctacatcggcctgccctatgctgaccacaactacggggcccggcccccatag

SEQ ID NO: 160665 - DNA, 1830 bp, synthetic construct
  misc_feature 1..1830: note = Description of Artificial Sequence: Synthetic coding sequence
  source 1..1830: mol_type = other DNA
atgagcatcgtcatccccctgggcgtggacacagctgagaccagctacctggagatggctgctggcagcgagcctgagagcgtggaggccagccctgtggtggtggagaagagcaacagctacccccaccagctgtacaccagcagcagccaccacagccacagctacatcggcctgccctatgctgaccacaactacggggcccggcccccacccaccccaccagccagccccccaccttctgtgctgatcagcaagaatgaggtgggcatcttcaccacccccaactttgatgagaccagcagcgccaccaccatcagcaccagtgaagatggcagctatggaacagatgtgacccgctgcatctgtggcttcacccatgatgatggctacatgatctgctgtgacaagtgcagcgtgtggcagcacatcgactgcatgggcatcgaccggcagcacatcccagacacctacctgtgtgagcgctgccagcccaggaacctggacaaggagagagctgtgctgctgcagaggaggaagcgggagaacatgtctgatggagacaccagcgccacagagagcggagatgaggtgcctgtggagctgtacacagccttccagcacacccccaccagcatcaccctgacagccagccgggtgtccaaggtgaatgacaagaggaggaagaagtctggagagaaggagcagcacatcagcaagtgcaagaaggccttccgggagggcagcaggaagagcagccgggtgaagggcagcgcccctgagattgaccccagcagtgatggcagcaactttggctgggagaccaagatcaaggcctggatggacagatatgaggaggccaacaacaaccagtacagcgagggcgtgcagcgggaggcccagagaattgccctgcggctgggcaatggaaatgacaagaaggagatgaacaagagtgacctgaacaccaacaacctgctcttcaagccccctgtggagagccacatccagaagaacaagaagatcctgaagagcgccaaggacctgcccccagatgccctgatcatcgagtaccggggcaagttcatgctgcgggagcagtttgaggccaacggctacttcttcaagaggccctacccctttgtgctcttctacagcaagttccacggcctggagatgtgtgtggatgcccggacctttggaaatgaggcccgcttcatccgccgcagctgcaccccaaatgctgaggtgagacatgagatccaggacggcaccatccacctgtacatctacagcatccacagcatccccaagggcacagagatcaccatcgcctttgattttgattatggcaactgcaagtacaaggtggactgtgcctgcctgaaggagaacccagaatgtcctgtgctgaagaggagcagcgagagcatggagaacatcaacagcggctatgagaccaggaggaagaagggcaagaaggacaaggacatcagcaaggagaaggacacccagaaccagaacatcaccctggactgtgagggcaccaccaacaagatgaagagccctgagaccaagcagaggaagctgagccccctgcggctgtctgtgagcaacaaccaggagccagacttcattgatgacatcgaggagaagacccccatcagcaatgaggtggagatggagagcgaggagcagattgctgagaggaagaggaagatggtgtcctgggaggccagcagcctgggcctggtgacagctgccctgcacatggtgattgtggccgccttcacctgggccttcaccctcttctttgaggtgtctgagtag

SEQ ID NO: 160666 - DNA, 693 bp, synthetic construct
  misc_feature 1..693: note = Description of Artificial Sequence: Synthetic coding sequence
  source 1..693: mol_type = other DNA
atgagcatcgtcatccccctgggcgtggacacagctgagaccagctacctggagatggctgctggcagcgagcctgagagcgtggaggccagccctgtggtggtggagaagagcaacagctacccccaccagctgtacaccagcagcagccaccacagccacagctacatcggcctgccctatgctgaccacaactacggggcccggcccccacccaccccaccagccagccccccaccttctgtgctgatcagcaagaatgaggtgggcatcttcaccacccccaactttgatgagaccagcagcgccaccaccatcagcaccagtgaagatggcagctatggaacagatgtgacccgctgcatctgtggcttcacccatgatgatggctacatgatctgctgtgacaagtgcagcgtgtggcagcacatcgactgcatgggcatcgaccggcagcacatcccagacacctacctgtgtgagcgctgccagcccaggaacctggacaaggagagagctgtgctgctgcagaggaggaagcgggagaacatgtctgatggagacaccagcgccacagagagcggagatgaggtgcctgtggagctgtacacagccttccagcacacccccaccagcatcaccctgacagccagccgggtgtccaaggtgaatgacaagaggaggaagaagtag

SEQ ID NO: 160667 - DNA, 1362 bp, synthetic construct
  misc_feature 1..1362: note = Description of Artificial Sequence: Synthetic coding sequence
  source 1..1362: mol_type = other DNA
atggtgctggtgctgagtgacaccagcgccagccccccaccttctgtgctgatcagcaagaatgaggtgggcatcttcaccacccccaactttgatgagaccagcagcgccaccaccatcagcaccagtgaagatggcagctatggaacagatgtgacccgctgcatctgtggcttcacccatgatgatggctacatgatctgctgtgacaagtgcagcgtgtggcagcacatcgactgcatgggcatcgaccggcagcacatcccagacacctacctgtgtgagcgctgccagcccaggaacctggacaaggagagagctgtgctgctgcagaggaggaagcgggagaacatgtctgatggagacaccagcgccacagagagcggagatgaggtgcctgtggagctgtacacagccttccagcacacccccaccagcatcaccctgacagccagccgggtgtccaaggtgaatgacaagaggaggaagaagtctggagagaaggagcagcacatcagcaagtgcaagaaggccttccgggagggcagcaggaagagcagccgggtgaagggcagcgcccctgagattgaccccagcagtgatggcagcaactttggctgggagaccaagatcaaggcctggatggacagatatgaggaggccaacaacaaccagtacagcgagggcgtgcagcgggaggcccagagaattgccctgcggctgggcaatggaaatgacaagaaggagatgaacaagagtgacctgaacaccaacaacctgctcttcaagccccctgtggagagccacatccagaagaacaagaagatcctgaagagcgccaaggacctgcccccagatgccctgatcatcgagtaccggggcaagttcatgctgcgggagcagtttgaggccaacggctacttcttcaagaggccctacccctttgtgctcttctacagcaagttccacggcctggagatgtgtgtggatgcccggacctttggaaatgaggcccgcttcatccgccgcagctgcaccccaaatgctgaggtgagacatgagatccaggacggcaccatccacctgtacatctacagcatccacagcatccccaagggcacagagatcaccatcgcctttgattttgattatggcaactgcaagtacaaggtggactgtgcctgcctgaaggagaacccagaatgtcctgtgctgaagaggagcagcgagagcatggagaacatcaacagcggctatgagaccaggaggaagaagggcaagaagaccaagatcttccagaagaagaagatccacaagatccgcatcctgctgtggatcgtgaaggagcggcccaccaagtag

SEQ ID NO: 160668 - DNA, 969 bp, synthetic construct
  misc_feature 1..969: note = Description of Artificial Sequence: Synthetic coding sequence
  source 1..969: mol_type = other DNA
atgcctgtgacagtgaccaggaccaccatcaccaccaccaccaccagcagcagcggcctgggcagccccatgattgtgggcagcccccgggccctgacccagcccctgggcctgctgcggctgctgcagctggtgtccacctgtgtggccttcagcctggtggcctctgtgggcgcctggacaggctccatgggcaactggagcatgttcacctggtgcttctgcttctctgtgaccctcatcatcctgattgtggagctgtgtggcctgcaggcccgcttccccctgtcctggaggaacttccccatcacctttgcctgctatgctgccctcttctgcctgagcgccagcatcatctaccccaccacctacgtgcagttcctgagccacggccgcagccgggaccacgccatcgccgccaccttcttcagctgcatcgcctgtgtggcctatgccacagaggtggcctggacccgggcccggcctggagagatcaccggctacatggccaccgtgcccggcctgctgaaggtgctggagacctttgtggcctgcatcatctttgccttcatcagtgaccccaacctgtaccagcaccagcctgccctggagtggtgtgtggccgtgtatgccatctgcttcatcctggccgccatcgccatcctgctgaacctgggagaatgtaccaacgtgctgcccatccccttccccagcttcctgagcggcctggccctgctgtctgtgctgctgtatgccacagccctggtgctgtggcccctgtaccagtttgatgagaagtatggaggccagccccggcgcagcagagatgtgtcctgcagccgcagccacgcctactacgtgtgtgcctgggaccggcggctggccgtggccatcctgacagccatcaacctgctggcctacgtggccgacctggtgcacagcgcccacctggtgtttgtgaaggtgtag

SEQ ID NO: 160669 - DNA, 969 bp, synthetic construct; identical to SEQ ID NO: 160668
  misc_feature 1..969: note = Description of Artificial Sequence: Synthetic coding sequence
  source 1..969: mol_type = other DNA

SEQ ID NO: 160670 - DNA, 969 bp, synthetic construct; identical to SEQ ID NO: 160668
  misc_feature 1..969: note = Description of Artificial Sequence: Synthetic coding sequence
  source 1..969: mol_type = other DNA

SEQ ID NO: 160671 - DNA, 969 bp, synthetic construct; identical to SEQ ID NO: 160668
  misc_feature 1..969: note = Description of Artificial Sequence: Synthetic coding sequence
  source 1..969: mol_type = other DNA

SEQ ID NO: 160672 - DNA, 969 bp, synthetic construct; identical to SEQ ID NO: 160668
  misc_feature 1..969: note = Description of Artificial Sequence: Synthetic coding sequence
  source 1..969: mol_type = other DNA

SEQ ID NO: 160673 - DNA, 444 bp, synthetic construct
  misc_feature 1..444: note = Description of Artificial Sequence: Synthetic coding sequence
  source 1..444: mol_type = other DNA
atgcctgtgacagtgaccaggaccaccatcaccaccaccaccaccagcagcagcggcctgggcagccccatgattgtgggcagcccccgggccctgacccagcccctgggcctgctgcggctgctgcagctggtgtccacctgtgtggccttcagcctggtggcctctgtgggcgcctggacaggctccatgggcaactggagcatgttcacctggtgcttctgcttctctgtgaccctcatcatcctgattgtggagctgtgtggcctgcaggcccgcttccccctgtcctggaggaacttccccatcacctttgcctgctatgctgccctcttctgcctgagcgccagcatcatctaccccaccacctacgtgcagttcctgagccacggccgcagccgggaccacgccatcgccgccaccttcttcagctgcatcgcctag

SEQ ID NO: 160674 - DNA, 858 bp, synthetic construct
  misc_feature 1..858: note = Description of Artificial Sequence: Synthetic coding sequence
  source 1..858: mol_type = other DNA
atgcctgtgacagtgaccaggaccaccatcaccaccaccaccaccagcagcagcggcctgggcagccccatgattgtgggcagcccccgggccctgacccagcccctgggcctgctgcggctgctgcagctggtgtccacctgtgtggccttcagcctggtggcctctgtgggcgcctggacaggctccatgggcaactggagcatgttcacctggtgcttctgcttctctgtgaccctcatcatcctgattgtggagctgtgtggcctgcaggcccgcttccccctgtcctggaggaacttccccatcaccttcttcagctgcatcgcctgtgtggcctatgccacagaggtggcctggacccgggcccggcctggagagatcaccggctacatggccaccgtgcccggcctgctgaaggtgctggagacctttgtggcctgcatcatctttgccttcatcagtgaccccaacctgtaccagcaccagcctgccctggagtggtgtgtggccgtgtatgccatctgcttcatcctggccgccatcgccatcctgctgaacctgggggagtgcaccaacgtgctgcccatccccttccccagcttcctgagcggcctggccctgctgtctgtgctgctgtatgccacagccctggtgctgtggcccctgtaccagtttgatgagaagtatggaggccagcccaggaggagcagagatgtgtcctgcagccgcagccacgcctactacgtgtgtgcctgggaccggcggctggccgtggccatcctgacagccatcaacctgctggcctacgtggccgacctggtgcacagcgcccacctggtgtttgtgaaggtgtag

SEQ ID NO: 160675 - DNA, 729 bp, synthetic construct
  misc_feature 1..729: note = Description of Artificial Sequence: Synthetic coding sequence
  source 1..729: mol_type = other DNA
atgcctgtgacagtgaccaggaccaccatcaccaccaccaccaccagcagcagcggcctgggcagccccatgattgtgggcagcccccgggccctgacccagcccctgggcctgctgcggctgctgcagctggtgtccacctgtgtggccttcagcctggtggcctctgtgggcgcctggacaggctccatgggcaactggagcatgttcacctggtgcttctgcttctctgtgaccctcatcatcctgattgtggagctgtgtggcctgcaggcccgcttccccctgtcctggaggaacttccccatcacctttgcctgctatgctgccctcttctgcctgagcgccagcatcatctaccccaccacctacgtgcagttcctgagccacggccgcagccgggaccacgccatcgccgccaccttcttcagctgcatcgcctgtgtggcctatgccacagaggtggcctggacccgggcccggcctggagagatcaccggctacatggccaccgtgcccggcctgctgaaggtgctggagacctttgtggcctgcatcatctttgccttcatcagtgaccccaacctgtaccagcaccagcctgccctggagtggtgtgtggccgtgtatgccatctgcttcatcctggccgccatcgccatcctgctgaacctgggagaatgtaccaacgtgctgcccatccccttccccagcttcctgtctggatag

SEQ ID NO: 160676 - DNA, 780 bp, synthetic construct
  misc_feature 1..780: note = Description of Artificial Sequence: Synthetic coding sequence
  source 1..780: mol_type = other DNA
atgcctgtgacagtgaccaggaccaccatcaccaccaccaccaccagcagcagcggcctgggcagccccatgattgtgggcagcccccgggccctgacccagcccctgggcctgctgcggctgctgcagctggtgtccacctgtgtggccttcagcctggtggcctctgtgggcgcctggacaggctccatgggcaactggagcatgttcacctggtgcttctgcttctctgtgaccctcatcatcctgattgtggagctgtgtggcctgcaggcccgcttccccctgtcctggaggaacttccccatcacctttgcctgctatgctgccctcttctgcctgagcgccagcatcatctaccccaccacctacgtgcagttcctgagccacggccgcagccgggaccacgccatcgccgccaccttcttcagctgcatcgcctgtgtggcctatgccacagaggtggcctggacccgggcccggcctggagagatcaccggctacatggccaccgtgcccggcctgctgaaggtgctggagacctttgtggcctgcatcatctttgccttcatcagtgaccccaacctgtaccagcaccagcctgccctggagtggtgtgtggccgtgtatgccatctgcttcatcctggccgccatcgccatcctgctgaacctgggagaatgtaccaacgtgctgcccatccccttccccagcttcctgagcggcctggccctgctgtctgtgctgctgtatgccacagccctggtgctgtggccctag

SEQ ID NO: 160677 - DNA, 567 bp, synthetic construct
  misc_feature 1..567: note = Description of Artificial Sequence: Synthetic coding sequence
  source 1..567: mol_type = other DNA
atgcctgtgacagtgaccaggaccaccatcaccaccaccaccaccagcagcagcggcctgggcagccccatgattgtgggcagcccccgggccctgacccagcccctgggcctgctgcggctgctgcagctggtgtccacctgtgtggccttcagcctggtggcctctgtgggcgcctggacaggctccatgggcaactggagcatgttcacctggtgcttctgcttctctgtgaccctcatcatcctgattgtggagctgtgtggcctgcaggcccgcttccccctgtcctggaggaacttccccatcacctttgcctgctatgctgccctcttctgcctgagcgccagcatcatctaccccaccacctacgtgcagttcctgagccacggccgcagccgggaccacgccatcgccgccaccttcttcagctgcatcgcctgtgtggcctatgccacagaggtggcctggacccgggcccggcctggagagatcaccggctacatggccaccgtgcccggcctgctgaaggtgctggagacctttgtggcctgcatcatcttctag

SEQ ID NO: 160678 - DNA, 942 bp, synthetic construct
  misc_feature 1..942: note = Description of Artificial Sequence: Synthetic coding sequence
  source 1..942: mol_type = other DNA
atggccctgcgcatctgtgtgacctacaccccagccctgcccatcggcctgtgcacccgctgctgcctgtgcctggagcagagccccagctggtgccactgcctgcggggcgtgtccttcctgaccttccacctgcaccagagcgtgcccctgggggaccgggacagcctgctgatgttcacccggcaggccggccactttgtggagggcagcaaggccggccgcagccggggccgcctgtgcctgagccaggccctgcgggtggccgtgcggggggcctttgtgtccctgtggtttgctgctggagctggggaccgggagaggaacaagggggacaagggggcccagacaggagctggcctgagccaggaggccgaggatgtggatgtgtcccgggcccggcgggtgacagatgccccccagggcaccctgtgtggcactggaaacagaaacagcggcagccagagcgcccgggtggtgggcgtggcccacctgggggaggccttccgggtgggcgtggagcaggccatcagcagctgcccagaggaggtgcacggccgccacggcctgtccatggagatcatgtgggccaggatggatgtggccctgcggagccctggccggggcctgctggccggggccggggccctgtgcatgaccctggccgagagcagctgcccagactatgagcggggcagaagagcctgcctgaccctgcaccgccaccccaccccccactgcagcacctggggcctgcccctgcgggtggccggctcctggctgactgtggtgacagtggaggccctgggcggctggaggatgggcgtgagaagaacaggccaggtgggccccaccatgcaccccccacctgtgtctggggccagccccctgctgctgcaccacctgctgctgctgctgctgatcatcatcctgacctgctag

SEQ ID NO: 160679 - DNA, 942 bp, synthetic construct; identical to SEQ ID NO: 160678
  misc_feature 1..942: note = Description of Artificial Sequence: Synthetic coding sequence
  source 1..942: mol_type = other DNA

SEQ ID NO: 160680 - DNA, 279 bp, synthetic construct
  misc_feature 1..279: note = Description of Artificial Sequence: Synthetic coding sequence
  source 1..279: mol_type = other DNA
atgcaggtgtccacagctgccctggccgtgctgctgtgcaccatggccctgtgcaaccagttcagcgccagcctggccgctgacacccccacagcctgctgcttctcctacaccagccggcagatcccccagaacttcatcgctgactactttgagaccagcagccagtgcagcaagccaggagtcatcttcctgaccaagaggagccggcaggtgtgtgccgaccccagcgaggagtgggtgcagaagtatgtgtctgacctggagctgagcgcctag

SEQ ID NO: 160681 - DNA, 2334 bp, synthetic construct
  misc_feature 1..2334: note = Description of Artificial Sequence: Synthetic coding sequence
  source 1..2334: mol_type = other DNA
atgggcgtgcccttcttcagcagcctgcgctgcatggtggacctgggcccctgctgggccggcggcctgacagctgagatgaagctgctgctggccctggccggcctgctggccatcctggccaccccccagcccagcgagggcgccgccccagctgtgctgggggaggtggacaccagcctggtgctgagctccatggaggaggccaagcagctggtggacaaggcctacaaggagcggcgggagagcatcaagcagaggctgcggagcggcagcgccagccccatggagctgctgagctacttcaagcagcctgtggccgccaccaggacagctgtgcgggctgctgactacctgcacgtggccctggacctgctggagaggaagctgcggagcctgtggaggcggcccttcaacgtgacagatgtgctgaccccagcccagctgaatgtgctgagcaagagcagcggctgtgcctaccaggatgtgggcgtgacctgcccagagcaggacaagtaccgcaccatcaccggcatgtgcaacaacagatgtggctggctgggcgtggccgccggcaccggcctgcgggaggccagcaggaccccccaggccagccgctgccagaggcctgtgctgccctgcagaagaagccccaccctgggcgccagcaacagagcctttgtgcgctggctgcctgcagaatatgaagatggcttcagcctgccctacggctggaccccaggagtgaagagaaatggcttccctgtggccctggcccgggctgtgtccaatgagatcgtgcgcttccccacagaccagctgaccccagaccaggagaggagcctgatgttcatgcagtggggccagctgctggaccatgacctggacttcaccccagagcctgctgcccgggccagctttgtgactggagtgaactgtgagaccagctgtgtgcagcagcccccctgcttccccctgaagatccccccaaatgacccccgcatcaagaaccaggccgactgcatccccttcttccgcagctgcccagcctgccccggcagcaacatcaccatccggaaccagatcaatgccctgaccagctttgtggatgcctccatggtgtatggcagcgaggagcccctggccaggaacctgaggaacatgagcaaccagctgggcctgctggccgtgaaccagcgcttccaggacaatggccgggccctgctgccctttgacaacctgcatgatgacccctgcctgctgaccaacagaagtgcccgcatcccctgcttcctggccggggacaccaggagcagcgagatgcctgagctgacctccatgcacaccctgctgctgcgggagcacaaccggctggccacagagctgaagagcctgaacccccgctgggatggagagcggctgtaccaggaggccaggaagatcgtgggcgccatggtgcagatcatcacctacagagactacctgcccctggtgctgggccccacagccatgaggaagtacctgcccacctaccgcagctacaatgattctgtggacccccgcatcgccaacgtgttcaccaatgccttccgctatggccacaccctcatccagcccttcatgttccggctggacaaccgctaccagcccatggagcccaacccccgggtgcccctgagcagggtcttctttgcctcctggagggtggtgctggagggcggcatcgaccccatcctgcggggcctgatggccaccccagccaagctgaaccggcagaaccagattgctgtggatgagatccgggagcggctgtttgagcaggtgatgagaattggcctggacctgcctgccctgaacatgcagaggagccgggaccacggcctgcccggctacaatgcctggaggcgcttctgtggcctgccccagcctgagaccgtgggccagctgggcaccgtgctgaggaacctgaagctggccaggaagctgatggagcagtatggcacccccaacaacatcgacatctggatgggcggcgtgtctgagcccctgaagaggaagggccgggtgggccccctgctggcctgcatcatcggcacccagttcaggaagctgagagatggagaccgcttctggtgggagaatgaaggagtcttctccatgcagcagaggcaggccctggcccagatcagcctgccccgcatcatctgtgacaacacaggcatcaccaccgtgtccaagaacaacatcttcatgagcaacagctacccccgggactttgtgaactgcagcaccctgcctgccctgaacctggcctcctggagggaggccagctag

SEQ ID NO: 160682 - DNA, 1542 bp, synthetic construct
  misc_feature 1..1542: note = Description of Artificial Sequence: Synthetic coding sequence
  source 1..1542: mol_type = other DNA
atgcccagctgggccctcttcatggtgaccagctgcctgctgctggccccccagaacctggcccaggtgagcagccaggatgtgtccctgctggccagtgacagcgagcccctgaagtgcttcagcaggacctttgaggacctgacctgcttctgggatgaggaggaggccgcccccagcggcacctaccagctgctgtatgcctacccccgggagaagccccgggcctgccccctgagcagccagagcatgccccacttcggcaccaggtatgtgtgccagttcccagaccaggaggaggtgcggctcttcttccccctgcacctgtgggtgaagaatgtgttcctgaaccagaccaggacccagagggtgctgtttgtggacagcgtgggcctgcctgcccctccttccatcatcaaggccatgggcggcagccagcctggagagctgcagatctcctgggaggagcccgcccctgagatcagtgacttcctgcgctatgagctgcgctatggcccccgggaccccaagaacagcacaggccccaccgtcatccagctgattgccacagagacctgctgcccagccctgcagaggccccacagcgccagcgccctggaccagagcccctgtgcccagcccaccatgccctggcaggacggccccaagcagaccagccccagccgggaggccagcgccctgacagctgagggcggcagctgcctgatcagcggcctgcagcccggcaacagctactggctgcagctgcggtctgagccagatggcatcagcctgggcggctcctggggctcctggagcctgcctgtgacagtggacctgcctggagatgctgtggccctgggcctgcagtgcttcaccctggacctgaagaatgtgacctgccagtggcagcagcaggaccacgccagcagccagggcttcttctaccacagccgggcccgctgctgcccccgggaccgctaccccatctgggagaactgtgaggaggaggagaagaccaaccctggcctgcagaccccccagttcagccgctgccacttcaagagcagaaatgacagcatcatccacatcctggtggaggtgaccacagcccctggcaccgtgcacagctacctgggcagccccttctggatccaccaggccgtgcggctgcccacccccaacctgcactggagggagatcagcagcggccacctggagctggagtggcagcaccccagctcctgggccgcccaggagacctgctaccagctgcgctacaccggggagggccaccaggactggaaggtgctggagccccccctgggcgcccggggcggcaccctggagctgcggcccaggagccgctaccgcctgcagctgcgggcccggctgaatggccccacctaccagggcccctggagctcctggagcgaccccaccagggtggagacagccacagaaacagcctggatcagcctggtgacagccctgcacctggtgctgggcctgtctgctgtgctgggcctgctgctgctgtag

SEQ ID NO: 160683 - DNA, 1908 bp, synthetic construct
  misc_feature 1..1908: note = Description of Artificial Sequence: Synthetic coding sequence
  source 1..1908: mol_type = other DNA
atgcccagctgggccctcttcatggtgaccagctgcctgctgctggccccccagaacctggcccaggtgagcagccaggatgtgtccctgctggccagtgacagcgagcccctgaagtgcttcagcaggacctttgaggacctgacctgcttctgggatgaggaggaggccgcccccagcggcacctaccagctgctgtatgcctacccccgggagaagccccgggcctgccccctgagcagccagagcatgccccacttcggcaccaggtatgtgtgccagttcccagaccaggaggaggtgcggctcttcttccccctgcacctgtgggtgaagaatgtgttcctgaaccagaccaggacccagagggtgctgtttgtggacagcgtgggcctgcctgcccctccttccatcatcaaggccatgggcggcagccagcctggagagctgcagatctcctgggaggagcccgcccctgagatcagtgacttcctgcgctatgagctgcgctatggcccccgggaccccaagaacagcacaggccccaccgtcatccagctgattgccacagagacctgctgcccagccctgcagaggccccacagcgccagcgccctggaccagagcccctgtgcccagcccaccatgccctggcaggacggccccaagcagaccagccccagccgggaggccagcgccctgacagctgagggcggcagctgcctgatcagcggcctgcagcccggcaacagctactggctgcagctgcggtctgagccagatggcatcagcctgggcggctcctggggctcctggagcctgcctgtgacagtggacctgcctggagatgctgtggccctgggcctgcagtgcttcaccctggacctgaagaatgtgacctgccagtggcagcagcaggaccacgccagcagccagggcttcttctaccacagccgggcccgctgctgcccccgggaccgctaccccatctgggagaactgtgaggaggaggagaagaccaaccctggcctgcagaccccccagttcagccgctgccacttcaagagcagaaatgacagcatcatccacatcctggtggaggtgaccacagcccctggcaccgtgcacagctacctgggcagccccttctggatccaccaggccgtgcggctgcccacccccaacctgcactggagggagatcagcagcggccacctggagctggagtggcagcaccccagctcctgggccgcccaggagacctgctaccagctgcgctacaccggggagggccaccaggactggaaggtgctggagccccccctgggcgcccggggcggcaccctggagctgcggcccaggagccgctaccgcctgcagctgcgggcccggctgaatggccccacctaccagggcccctggagctcctggagcgaccccaccagggtggagacagccacagaaacagcctggatcagcctggtgacagccctgcacctggtgctgggcctgtctgctgtgctgggcctgctgctgctgcgctggcagtttcctgcccactaccgccgcctgcggcatgccctgtggcccagcctgcctgacctgcaccgggtgctgggccagtacctgcgggacacagctgccctgagcccccccaaggccaccgtgtctgacacctgtgaggaggtggagcccagcctgctggagatcctgcccaagagcagcgagaggacccccctgcccctgtgcagcagccaggcccagatggactaccgccgcctgcagcccagctgcctgggcaccatgcccctgtctgtgtgcccccccatggccgagagcggcagctgctgcaccacccacatcgccaaccacagctacctgcccctgagctactggcagcagccctag

SEQ ID NO: 160684 - DNA, 1650 bp, synthetic construct
  misc_feature 1..1650: note = Description of Artificial Sequence: Synthetic coding sequence
  source 1..1650: mol_type = other DNA
atgcccagctgggccctcttcatggtgaccagctgcctgctgctggccccccagaacctggcccaggtgagcagccaggatgtgtccctgctggccagtgacagcgagcccctgaagtgcttcagcaggacctttgaggacctgacctgcttctgggatgaggaggaggccgcccccagcggcacctaccagctgctgtatgcctacccccgggagaagccccgggcctgccccctgagcagccagagcatgccccacttcggcaccaggtatgtgtgccagttcccagaccaggaggaggtgcggctcttcttccccctgcacctgtgggtgaagaatgtgttcctgaaccagaccaggacccagagggtgctgtttgtggacagcgtgggcctgcctgcccctccttccatcatcaaggccatgggcggcagccagcctggagagctgcagatctcctgggaggagcccgcccctgagatcagtgacttcctgcgctatgagctgcgctatggcccccgggaccccaagaacagcacaggccccaccgtcatccagctgattgccacagagacctgctgcccagccctgcagaggccccacagcgccagcgccctggaccagagcccctgtgcccagcccaccatgccctggcaggacggccccaagcagaccagccccagccgggaggccagcgccctgacagctgagggcggcagctgcctgatcagcggcctgcagcccggcaacagctactggctgcagctgcggtctgagccagatggcatcagcctgggcggctcctggggctcctggagcctgcctgtgacagtggacctgcctggagatgctgtggccctgggcctgcagtgcttcaccctggacctgaagaatgtgacctgccagtggcagcagcaggaccacgccagcagccagggcttcttctaccacagccgggcccgctgctgcccccgggaccgctaccccatctgggagaactgtgaggaggaggagaagaccaaccctggcctgcagaccccccagttcagccgctgccacttcaagagcagaaatgacagcatcatccacatcctggtggaggtgaccacagcccctggcaccgtgcacagctacctgggcagccccttctggatccaccaggccgtgcggctgcccacccccaacctgcactggagggagatcagcagcggccacctggagctggagtggcagcaccccagctcctgggccgcccaggagacctgctaccagctgcgctacaccggggagggccaccaggactggaaggtgctggagccccccctgggcgcccggggcggcaccctggagctgcggcccaggagccgctaccgcctgcagctgcgggcccggctgaatggccccacctaccagggcccctggagctcctggagcgaccccaccagggtggagacagccacagaaacagcctggatcagcctggtgacagccctgcacctggtgctgggcctgtctgctgtgctgggcctgctgctgctgcgctggcagtttcctgcccactaccgctaccggccccggcaggccggggactggcgctggacccgctggagccggcggcctgtgaacagacacagctggtttgccctgtag

SEQ ID NO: 160685 - DNA, 2817 bp, synthetic construct
  misc_feature 1..2817: note = Description of Artificial Sequence: Synthetic coding sequence
  source 1..2817: mol_type = other DNA
atgaccctgctgggcagcgagcacagcctgctgatccgcagcaagttccgctctgtgctgcagctgcggctgcagcagaggaggacccaggagcagctggccaaccagggcatcatcccccccctgaagaggcctgctgagttccacgagcagaggaagcacctggacagcgacaaggccaagaacagcctgaagaggaaggccaggaaccgctgcaacagcgctgacctggtgaacatgcacatcctgcaggccagcacagctgagaggagcatccccacagcccagatgaagctgaagagggcccggctggctgatgacctgaatgagaagatcgccctgcggcccggccccctggagctggtggagaagaacatcctgcctgtggacagcgctgtgaaggaggccatcaagggcaaccaggtgtccttcagcaagagcacagatgcctttgcctttgaggaggacagcagcagtgatggcctgagcccagaccagaccaggtctgaggacccccagaacagcgctggcagccccccagatgccaaggccagtgacacccccagcacaggcagcctgggcaccaaccaggacctggccagcggctctgaaaatgacagaaatgacagcgccagccagcccagccaccagagtgatgctgggaagcagggcctgggcccccccagcacccccatcgctgtgcacgccgctgtgaagagcaagagcctgggggacagcaagaacagacacaagaagcccaaggaccccaagcccaaggtgaagaagctgaagtaccaccagtacatccccccagaccagaaggccgagaagagccccccacccatggacagcgcctatgcccggctgctgcagcagcagcagctgttcctgcagctgcagatcctgagccagcagcagcagcagcagcagcaccgcttctcctacctgggcatgcaccaggcccagctgaaggagcccaatgagcagatggtgaggaaccccaacagcagcagcacccccctgagcaacacccccctgagccctgtgaagaacagcttcagcggccagacaggagtgtcctccttcaagccaggccccctgccccccaacctggatgacctgaaggtgtctgagctgcggcagcagctgcgcatccggggcctgcctgtgtctggcaccaagacagccctgatggaccggctgcggcccttccaggactgcagcggcaaccctgtgcccaactttggagacatcaccaccgtgaccttccctgtgacccccaacaccctgcccaactaccagagcagcagcagcaccagcgccctgagcaatggcttctaccacttcggcagcaccagcagcagcccccccatcagccctgccagcagtgacctgtctgtggccggcagcctgcctgacaccttcaatgatgccagccccagctttggcctgcaccccagccctgtgcacgtgtgcacagaggagagcctgatgagcagcctgaatggaggctctgtgcccagcgagctggatggcctggacagcgagaaggacaagatgctggtggagaagcagaaggtgatcaatgagctgacctggaagctgcagcaggagcagaggcaggtggaggagctgaggatgcagctgcagaagcagaagaggaacaactgcagcgagaagaagcccctgcccttcctggccgccagcatcaagcaggaggaggccgtgagcagctgcccctttgccagccaggtgcctgtgaagaggcagagcagcagcagcgagtgccaccccccagcctgtgaggccgcccagctgcagcccctgggcaatgcccactgtgtggagagcagtgaccagaccaacgtgctgagcagcaccttcctgagcccccagtgcagcccccagcacagccccctgggcgctgtgaagagcccccagcacatcagcctgccccccagccccaacaacccccacttcctgcccagcagcagcggggcccagggcgagggccaccgggtgagcagccccatcagcagccaggtgtgcacagcccagatggccggcctgcacagcagtgacaaggtgggccccaagttcagcatccccagccccaccttcagcaagagcagcagcgccatcagcgaggtgacccagccccccagctatgaagatgctgtgaagcagcagatgaccaggagccagcagatggatgagctgctggatgtgctgattgaaagtggagagatgccagcagatgcccgggaggaccacagctgcctgcagaaggtgcccaagatccccaggagcagccgcagccccacagctgtgctgaccaagcccagcgccagctttgagcaggccagcagcggcagccagatcccctttgacccctatgccacagacagtgatgagcacctggaggtgctgctgaacagccagagccccctgggcaagatgtctgatgtgaccctgctgaagattggcagcgaggagccccactttgatggcatcatggatggcttcagcggcaaggctgctgaggacctcttcaatgcccacgagatcctgcccggccccctgagccccatgcagacccagttcagccccagctctgtggacagcaatggcctgcagctgtccttcacagagagcccctgggagaccatggagtggctggacctgaccccacccaacagcaccccaggcttcagcgccctgaccaccagcagccccagcatcttcaacatcgacttcctggatgtgacagacctgaacctgaacagctccatggacctgcacctgcagcagtggtag

SEQ ID NO: 160686 - DNA, 1989 bp, synthetic construct
  misc_feature 1..1989: note = Description of Artificial Sequence: Synthetic coding sequence
  source 1..1989: mol_type = other DNA
atggattctgcctatgcccggctgctgcagcagcagcagctgttcctgcagctgcagatcctgagccagcagcagcagcagcagcagcaccgcttctcctacctgggcatgcaccaggcccagctgaaggagcccaatgagcagatggtgaggaaccccaacagcagcagcacccccctgagcaacacccccctgagccctgtgaagaacagcttcagcggccagacaggagtgagcagcttcaagccaggccccctgccccccaacctggatgacctgaaggtgtctgagctgcggcagcagctgcgcatccggggcctgcctgtgtctggcaccaagacagccctgatggaccggctgcggcccttccaggactgcagcggcaaccctgtgcccaactttggagacatcaccaccgtgaccttccctgtgacccccaacaccctgcccaactaccagagcagcagcagcaccagcgccctgagcaatggcttctaccacttcggcagcaccagcagcagcccccccatcagccctgccagcagtgacctgtctgtggccggcagcctgcctgacaccttcaatgatgccagccccagctttggcctgcaccccagccctgtgcacgtgtgcacagaggagagcctgatgagcagcctgaatggaggctctgtgcccagcgagctggatggcctggacagcgagaaggacaagatgctggtggagaagcagaaggtgatcaatgagctgacctggaagctgcagcaggagcagaggcaggtggaggagctgaggatgcagctgcagaagcagaagaggaacaactgcagcgagaagaagcccctgcccttcctggccgccagcatcaagcaggaggaggccgtgagcagctgcccctttgccagccaggtgcctgtgaagaggcagagcagcagcagcgagtgccaccccccagcctgtgaggccgcccagctgcagcccctgggcaatgcccactgtgtggagagcagtgaccagaccaacgtgctgagcagcaccttcctgagcccccagtgcagcccccagcacagccccctgggcgctgtgaagagcccccagcacatcagcctgccccccagccccaacaacccccacttcctgcccagcagcagcggggcccagggcgagggccaccgggtgagcagccccatcagcagccaggtgtgcacagcccagaacagcggggcccatgatggccacccccccagcttcagcccccacagcagcagcctgcacccccccttcagcggggcccaggccgacagcagccatggagctgggggcaacccctgccccaagagcccctgtgtgcagcagaagcagatgaccaggagccagcagatggatgagctgctggatgtgctgattgaaagtggagagatgccagcagatgcccgggaggaccacagctgcctgcagaaggtgcccaagatccccaggagcagccgcagccccacagctgtgctgaccaagcccagcgccagctttgagcaggccagcagcggcagccagatcccctttgacccctatgccacagacagtgatgagcacctggaggtgctgctgaacagccagagccccctgggcaagatgtctgatgtgaccctgctgaagattggcagcgaggagccccactttgatggcatcatggatggcttcagcggcaaggctgctgaggacctcttcaatgcccacgagatcctgcccggccccctgagccccatgcagacccagttcagccccagctctgtggacagcaatggcctgcagctgtccttcacagagagcccctgggagaccatggagtggctggacctgaccccacccaacagcaccccaggcttcagcgccctgaccaccagcagccccagcatcttcaacatcgacttcctggatgtgacagacctgaacctgaacagctccatggacctgcacctgcagcagtggtag

SEQ ID NO: 160687 - DNA, 2055 bp, synthetic construct
  misc_feature 1..2055: note = Description of Artificial Sequence: Synthetic coding sequence
  source 1..2055: mol_type = other DNA
atgaagctgaagagggcccggctggctgatgacctgaatgagaagatcgccctgcggcccggccccctggagctggtggagaagaacatcctgcctgtggacagcgctgtgaaggaggccatcaagggcaaccaggtgtccttcagcaagagcacagatgcctttgcctttgaggaggacagcagcagtgatggcctgagcccagaccagaccaggtctgaggacccccagaacagcgctggcagccccccagatgccaaggccagtgacacccccagcacaggcagcctgggcaccaaccaggacctggccagcggctctgaaaatgacagaaatgacagcgccagccagcccagccaccagagtgatgctgggaagcagggcctgggcccccccagcacccccatcgctgtgcacgccgctgtgaagagcaagagcctgggggacagcaagaacagacacaagaagcccaaggaccccaagcccaaggtgaagaagctgaagtaccaccagtacatccccccagaccagaaggccgagaagagccccccacccatggacagcgcctatgcccggctgctgcagcagcagcagctgttcctgcagctgcagatcctgagccagcagcagcagcagcagcagcaccgcttctcctacctgggcatgcaccaggcccagctgaaggagcccaatgagcagatggtgaggaaccccaacagcagcagcacccccctgagcaacacccccctgagccctgtgaagaacagcttcagcggccagacaggagtgtcctccttcaagccaggccccctgccccccaacctggatgacctgaaggtgtctgagctgcggcagcagctgcgcatccggggcctgcctgtgtctggcaccaagacagccctgatggaccggctgcggcccttccaggactgcagcggcaaccctgtgcccaactttggagacatcaccaccgtgaccttccctgtgacccccaacaccctgcccaactaccagagcagcagcagcaccagcgccctgagcaatggcttctaccacttcggcagcaccagcagcagcccccccatcagccctgccagcagtgacctgtctgtggccggcagcctgcctgacaccttcaatgatgccagccccagctttggcctgcaccccagccctgtgcacgtgtgcacagaggagagcctgatgagcagcctgaatggaggctctgtgcccagcgagctggatggcctggacagcgagaaggacaagatgctggtggagaagcagaaggtgatcaatgagctgacctggaagctgcagcaggagcagaggcaggtggaggagctgaggatgcagctgcagaagcagaagaggaacaactgcagcgagaagaagcccctgcccttcctggccgccagcatcaagcaggaggaggccgtgagcagctgcccctttgccagccaggtgcctgtgaagaggcagagcagcagcagcgagtgccaccccccagcctgtgaggccgcccagctgcagcccctgggcaatgcccactgtgtggagagcagtgaccagaccaacgtgctgagcagcaccttcctgagcccccagtgcagcccccagcacagccccctgggcgctgtgaagagcccccagcacatcagcctgccccccagccccaacaacccccacttcctgcccagcagcagcggggcccagggcgagggccaccgggtgagcagccccatcagcagccaggtgtgcacagcccagaacagcggggcccatgatggccaccccccatccttcagcccccacagcagcagcctgcacccccccttcagcggggcccaggccgacagcagccacggggccggcggcaacccctgccccaagagcccctgtgtgcagcagaagatggccggcctgcacagcagtgacaaggtgggccccaagttcagcatccccagccccaccttcagcaagagcagcagcgccatcagcgaggtgacccagccccccagctatgaagatgctgtgaagcaggtgaccatgtag

SEQ ID NO: 160688 - DNA, 2961 bp, synthetic construct
  misc_feature 1..2961: note = Description of Artificial Sequence: Synthetic coding sequence
  source 1..2961: mol_type = other DNA
atgaccctgctgggcagcgagcacagcctgctgatccgcagcaagttccgctctgtgctgcagctgcggctgcagcagaggaggacccaggagcagctggccaaccagggcatcatcccccccctgaagaggcctgctgagttccacgagcagaggaagcacctggacagcgacaaggccaagaacagcctgaagaggaaggccaggaaccgctgcaacagcgctgacctggtgaacatgcacatcctgcaggccagcacagctgagaggagcatccccacagcccagatgaagctgaagagggcccggctggctgatgacctgaatgagaagatcgccctgcggcccggccccctggagctggtggagaagaacatcctgcctgtggacagcgctgtgaaggaggccatcaagggcaaccaggtgtccttcagcaagagcacagatgcctttgcctttgaggaggacagcagcagtgatggcctgagcccagaccagaccaggtctgaggacccccagaacagcgctggcagccccccagatgccaaggccagtgacacccccagcacaggcagcctgggcaccaaccaggacctggccagcggctctgaaaatgacagaaatgacagcgccagccagcccagccaccagagtgatgctgggaagcagggcctgggcccccccagcacccccatcgctgtgcacgccgctgtgaagagcaagagcctgggggacagcaagaacagacacaagaagcccaaggaccccaagcccaaggtgaagaagctgaagtaccaccagtacatccccccagaccagaaggccgagaagagccccccacccatggacagcgcctatgcccggctgctgcagcagcagcagctgttcctgcagctgcagatcctgagccagcagcagcagcagcagcagcaccgcttctcctacctgggcatgcaccaggcccagctgaaggagcccaatgagcagatggtgaggaaccccaacagcagcagcacccccctgagcaacacccccctgagccctgtgaagaacagcttcagcggccagacaggagtgtcctccttcaagccaggccccctgccccccaacctggatgacctgaaggtgtctgagctgcggcagcagctgcgcatccggggcctgcctgtgtctggcaccaagacagccctgatggaccggctgcggcccttccaggactgcagcggcaaccctgtgcccaactttggagacatcaccaccgtgaccttccctgtgacccccaacaccctgcccaactaccagagcagcagcagcaccagcgccctgagcaatggcttctaccacttcggcagcaccagcagcagcccccccatcagccctgccagcagtgacctgtctgtggccggcagcctgcctgacaccttcaatgatgccagccccagctttggcctgcaccccagccctgtgcacgtgtgcacagaggagagcctgatgagcagcctgaatggaggctctgtgcccagcgagctggatggcctggacagcgagaaggacaagatgctggtggagaagcagaaggtgatcaatgagctgacctggaagctgcagcaggagcagaggcaggtggaggagctgaggatgcagctgcagaagcagaagaggaacaactgcagcgagaagaagcccctgcccttcctggccgccagcatcaagcaggaggaggccgtgagcagctgcccctttgccagccaggtgcctgtgaagaggcagagcagcagcagcgagtgccaccccccagcctgtgaggccgcccagctgcagcccctgggcaatgcccactgtgtggagagcagtgaccagaccaacgtgctgagcagcaccttcctgagcccccagtgcagcccccagcacagccccctgggcgctgtgaagagcccccagcacatcagcctgccccccagccccaacaacccccacttcctgcccagcagcagcggggcccagggcgagggccaccgggtgagcagccccatcagcagccaggtgtgcacagcccagaacagcggggcccatgatggccaccccccatccttcagcccccacagcagcagcctgcacccccccttcagcggggcccaggccgacagcagccacggggccggcggcaacccctgccccaagagcccctgtgtgcagcagaagatggccggcctgcacagcagtgacaaggtgggccccaagttcagcatccccagccccaccttcagcaagagcagcagcgccatcagcgaggtgacccagccccccagctatgaagatgctgtgaagcagcagatgaccaggagccagcagatggatgagctgctggatgtgctgattgaaagtggagagatgccagcagatgcccgggaggaccacagctgcctgcagaaggtgcccaagatccccaggagcagccgcagccccacagctgtgctgaccaagcccagcgccagctttgagcaggccagcagcggcagccagatcccctttgacccctatgccacagacagtgatgagcacctggaggtgctgctgaacagccagagccccctgggcaagatgtctgatgtgaccctgctgaagattggcagcgaggagccccactttgatggcatcatggatggcttcagcggcaaggctgctgaggacctcttcaatgcccacgagatcctgcccggccccctgagccccatgcagacccagttcagccccagctctgtggacagcaatggcctgcagctgtccttcacagagagcccctgggagaccatggagtggctggacctgaccccacccaacagcaccccaggcttcagcgccctgaccaccagcagccccagcatcttcaacatcgacttcctggatgtgacagacctgaacctgaacagctccatggacctgcacctgcagcagtggtag

SEQ ID NO: 160689 - DNA, 1947 bp, synthetic construct
  misc_feature 1..1947: note = Description of Artificial Sequence: Synthetic coding sequence
  source 1..1947: mol_type = other DNA
ttcctgcagctgcagatcctgagccagcagcagcagcagcagcagcaccgcttctcctacctgggcatgcaccaggcccagctgaaggagcccaatgagcagatggtgaggaaccccaacagcagcagcacccccctgagcaacacccccctgagccctgtgaagaacagcttcagcggccagacaggagtgagcagcttcaagccaggccccctgccccccaacctggatgacctgaaggtgtctgagctgcggcagcagctgcgcatccggggcctgcctgtgtctggcaccaagacagccctgatggaccggctgcggcccttccaggactgcagcggcaaccctgtgcccaactttggagacatcaccaccgtgaccttccctgtgacccccaacaccctgcccaactaccagagcagcagcagcaccagcgccctgagcaatggcttctaccacttcggcagcaccagcagcagcccccccatcagccctgccagcagtgacctgtctgtggccggcagcctgcctgacaccttcaatgatgccagccccagctttggcctgcaccccagccctgtgcacgtgtgcacagaggagagcctgatgagcagcctgaatggaggctctgtgcccagcgagctggatggcctggacagcgagaaggacaagatgctggtggagaagcagaaggtgatcaatgagctgacctggaagctgcagcaggagcagaggcaggtggaggagctgaggatgcagctgcagaagcagaagaggaacaactgcagcgagaagaagcccctgcccttcctggccgccagcatcaagcaggaggaggccgtgagcagctgcccctttgccagccaggtgcctgtgaagaggcagagcagcagcagcgagtgccaccccccagcctgtgaggccgcccagctgcagcccctgggcaatgcccactgtgtggagagcagtgaccagaccaacgtgctgagcagcaccttcctgagcccccagtgcagcccccagcacagccccctgggcgctgtgaagagcccccagcacatcagcctgccccccagccccaacaacccccacttcctgcccagcagcagcggggcccagggcgagggccaccgggtgagcagccccatcagcagccaggtgtgcacagcccagaacagcggggcccatgatggccacccccccagcttcagcccccacagcagcagcctgcacccccccttcagcggggcccaggccgacagcagccatggagctgggggcaacccctgccccaagagcccctgtgtgcagcagaagcagatgaccaggagccagcagatggatgagctgctggatgtgctgattgaaagtggagagatgccagcagatgcccgggaggaccacagctgcctgcagaaggtgcccaagatccccaggagcagccgcagccccacagctgtgctgaccaagcccagcgccagctttgagcaggccagcagcggcagccagatcccctttgacccctatgccacagacagtgatgagcacctggaggtgctgctgaacagccagagccccctgggcaagatgtctgatgtgaccctgctgaagattggcagcgaggagccccactttgatggcatcatggatggcttcagcggcaaggctgctgaggacctcttcaatgcccacgagatcctgcccggccccctgagccccatgcagacccagttcagccccagctctgtggacagcaatggcctgcagctgtccttcacagagagcccctgggagaccatggagtggctggacctgaccccacccaacagcaccccaggcttcagcgccctgaccaccagcagccccagcatcttcaacatcgacttcctggatgtgacagacctgaacctgaacagctccatggacctgcacctgcagcagtggtag

SEQ ID NO: 160690 - DNA, 1515 bp, synthetic construct
  misc_feature 1..1515: note = Description of Artificial Sequence: Synthetic coding sequence
  source 1..1515: mol_type = other DNA
atgaggttcttctgtgcccgctgctgcagctttggacctgagatgcctgctgtgcagctgctgctgctggcctgcctggtgtgggatgtgggcgccaggacagcccagctgaggaaggccaatgaccagagcggccgctgccagtacaccttctctgtggccagccccaatgaaagcagctgcccagagcagagccaggccatgtctgtcatccacaacctgcagagggacagcagcacccagaggctggacctggaggccaccaaggcccggctgagcagcctggagagcctgctgcaccagctgaccctggaccaggccgcccggccccaggagacccaggagggcctgcagcgggagctgggcaccctgcggcgggagcgggaccagctggagacccagacccgggagctggagacagcctacagcaacctgctgcgggacaagtctgtgctggaggaggagaagaagaggctgcggcaggagaatgaaaacctggcccggcggctggagagcagcagccaggaggtggcccggctgcggcggggccagtgcccccagacccgggacacagcccgggctgtgcccccaggcagccgggaggtgtccacctggaacctggacaccctggccttccaggagctgaagtctgagctgacagaggtgcctgccagccgcatcctgaaggagagccccagcggctacctgcggagcggggagggggacaccggctgtggggagctggtgtgggtgggggagcccctgaccctgaggacagctgagaccatcaccgggaagtatggagtgtggatgagggaccccaagcccacctacccctacacccaggagaccacctggagaattgacacagtgggcacagatgtgcggcaggtgtttgaatatgacctgatcagccagttcatgcagggctaccccagcaaggtgcacatcctgccccggcccctggagagcactggagctgtggtgtacagcggcagcctgtacttccagggcgctgagagcaggacagtcatccgctatgagctgaacacagaaacagtgaaggccgagaaggagatccctggagctggctaccacggccagttcccctacagctggggcggctacacagacatcgacctggccgtggatgaggccggcctgtgggtgatctacagcacagatgaggccaagggggccatcgtgctgagcaagctgaaccctgagaacctggagctggagcagacctgggagaccaacatcaggaagcagagcgtggccaatgccttcatcatctgtggcaccctgtacacagtgtcctcctacaccagcgcagatgccaccgtgaactttgcctatgacacaggaacaggcatcagcaagaccctgaccatccccttcaagaaccgctacaagtacagctccatgattgactacaaccccctggagaagaagctgtttgcctgggacaacctgaacatggtgacctatgacatcaagctgagcaagatgtag

SEQ ID NO: 160691 - DNA, 1374 bp, synthetic construct
  misc_feature 1..1374: note = Description of Artificial Sequence: Synthetic coding sequence
  source 1..1374: mol_type = other DNA
atgaggttcttctgtgcccgctgctgcagctttggacctgagatgcctgctgtgcagctgctgctgctggcctgcctggtgtgggatgtgggcgccaggacagcccagctgaggaaggccaatgaccagagcggccgctgccagtacaccttctctgtggccagccccaatgaaagcagctgcccagagcagagccaggccatgtctgtcatccacaacctgcagagggacagcagcacccagaggctggacctggaggccaccaaggcccggctgagcagcctggagagcctgctgcgggacaagtctgtgctggaggaggagaagaagaggctgcggcaggagaatgaaaacctggcccggcggctggagagcagcagccaggaggtggcccggctgcggcggggccagtgcccccagacccgggacacagcccgggctgtgcccccaggcagccgggaggtgtccacctggaacctggacaccctggccttccaggagctgaagtctgagctgacagaggtgcctgccagccgcatcctgaaggagagccccagcggctacctgcggtctggagagggggacaccggctgtggggagctggtgtgggtgggggagcccctgaccctgaggacagctgagaccatcaccgggaagtatggagtgtggatgagggaccccaagcccacctacccctacacccaggagaccacctggagaattgacacagtgggcacagatgtgcggcaggtgtttgaatatgacctgatcagccagttcatgcagggctaccccagcaaggtgcacatcctgccccggcccctggagagcactggagctgtggtgtacagcggcagcctgtacttccagggcgctgagagcaggacagtcatccgctatgagctgaacacagagaccgtgaaggccgagaaggagatccctggggccggctaccacggccagttcccctacagctggggcggctacacagacatcgacctggccgtggatgaagctggcctgtgggtgatctacagcacagatgaggccaagggggccatcgtgctgagcaagctgaaccctgagaacctggagctggagcagacctgggagaccaacatcaggaagcagagcgtggccaatgccttcatcatctgtggcaccctgtacacagtgagcagctacaccagcgcagatgccaccgtgaactttgcctatgacaccggcaccggcatcagcaagaccctgaccatccccttcaagaaccgctacaagtacagctccatgattgactacaaccccctggagaagaagctgtttgcctgggacaacctgaacatggtgacctatgacatcaagctgagcaagatgtag

SEQ ID NO: 160692 - DNA, 1314 bp, synthetic construct
  misc_feature 1..1314: note = Description of Artificial Sequence: Synthetic coding sequence
  source 1..1314: mol_type = other DNA
atgtctgtcatccacaacctgcagagggacagcagcacccagaggctggacctggaggccaccaaggcccggctgagcagcctggagagcctgctgcaccagctgaccctggaccaggccgcccggccccaggagacccaggagggcctgcagcgggagctgggcaccctgcggcgggagcgggaccagctggagacccagacccgggagctggagacagcctacagcaacctgctgcgggacaagtctgtgctggaggaggagaagaagaggctgcggcaggagaatgaaaacctggcccggcggctggagagcagcagccaggaggtggcccggctgcggcggggccagtgcccccagacccgggacacagcccgggctgtgcccccaggcagccgggaggtgtccacctggaacctggacaccctggccttccaggagctgaagtctgagctgacagaggtgcctgccagccgcatcctgaaggagagccccagcggctacctgcggtctggagagggggacaccggctgtggggagctggtgtgggtgggggagcccctgaccctgaggacagctgagaccatcaccgggaagtatggagtgtggatgagggaccccaagcccacctacccctacacccaggagaccacctggagaattgacacagtgggcacagatgtgcggcaggtgtttgaatatgacctgatcagccagttcatgcagggctaccccagcaaggtgcacatcctgccccggcccctggagagcactggagctgtggtgtacagcggcagcctgtacttccagggcgctgagagcaggacagtcatccgctatgagctgaacacagagaccgtgaaggccgagaaggagatccctggggccggctaccacggccagttcccctacagctggggcggctacacagacatcgacctggccgtggatgaagctggcctgtgggtgatctacagcacagatgaggccaagggggccatcgtgctgagcaagctgaaccctgagaacctggagctggagcagacctgggagaccaacatcaggaagcagagcgtggccaatgccttcatcatctgtggcaccctgtacacagtgagcagctacaccagcgcagatgccaccgtgaactttgcctatgacaccggcaccggcatcagcaagaccctgaccatccccttcaagaaccgctacaagtacagctccatgattgactacaaccccctggagaagaagctgtttgcctgggacaacctgaacatggtgacctatgacatcaagctgagcaagatgtag

SEQ ID NO: 160693 - DNA, 1035 bp, synthetic construct
  misc_feature 1..1035: note = Description of Artificial Sequence: Synthetic coding sequence
  source 1..1035: mol_type = other DNA
atgaggttcttctgtgcccgctgctgcagctttggacctgagatgcctgctgtgcagctgctgctgctggcctgcctggtgtgggatgtgggcgccaggacagcccagctgaggaaggccaatgaccagagcggccgctgccagtacaccttctctgtggccagccccaatgaaagcagctgcccagagcagagccaggccatgtctgtcatccacaacctgcagagggacagcagcacccagaggctggacctggaggccaccaaggcccggctgagcagcctggagagcctgctgcaccagctgaccctggaccaggccgcccggccccaggagacccaggagggcctgcagcgggagctgggcaccctgcggcgggagcgggaccagctggagacccagacccgggagctggagacagcctacagcaacctgctgcgggacaagtctgtgctggaggaggagaagaagaggctgcggcaggagaatgaaaacctggcccggcggctggagagcagcagccaggaggtggcccggctgcggcggggccagtgcccccagacccgggacacagcccgggctgtgcccccaggcagccgggaggtgtccacctggaacctggacaccctggccttccaggagctgaagtctgagctgacagaggtgcctgccagccgcatcctgaaggagagccccagcggctacctgcggagcggggagggggacaccggctgtggggagctggtgtgggtgggggagcccctgaccctgaggacagctgagaccatcaccgggaagtatggagtgtggatgagggaccccaagcccacctacccctacacccaggagaccacctggagaattgacacagtgggcacagatgtgcggcaggtgtttgaatatgacctgatcagccagttcatgcagggctaccccagcaaggtgcacatcctgccccggcccctggagagcactggagctgtggtgtacagcggcagcctgtacttccgggccctgagccctgagctgtcctag

SEQ ID NO: 160694 - DNA, 1521 bp, synthetic construct
  misc_feature 1..1521: note = Description of Artificial Sequence: Synthetic coding sequence
  source 1..1521: mol_type = other DNA
atgggcaggaagaagatccagatcacccgcatcatggatgaaagaaaccggcaggtgaccttcaccaagaggaagtttggcctgatgaagaaggcctatgagctgtctgtgctgtgtgactgtgaaattgccctgatcatcttcaacagcagcaacaagctgttccagtatgccagcacagacatggacaaggtgctgctgaagtacacagagtacaatgagccccatgagagcaggaccaacagcgacatcgtggagaccctgaggaagaagggcctgaatggctgtgagagcccagatgctgatgactactttgagcacagccccctgtctgaggaccgcttcagcaagctgaatgaagacagcgacttcatcttcaagaggggccccccaggcctgcccccccagaacttctccatgtctgtgacagtgcctgtgaccagccccaatgccctgagctacaccaaccctggcagcagcctggtgagccccagcctggccgccagcagcaccctgacagacagctccatgctgagccccccccagaccaccctgcacagaaatgtgtcccctggggccccccagaggcctcccagcactggaaatgccggcggcatgctgagcaccacagacctgactgtgcccaacggggccggcagcagccctgtgggcaatggatttgtgaacagccgggccagccccaacctgattggagccaccggggccaacagcctgggcaaggtgatgcccaccaagagccccccacctcctgggggcggcaacctgggcatgaacagcaggaagccagacctgcgggtggtgatcccccccagcagcaagggcatgatgccacccctgtacctgaagaggcagctgaacaccaacaacacccagaggatcagcagcagccaggccacccagcccctggccacccctgtggtgtctgtgaccacccccagcctgcccccccagggcctggtgtacagcgccatgcccacagcctacaacacagactacagcctgaccagcgctgacctgagcgccctgcagggcttcaacagccctggcatgctgagcctgggccaggtgtctgcctggcagcagcaccacctgggccaggccgccctgagcagcctggtggccggcggccagctgagccagggcagcaacctgagcatcaacaccaaccagaacatcagcatcaagtctgagcccatcagccccccccgggacaggatgacccccagcggcttccagcagcagcagcagcagcagcagcagcagcagcccccacctccaccccagccccagccccagcccccccagccccagccccggcaggagatgggccgcagccctgtggacagcctgagcagcagcagcagcagctatgatggcagtgaccgggaggaccccaggggggacttccacagccccatcgtgctgggccggccccccaacacagaagatcgggagagccccagcgtgaagaggatgaggatggatgcctgggtgacctag

SEQ ID NO: 160695 - DNA, 1500 bp, synthetic construct
  misc_feature 1..1500: note = Description of Artificial Sequence: Synthetic coding sequence
  source 1..1500: mol_type = other DNA
atgggcaggaagaagatccagatcacccgcatcatggatgaaagaaaccggcaggtgaccttcaccaagaggaagtttggcctgatgaagaaggcctatgagctgtctgtgctgtgtgactgtgaaattgccctgatcatcttcaacagcagcaacaagctgttccagtatgccagcacagacatggacaaggtgctgctgaagtacacagagtacaatgagccccatgagagcaggaccaacagcgacatcgtggaggccctgaacaagaaggagcaccggggctgtgacagcccagaccctgacaccagctatgtgctgaccccccacacagaggagaagtacaagaagatcaatgaggagtttgacaacatgatgaggaaccacaagatcgcccctggcctgcccccccagaacttctccatgtctgtgacagtgcctgtgaccagccccaatgccctgagctacaccaaccctggcagcagcctggtgagccccagcctggccgccagcagcaccctgacagacagctccatgctgagccccccccagaccaccctgcacagaaatgtgtcccctggggccccccagaggcctcccagcactggaaatgccggcggcatgctgagcaccacagacctgactgtgcccaacggggccggcagcagccctgtgggcaatggatttgtgaacagccgggccagccccaacctgattggagccaccggggccaacagcctgggcaaggtgatgcccaccaagagccccccacctcctgggggcggcaacctgggcatgaacagcaggaagccagacctgcgggtggtgatcccccccagcagcaagggcatgatgccacccctgaacacccagaggatcagcagcagccaggccacccagcccctggccacccctgtggtgtctgtgaccacccccagcctgcccccccagggcctggtgtacagcgccatgcccacagcctacaacacagactacagcctgaccagcgctgacctgagcgccctgcagggcttcaacagccctggcatgctgagcctgggccaggtgtctgcctggcagcagcaccacctgggccaggccgccctgagcagcctggtggccggcggccagctgagccagggcagcaacctgagcatcaacaccaaccagaacatcagcatcaagtctgagcccatcagccccccccgggacaggatgaccccatctggcttccagcagcagcagcagcagcagcagcagcagcagcccccacctccaccccagccccagccccagcccccccagccccagccccggcaggagatgggccgcagccctgtggacagcctgagcagcagcagcagcagctatgatggcagtgaccgggaggaccccaggggggacttccacagccccatcgtgctgggccggccccccaacacagaggaccgggagagccccagcgtgaagaggatgaggatggatgcctgggtgacctag

SEQ ID NO: 160696 - DNA, 1290 bp, synthetic construct
  misc_feature 1..1290: note = Description of Artificial Sequence: Synthetic coding sequence
  source 1..1290: mol_type = other DNA
atgggcaggaagaagatccagatcacccgcatcatggatgaaagaaaccggcagaccctgaggaagaagggcctgaatggctgtgagagcccagatgctgatgactactttgagcacagccccctgtctgaggaccgcttcagcaagctgaatgaagacagcgacttcatcttcaagaggggccccccaggcctgcccccccagaacttctccatgtctgtgacagtgcctgtgaccagccccaatgccctgagctacaccaaccctggcagcagcctggtgagccccagcctggccgccagcagcaccctgacagacagctccatgctgagccccccccagaccaccctgcacagaaatgtgtcccctggggccccccagaggcctcccagcactggaaatgccggcggcatgctgagcaccacagacctgactgtgcccaacggggccggcagcagccctgtgggcaatggatttgtgaacagccgggccagccccaacctgattggagccaccggggccaacagcctgggcaaggtgatgcccaccaagagccccccacctcctgggggcggcaacctgggcatgaacagcaggaagccagacctgcgggtggtgatcccccccagcagcaagggcatgatgccacccctgaacacccagaggatcagcagcagccaggccacccagcccctggccacccctgtggtgtctgtgaccacccccagcctgcccccccagggcctggtgtacagcgccatgcccacagcctacaacacagactacagcctgaccagcgctgacctgagcgccctgcagggcttcaacagccctggcatgctgagcctgggccaggtgtctgcctggcagcagcaccacctgggccaggccgccctgagcagcctggtggccggcggccagctgagccagggcagcaacctgagcatcaacaccaaccagaacatcagcatcaagtctgagcccatcagccccccccgggacaggatgaccccatctggcttccagcagcagcagcagcagcagcagcagcagcagcccccacctccaccccagccccagccccagcccccccagccccagccccggcaggagatgggccgcagccctgtggacagcctgagcagcagcagcagcagctatgatggcagtgaccgggaggaccccaggggggacttccacagccccatcgtgctgggccggccccccaacacagaggaccgggagagccccagcgtgaagaggatgaggatggatgcctgggtgacctag

SEQ ID NO: 160697 - DNA, 1494 bp, synthetic construct
  misc_feature 1..1494: note = Description of Artificial Sequence: Synthetic coding sequence
  source 1..1494: mol_type = other DNA
atgggcaggaagaagatccagatcacccgcatcatggatgaaagaaaccggcaggtgaccttcaccaagaggaagtttggcctgatgaagaaggcctatgagctgtctgtgctgtgtgactgtgaaattgccctgatcatcttcaacagcagcaacaagctgttccagtatgccagcacagacatggacaaggtgctgctgaagtacacagagtacaatgagccccatgagagcaggaccaacagcgacatcgtggagaccctgaggaagaagggcctgaatggctgtgagagcccagatgctgatgactactttgagcacagccccctgtctgaggaccgcttcagcaagctgaatgaagacagcgacttcatcttcaagaggggccccccaggcctgcccccccagaacttctccatgtctgtgacagtgcctgtgaccagccccaatgccctgagctacaccaaccctggcagcagcctggtgagccccagcctggccgccagcagcaccctgacagacagctccatgctgagccccccccagaccaccctgcacagaaatgtgtcccctggggccccccagaggcctcccagcactggaaatgccggcggcatgctgagcaccacagacctgactgtgcccaacggggccggcagcagccctgtgggcaatggatttgtgaacagccgggccagccccaacctgattggagccaccggggccaacagcctgggcaaggtgatgcccaccaagagccccccacctcctgggggcggcaacctgggcatgaacagcaggaagccagacctgcgggtggtgatcccccccagcagcaagggcatgatgccacccctgaacacccagaggatcagcagcagccaggccacccagcccctggccacccctgtggtgtctgtgaccacccccagcctgcccccccagggcctggtgtacagcgccatgcccacagcctacaacacagactacagcctgaccagcgctgacctgagcgccctgcagggcttcaacagccctggcatgctgagcctgggccaggtgtctgcctggcagcagcaccacctgggccaggccgccctgagcagcctggtggccggcggccagctgagccagggcagcaacctgagcatcaacaccaaccagaacatcagcatcaagtctgagcccatcagccccccccgggacaggatgaccccatctggcttccagcagcagcagcagcagcagcagcagcagcagcccccacctccaccccagccccagccccagcccccccagccccagccccggcaggagatgggccgcagccctgtggacagcctgagcagcagcagcagcagctatgatggcagtgaccgggaggaccccaggggggacttccacagccccatcgtgctgggccggccccccaacacagaggaccgggagagccccagcgtgaagaggatgaggatggatgcctgggtgacctag

SEQ ID NO: 160698 - DNA, 1494 bp, synthetic construct; identical to SEQ ID NO: 160697
  misc_feature 1..1494: note = Description of Artificial Sequence: Synthetic coding sequence
  source 1..1494: mol_type = other DNA

SEQ ID NO: 160699 - DNA, 1518 bp, synthetic construct
  misc_feature 1..1518: note = Description of Artificial Sequence: Synthetic coding sequence
  source 1..1518: mol_type = other DNA
atgggcaggaagaagatccagatcacccgcatcatggatgaaagaaaccggcaggtgaccttcaccaagaggaagtttggcctgatgaagaaggcctatgagctgtctgtgctgtgtgactgtgaaattgccctgatcatcttcaacagcagcaacaagctgttccagtatgccagcacagacatggacaaggtgctgctgaagtacacagagtacaatgagccccatgagagcaggaccaacagcgacatcgtggagaccctgaggaagaagggcctgaatggctgtgagagcccagatgctgatgactactttgagcacagccccctgtctgaggaccgcttcagcaagctgaatgaagacagcgacttcatcttcaagaggggccccccaggcctgcccccccagaacttctccatgtctgtgacagtgcctgtgaccagccccaatgccctgagctacaccaaccctggcagcagcctggtgagccccagcctggccgccagcagcaccctgacagacagctccatgctgagccccccccagaccaccctgcacagaaatgtgtcccctggggccccccagaggcctcccagcactggaaatgccggcggcatgctgagcaccacagacctgactgtgcccaacggggccggcagcagccctgtgggcaatggatttgtgaacagccgggccagccccaacctgattggagccaccggggccaacagcctgggcaaggtgatgcccaccaagagccccccacctcctgggggcggcaacctgggcatgaacagcaggaagccagacctgcgggtggtgatcccccccagcagcaagggcatgatgccacccctgtctgaggaggaggagctggagctgaacacccagaggatcagcagcagccaggccacccagcccctggccacccctgtggtgtctgtgaccacccccagcctgcccccccagggcctggtgtacagcgccatgcccacagcctacaacacagactacagcctgaccagcgctgacctgagcgccctgcagggcttcaacagccctggcatgctgagcctgggccaggtgtctgcctggcagcagcaccacctgggccaggccgccctgagcagcctggtggccggcggccagctgagccagggcagcaacctgagcatcaacaccaaccagaacatcagcatcaagtctgagcccatcagccccccccgggacaggatgaccccatctggcttccagcagcagcagcagcagcagcagcagcagcagcccccacctccaccccagccccagccccagcccccccagccccagccccggcaggagatgggccgcagccctgtggacagcctgagcagcagcagcagcagctatgatggcagtgaccgggaggaccccaggggggacttccacagccccatcgtgctgggccggccccccaacacagaggaccgggagagccccagcgtgaagaggatgaggatggatgcctgggtgacctag

SEQ ID NO: 160700 - DNA, 117 bp, synthetic construct
  misc_feature 1..117: note = Description of Artificial Sequence: Synthetic coding sequence
  source 1..117: mol_type = other DNA
atgggcaggaagaagatccagatcacccgcatcatggatgaaagaaaccggcaggtgaccttcaccaagaggaagtttggcctgatgaagaaggcctatgagctgtctgtgctgtag

SEQ ID NO: 160701 - DNA, 1314 bp, synthetic construct
  misc_feature 1..1314: note = Description of Artificial Sequence: Synthetic coding sequence
  source 1..1314: mol_type = other DNA
atgggcaggaagaagatccagatcacccgcatcatggatgaaagaaaccggcagaccctgaggaagaagggcctgaatggctgtgagagcccagatgctgatgactactttgagcacagccccctgtctgaggaccgcttcagcaagctgaatgaagacagcgacttcatcttcaagaggggccccccaggcctgcccccccagaacttctccatgtctgtgacagtgcctgtgaccagccccaatgccctgagctacaccaaccctggcagcagcctggtgagccccagcctggccgccagcagcaccctgacagacagctccatgctgagccccccccagaccaccctgcacagaaatgtgtcccctggggccccccagaggcctcccagcactggaaatgccggcggcatgctgagcaccacagacctgactgtgcccaacggggccggcagcagccctgtgggcaatggatttgtgaacagccgggccagccccaacctgattggagccaccggggccaacagcctgggcaaggtgatgcccaccaagagccccccacctcctgggggcggcaacctgggcatgaacagcaggaagccagacctgcgggtggtgatcccccccagcagcaagggcatgatgccacccctgtctgaggaggaggagctggagctgaacacccagaggatcagcagcagccaggccacccagcccctggccacccctgtggtgtctgtgaccacccccagcctgcccccccagggcctggtgtacagcgccatgcccacagcctacaacacagactacagcctgaccagcgctgacctgagcgccctgcagggcttcaacagccctggcatgctgagcctgggccaggtgtctgcctggcagcagcaccacctgggccaggccgccctgagcagcctggtggccggcggccagctgagccagggcagcaacctgagcatcaacaccaaccagaacatcagcatcaagtctgagcccatcagccccccccgggacaggatgaccccatctggcttccagcagcagcagcagcagcagcagcagcagcagcccccacctccaccccagccccagccccagcccccccagccccagccccggcaggagatgggccgcagccctgtggacagcctgagcagcagcagcagcagctatgatggcagtgaccgggaggaccccaggggggacttccacagccccatcgtgctgggccggccccccaacacagaggaccgggagagccccagcgtgaagaggatgaggatggatgcctgggtgacctag

SEQ ID NO: 160702 - DNA, 234 bp, synthetic construct
  misc_feature 1..234: note = Description of Artificial Sequence: Synthetic coding sequence
  source 1..234: mol_type = other DNA
atgggcaggaagaagatccagatcacccgcatcatggatgaaagaaaccggcaggtgaccttcaccaagaggaagtttggcctgatgaagaaggcctatgagctgtctgtgctgtgtgactgtgaaattgccctgatcatcttcaacagcagcaacaagctgttccagtatgccagcacagacatggacaaggtgctgctgaagtacacagagtacaatgagccccatgaatag

SEQ ID NO: 160703 - DNA, 258 bp, synthetic construct
  misc_feature 1..258: note = Description of Artificial Sequence: Synthetic coding sequence
  source 1..258: mol_type = other DNA
atgggcaggaagaagatccagatcacccgcatcatggatgaaagaaaccggcaggtgaccttcaccaagaggaagtttggcctgatgaagaaggcctatgagctgtctgtgctgtgtgactgtgaaattgccctgatcatcttcaacagcagcaacaagctgttccagtatgccagcacagacatggacaaggtgctgctgaagtacacagagtacaatgagccccatgagagcaggaccaacagcgacatcgtgtag

SEQ ID NO: 160704 - DNA, 1107 bp, synthetic construct
  misc_feature 1..1107: note = Description of Artificial Sequence: Synthetic coding sequence
  source 1..1107: mol_type = other DNA
atgggcaggaagaagatccagatcagccgcatcctggaccagaggaaccggcaggtgaccttcaccaagaggaagtttggcctgatgaagaaggcctatgagctgtctgtgctgtgtgactgtgaaattgccctgatcatcttcaacagcgccaacagactcttccagtatgccagcacagacatggacagagtgctgctgaagtacacagagtacagcgagccccatgagagcaggaccaacacagacatcctggagaccctgaagaggcggggcatcggcctggatggccctgagctggagccagatgagggccctgaggagcctggagagaagttccggcggctggccggggagggcggggaccctgccctgccccggccccggctgtacccagctgccccagccatgcccagcccagatgtggtgtatggagccctgcccccacctggctgtgaccccagcggcctgggggaggccctgcctgcccagagccggcccagccccttccggcctgctgcccccaaggccggccccccaggcctggtgcaccccctcttcagccccagccacctgaccagcaagaccccaccacccctgtacctgcccacagagggcagaagaagtgacctgcccggcggcctggccggcccccggggcggcctgaacaccagccgcagcctgtacagcggcctgcagaacccctgcagcacagccaccccaggcccccccctgggcagcttccccttcctgcccggcggccccccagaatatggcctgggggaccccccacctcctcctggcctgctgcagccccccaccctggccccctggcagcccagcagaggagatggccccccagctgtgagcagccagcccagcggcggccgcagcctgggggaggagggcccccccaccaggggggccagcccccccaccccacctgtgtccatcaagtctgagcggctgagccctgcccctgggggccctggggacttccccaagaccttcccctaccccctgctgctggcccggagcctggccgagcccctgcggcccggccctgccctgcggcggctgcccctggctgatggctggcccaggtag

SEQ ID NO: 160705 - DNA, 894 bp, synthetic construct
  misc_feature 1..894: note = Description of Artificial Sequence: Synthetic coding sequence
  source 1..894: mol_type = other DNA
atgggcaggaagaagatccagatcagccgcatcctggaccagaggaaccggcaggtgaccttcaccaagaggaagtttggcctgatgaagaaggcctatgagctgtctgtgctgtgtgactgtgaaattgccctgatcatcttcaacagcgccaacagactcttccagtatgccagcacagacatggacagagtgctgctgaagtacacagagtacagcgagccccatgagagcaggaccaacacagacatcctggaggtgccccagaccctgaagagaagaggcatcggcctggatggccctgagctggagccagatgagggccctgaggagcccggggagaagttccggcggctggccggggagggcggggaccctgccctgccccggccccggctgtacccagctgccccagccatgcccagcccagatgtggtgtatggagccctgcccccacctggctgtgaccccagcggcctgggggaggccctgcctgcccagagccggcccagccccttccggcctgctgcccccaaggccggccccccaggcctggtgcaccccctcttcagccccagccacctgaccagcaagaccccaccacccctgtacctgcccacagagggccgccgcagtgacctgcccggcggcctggccggcccccggggcggcctgaacaccagccgcagcctgtacagcggcctgcagaacccctgcagcacagccaccccaggcccccccctgggcagcttccccttcctgcccggcggccccccagaatatggcctgggggaccccccacctcctcctggcctgctgcagccccccaccctggccccctggcagcccagcagaggagatggccccccagctgtgagcagccagcccaggtag

SEQ ID NO: 160706 - DNA, 1107 bp, synthetic construct; identical to SEQ ID NO: 160704
  misc_feature 1..1107: note = Description of Artificial Sequence: Synthetic coding sequence
  source 1..1107: mol_type = other DNA

SEQ ID NO: 160707 - DNA, 1098 bp, synthetic construct
  misc_feature 1..1098: note = Description of Artificial Sequence: Synthetic coding sequence
  source 1..1098: mol_type = other DNA
atgggcaggaagaagatccagatcagccgcatcctggaccagaggaaccggcaggtgaccttcaccaagaggaagtttggcctgatgaagaaggcctatgagctgtctgtgctgtgtgactgtgaaattgccctgatcatcttcaacagcgccaacagactcttccagtatgccagcacagacatggacagagtgctgctgaagtacacagagtacagcgagccccatgagagcaggaccaacacagacatcctggagaccctgaagaggcggggcatcggcctggatggccctgagctggagccagatgagggccctgaggagcctggagagaagttccggcggctggccggggagggcggggaccctgccctgccccggccccggctgtacccagctgccccagccatgcccagcccagatgtggtgtatggagccctgcccccacctggctgtgaccccagcggcctgggggaggccctgcctgcccagagccggcccagccccttccggcctgctgcccccaaggccggccccccaggcctggtgcaccccctcttcagccccagccacctgaccagcaagaccccaccacccctgtacctgcccacagagggcagaagaagtgacctgcccggcggcctggccggcccccggggcggcctgaacaccagccgcagcctgtacagcggcctgcagaacccctgcagcacagccaccccaggcccccccctgggcagcttccccttcctgcccggcggcccccctgtgggcgctgaggcctgggcccggcgggtgccccagcctgctgccccaccccggcggcccccccagagcgccagcagcctgagcgccagcctgcggcccccaggggccccagccaccttcctgcggcccagccccatcccctgcagcagccctggcccctggcagagcctgtgtggcctgggccccccctgtgccggctgcccctggcccacagctggccctggccgccgcagccctgggggcaccagccctgagaggagccctggaacagcccgggcccggggggaccccaccagcctgcaggccagcagcgagaagacccagcagtag

SEQ ID NO: 160708 - DNA, 1392 bp, synthetic construct
  misc_feature 1..1392: note = Description of Artificial Sequence: Synthetic coding sequence
  source 1..1392: mol_type = other DNA
atgggcaggaagaagatccagatcacccgcatcatggatgaaagaaaccggcaggtgaccttcaccaagaggaagtttggcctgatgaagaaggcctatgagctgtctgtgctgtgtgactgtgaaattgccctgatcatcttcaacagcaccaacaagctgttccagtatgccagcacagacatggacaaggtgctgctgaagtacacagagtacaatgagccccatgagagcaggaccaacagcgacatcgtggaggccctgaacaagaaggagaacaagggctgtgagagcccagaccctgacagcagctatgccctgacccccaggacagaggagaagtacaagaagatcaatgaggagtttgacaacatgatcaagagccacaagatcccagctgtgcccccacccaactttgagatgcctgtgtccatccctgtgagcagccacaacagcctggtgtacagcaaccctgtgagcagcctgggcaaccccaacctgctgcccctggcccaccccagcctgcagagaaattccatgagccctggggtgacccaccggccccccagcgctggcaacacaggaggcctgatgggcggggacctgaccagcggggccggcaccagcgctggaaatggctacggcaaccccaggaacagccctggcctgctggtgtccccaggcaacctgaacaagaacatgcaggccaagagccccccacccatgaacctgggcatgaacaacaggaagccagacctgcgggtgctgatccccccaggcagcaagaacaccatgcccagcgtgaaccagaggatcaacaacagccagagcgcccagagcctggccacccctgtggtgtctgtggccacccccaccctgcccggccagggcatgggcggctaccccagcgccatcagcaccacctatggaacagagtacagcctgagcagcgctgacctgagcagcctgagcggcttcaacacagccagcgccctgcacctgggctctgtgacaggctggcagcagcagcacctgcacaacatgcctccttctgccctgagccagctgggcgcctgcaccagcacccacctgagccagagcagcaacctgagcctgcccagcacccagagcctgaacatcaagtctgagcctgtgtccccaccccgggacaggaccaccacccccagccgctacccccagcacaccaggcatgaggccggccgcagccctgtggacagcctgagcagctgcagcagcagctatgatggcagtgaccgggaggaccacagaaatgagttccacagccccatcggcctgacccggcccagcccagatgagcgggagagccccagcgtgaagaggatgaggctgtctgagggctgggccacctag

SEQ ID NO: 160709 - DNA, 1422 bp, synthetic construct
  misc_feature 1..1422: note = Description of Artificial Sequence: Synthetic coding sequence
  source 1..1422: mol_type = other DNA
atgggcaggaagaagatccagatcacccgcatcatggatgaaagaaaccggcaggtgaccttcaccaagaggaagtttggcctgatgaagaaggcctatgagctgtctgtgctgtgtgactgtgaaattgccctgatcatcttcaacagcaccaacaagctgttccagtatgccagcacagacatggacaaggtgctgctgaagtacacagagtacaatgagccccatgagagcaggaccaacagcgacatcgtggagaccctgaggaagaagggcctgaatggctgtgacagcccagaccctgatgctgatgacagcgtgggccacagccctgagagcgaggacaagtacaggaagatcaatgaagacatcgacctgatgatcagccggcagaggctgtgtgctgtgcccccacccaactttgagatgcctgtgtccatccctgtgagcagccacaacagcctggtgtacagcaaccctgtgagcagcctgggcaaccccaacctgctgcccctggcccaccccagcctgcagagaaattccatgagccctggggtgacccaccggccccccagcgctggcaacacaggaggcctgatgggcggggacctgaccagcggggccggcaccagcgctggaaatggctacggcaaccccaggaacagccctggcctgctggtgtccccaggcaacctgaacaagaacatgcaggccaagagccccccacccatgaacctgggcatgaacaacaggaagccagacctgcgggtgctgatccccccaggcagcaagaacaccatgcccagcgtgtctgaagatgtggacctgctgctgaaccagaggatcaacaacagccagagcgcccagagcctggccacccctgtggtgtctgtggccacccccaccctgcccggccagggcatgggcggctaccccagcgccatcagcaccacctatggaacagagtacagcctgagcagcgctgacctgagcagcctgagcggcttcaacacagccagcgccctgcacctgggctctgtgacaggctggcagcagcagcacctgcacaacatgcctccttctgccctgagccagctgggcgcctgcaccagcacccacctgagccagagcagcaacctgagcctgcccagcacccagagcctgaacatcaagtctgagcctgtgtccccaccccgggacaggaccaccacccccagccgctacccccagcacaccaggcatgaggccggccgcagccctgtggacagcctgagcagctgcagcagcagctatgatggcagtgaccgggaggaccacagaaatgagttccacagccccatcggcctgacccggcccagcccagatgagcgggagagccccagcgtgaagaggatgaggctgtctgagggctgggccacctag

SEQ ID NO: 160710 - DNA, 297 bp, synthetic construct
  misc_feature 1..297: note = Description of Artificial Sequence: Synthetic coding sequence
  source 1..297: mol_type = other DNA
atgggcaggaagaagatccagatcacccgcatcatggatgaaagaaaccggcaggtgaccttcaccaagaggaagtttggcctgatgaagaaggcctatgagctgtctgtgctgtgtgactgtgaaattgccctgatcatcttcaacagcaccaacaagctgttccagtatgccagcacagacatggacaaggtgctgctgaagtacacagagtacaatgagccccatgagagcaggaccaacagcgacatcgtggagaccctgaggaagaagggcctgaatggctgtgacagctag

SEQ ID NO: 160711 - DNA, 390 bp, synthetic construct
  misc_feature 1..390: note = Description of Artificial Sequence: Synthetic coding sequence
  source 1..390: mol_type = other DNA
atgggcaggaagaagatccagatcacccgcatcatggatgaaagaaaccggcaggtgaccttcaccaagaggaagtttggcctgatgaagaaggcctatgagctgtctgtgctgtgtgactgtgaaattgccctgatcatcttcaacagcaccaacaagctgttccagtatgccagcacagacatggacaaggtgctgctgaagtacacagagtacaatgagccccatgagagcaggaccaacagcgacatcgtggagaccctgaggaagaagggcctgaatggctgtgacagcccagaccctgatgctgatgacagcgtgggccacagccctgagagcgaggacaagtacaggaagatcaatgaagacatcgacctgatgatctcctag

SEQ ID NO: 160712 - DNA, 264 bp, synthetic construct
  misc_feature 1..264: note = Description of Artificial Sequence: Synthetic coding sequence
  source 1..264: mol_type = other DNA
atgggcaggaagaagatccagatcacccgcatcatggatgaaagaaaccggcaggtgaccttcaccaagaggaagtttggcctgatgaagaaggcctatgagctgtctgtgctgtgtgactgtgaaattgccctgatcatcttcaacagcaccaacaagctgttccagtatgccagcacagacatggacaaggtgctgctgaagtacacagagtacaatgagccccatgagagcaggaccaacagcgacatcgtggagacctag

SEQ ID NO: 160713 - DNA, 1422 bp, synthetic construct
  misc_feature 1..1422: note = Description of Artificial Sequence: Synthetic coding sequence
  source 1..1422: mol_type = other DNA
atgggcaggaagaagatccagatcacccgcatcatggatgaaagaaaccggcaggtgaccttcaccaagaggaagtttggcctgatgaagaaggcctatgagctgtctgtgctgtgtgactgtgaaattgccctgatcatcttcaacagcaccaacaagctgttccagtatgccagcacagacatggacaaggtgctgctgaagtacacagagtacaatgagccccatgagagcaggaccaacagcgacatcgtggagaccctgaggaagaagggcctgaatggctgtgacagcccagaccctgatgctgatgacagcgtgggccacagccctgagagcgaggacaagtacaggaagatcaatgaagacatcgacctgatgatcagccggcagaggctgtgtgctgtgcccccacccaactttgagatgcctgtgtccatccctgtgagcagccacaacagcctggtgtacagcaaccctgtgagcagcctgggcaaccccaacctgctgcccctggcccaccccagcctgcagagaaattccatgagccctggggtgacccaccggccccccagcgctggcaacacaggaggcctgatgggcggggacctgaccagcggggccggcaccagcgctggaaatggctacggcaaccccaggaacagccctggcctgctggtgtccccaggcaacctgaacaagaacatgcaggccaagagccccccacccatgaacctgggcatgaacaacaggaagccagacctgcgggtgctgatccccccaggcagcaagaacaccatgcccagcgtggtgatccagaactacatcctgaagaaccagaggatcaacaacagccagagcgcccagagcctggccacccctgtggtgtctgtggccacccccaccctgcccggccagggcatgggcggctaccccagcgccatcagcaccacctatggaacagagtacagcctgagcagcgctgacctgagcagcctgagcggcttcaacacagccagcgccctgcacctgggctctgtgacaggctggcagcagcagcacctgcacaacatgcctccttctgccctgagccagctgggcgcctgcaccagcacccacctgagccagagcagcaacctgagcctgcccagcacccagagcctgaacatcaagtctgagcctgtgtccccaccccgggacaggaccaccacccccagccgctacccccagcacaccaggcatgaggccggccgcagccctgtggacagcctgagcagctgcagcagcagctatgatggcagtgaccgggaggaccacagaaatgagttccacagccccatcggcctgacccggcccagcccagatgagcgggagagccccagcgtgaagaggatgaggctgtctgagggctgggccacctag

SEQ ID NO: 160714 - DNA, 684 bp, synthetic construct
  misc_feature 1..684: note = Description of Artificial Sequence: Synthetic coding sequence
  source 1..684: mol_type = other DNA
atgggcaggaagaagatccagatcacccgcatcatggatgaaagaaaccggcaggtgaccttcaccaagaggaagtttggcctgatgaagaaggcctatgagctgtctgtgctgtgtgactgtgaaattgccctgatcatcttcaacagcaccaacaagctgttccagtatgccagcacagacatggacaaggtgctgctgaagtacacagagtacaatgagccccatgagagcaggaccaacagcgacatcgtggaggccctgaacaagaaggagaacaagggctgtgagagcccagaccctgacagcagctatgccctgacccccaggacagaggagaagtacaagaagatcaatgaggagtttgacaacatgatcaagagccacaagatcccagctgtgcccccacccaactttgagatgcctgtgtccatccctgtgagcagccacaacagcctggtgtacagcaaccctgtgagcagcctgggcaaccccaacctgctgcccctggcccaccccagcctgcagagaaattccatgagccctggggtgacccaccggccccccagcgctggcaacacaggaggcctgatgggcggggacctgaccagcggggccggcaccagcgctggaaatggctacggcaaccccaggaacagccctggcctgctggtgagcccctag

SEQ ID NO: 160715 - DNA, 363 bp, synthetic construct
  misc_feature 1..363: note = Description of Artificial Sequence: Synthetic coding sequence
  source 1..363: mol_type = other DNA
atgggcaggaagaagatccagatcacccgcatcatggatgaaagaaaccggcaggtgaccttcaccaagaggaagtttggcctgatgaagaaggcctatgagctgtctgtgctgtgtgactgtgaaattgccctgatcatcttcaacagcaccaacaagctgttccagtatgccagcacagacatggacaaggtgctgctgaagtacacagagtacaatgagccccatgagagcaggaccaacagcgacatcgtggaggccctgaacaagaaggagaacaagggctgtgagagcccagaccctgacagcagctatgccctgacccccaggacagaggagaagtacaagaagatcaatgaatag

SEQ ID NO: 160716 - DNA, 381 bp, synthetic construct
  misc_feature 1..381: note = Description of Artificial Sequence: Synthetic coding sequence
  source 1..381: mol_type = other DNA
atgggcaggaagaagatccagatcacccgcatcatggatgaaagaaaccggcaggtgaccttcaccaagaggaagtttggcctgatgaagaaggcctatgagctgtctgtgctgtgtgactgtgaaattgccctgatcatcttcaacagcaccaacaagctgttccagtatgccagcacagacatggacaaggtgctgctgaagtacacagagtacaatgagccccatgagagcaggaccaacagcgacatcgtggagaccctgaggaagaagggcctgaatggctgtgacagcccagaccctgatgctgatgacagcgtgggccacagccctgagagcgaggacaagtacaggaagatcaatgaagacatcgacctgtag

SEQ ID NO: 160717 - DNA, 87 bp, synthetic construct
  misc_feature 1..87: note = Description of Artificial Sequence: Synthetic coding sequence
  source 1..87: mol_type = other DNA
atgggcaggaagaagatccagatcacccgcatcatggatgaaagaaaccggcaggtgaccttcaccaagaggaagtttggcctgtag

SEQ ID NO: 160718 - DNA, 1398 bp, synthetic construct
  misc_feature 1..1398: note = Description of Artificial Sequence: Synthetic coding sequence
  source 1..1398: mol_type = other DNA
atgggcaggaagaagatccagatcacccgcatcatggatgaaagaaaccggcaggtgaccttcaccaagaggaagtttggcctgatgaagaaggcctatgagctgtctgtgctgtgtgactgtgaaattgccctgatcatcttcaacagcaccaacaagctgttccagtatgccagcacagacatggacaaggtgctgctgaagtacacagagtacaatgagccccatgagagcaggaccaacagcgacatcgtggagaccctgaggaagaagggcctgaatggctgtgacagcccagaccctgatgctgatgacagcgtgggccacagccctgagagcgaggacaagtacaggaagatcaatgaagacatcgacctgatgatcagccggcagaggctgtgtgctgtgcccccacccaactttgagatgcctgtgtccatccctgtgagcagccacaacagcctggtgtacagcaaccctgtgagcagcctgggcaaccccaacctgctgcccctggcccaccccagcctgcagagaaattccatgagccctggggtgacccaccggccccccagcgctggcaacacaggaggcctgatgggcggggacctgaccagcggggccggcaccagcgctggaaatggctacggcaaccccaggaacagccctggcctgctggtgtccccaggcaacctgaacaagaacatgcaggccaagagccccccacccatgaacctgggcatgaacaacaggaagccagacctgcgggtgctgatccccccaggcagcaagaacaccatgcccagcgtgaaccagaggatcaacaacagccagagcgcccagagcctggccacccctgtggtgtctgtggccacccccaccctgcccggccagggcatgggcggctaccccagcgccatcagcaccacctatggaacagagtacagcctgagcagcgctgacctgagcagcctgagcggcttcaacacagccagcgccctgcacctgggctctgtgacaggctggcagcagcagcacctgcacaacatgcctccttctgccctgagccagctgggcgcctgcaccagcacccacctgagccagagcagcaacctgagcctgcccagcacccagagcctgaacatcaagtctgagcctgtgtccccaccccgggacaggaccaccacccccagccgctacccccagcacaccaggcatgaggccggccgcagccctgtggacagcctgagcagctgcagcagcagctatgatggcagtgaccgggaggaccacagaaatgagttccacagccccatcggcctgacccggcccagcccagatgagcgggagagccccagcgtgaagaggatgaggctgtctgagggctgggccacctag

SEQ ID NO: 160719 - DNA, 729 bp, synthetic construct
  misc_feature 1..729: note = Description of Artificial Sequence: Synthetic coding sequence
  source 1..729: mol_type = other DNA
atgggcaggaagaagatccagatcacccgcatcatggatgaaagaaaccggcaggtgaccttcaccaagaggaagtttggcctgatgaagaaggcctatgagctgtctgtgctgtgtgactgtgaaattgccctgatcatcttcaacagcaccaacaagctgttccagtatgccagcacagacatggacaaggtgctgctgaagtacacagagtacaatgagccccatgagagcaggaccaacagcgacatcgtggaggccctgaacaagaaggagaacaagggctgtgagagcccagaccctgacagcagctatgccctgacccccaggacagaggagaagtacaagaagatcaatgaggagtttgacaacatgatcaagagccacaagatcccagctgtgcccccacccaactttgagatgcctgtgtccatccctgtgagcagccacaacagcctggtgtacagcaaccctgtgagcagcctgggcaaccccaacctgctgcccctggcccaccccagcctgcagagaaattccatgagccctggggtgacccaccggccccccagcgctggcaacacaggaggcctgatgggcggggacctgaccagcggggccggcaccagcgctggaaatggctacggcaaccccaggaacagccctggcctgctggtgtccccaggcaacctgaacaagaacatgcaggccaagagccccccacccatgtag

SEQ ID NO: 160720 - DNA, 1326 bp, synthetic construct
  misc_feature 1..1326: note = Description of Artificial Sequence: Synthetic coding sequence
  source 1..1326: mol_type = other DNA
atgggcaggaagaagatccagatcacccgcatcatggatgaaagaaaccggcaggtgaccttcaccaagaggaagtttggcctgatgaagaaggcctatgagctgtctgtgctgtgtgactgtgaaattgccctgatcatcttcaacagcaccaacaagctgttccagtatgccagcacagacatggacaaggtgctgctgaagtacacagagtacaatgagccccatgagagcaggaccaacagcgacatcgtggagaccctgaggaagaagggcctgaatggctgtgacagcccagaccctgatgctgatgacagcgtgggccacagccctgagagcgaggacaagtacaggaagatcaatgaagacatcgacctgatgatcagccggcagaggctgtgtgctgtgcccccacccaactttgagatgcctgtgtccatccctgtgagcagccacaacagcctggtgtacagcaaccctgtgagcagcctgggcaaccccaacctgctgcccctggcccaccccagcctgcagagaaattccatgagccctggggtgacccaccggccccccagcgctggcaacacaggaggcctgatgggcggggacctgaccagcggggccggcaccagcgctggaaatggctacggcaaccccaggaacagccctggcctgctggtgtccccaggcaacctgaacaagaacatgcaggccaagagccccccacccatgaacctgggcatgaacaacaggaagccagacctgcgggtgctgatccccccaggcagcaagaacaccatgcccagcgtgtctgaagatgtggacctgctgctgaaccagaggatcaacaacagccagagcgcccagagcctggccacccctgtggtgtctgtggccacccccaccctgcccggccagggcatgggcggctaccccagcgccatcagcaccacctatggaacagagtacagcctgagcagcgctgacctgagcagcctgagcggcttcaacacagccagcgccctgcacctgggctctgtgacaggctggcagcagcagcacctgcacaacatgcctccttctgccctgagccagctgggggacaggaccaccacccccagccgctacccccagcacaccaggcatgaggccggccgcagccctgtggacagcctgagcagctgcagcagcagctatgatggcagtgaccgggaggaccacagaaatgagttccacagccccatcggcctgacccggcccagcccagatgagcgggagagccccagcgtgaagaggatgaggctgtctgagggctgggccacctag

SEQ ID NO: 160721 - DNA, 1422 bp, synthetic construct; identical to SEQ ID NO: 160709
  misc_feature 1..1422: note = Description of Artificial Sequence: Synthetic coding sequence
  source 1..1422: mol_type = other DNA

SEQ ID NO: 160722 - DNA, 1254 bp, synthetic construct
  misc_feature 1..1254: note = Description of Artificial Sequence: Synthetic coding sequence
  source 1..1254: mol_type = other DNA
atgggcaggaagaagatccagatcacccgcatcatggatgaaagaaaccggcaggtgaccttcaccaagaggaagtttggcctgatgaagaaggcctatgagctgtctgtgctgtgtgactgtgaaattgccctgatcatcttcaacagcaccaacaagctgttccagtatgccagcacagacatggacaaggtgctgctgaagtacacagagtacaatgagccccatgagagcaggaccaacagcgacatcgtggaggccgtgcccccacccaactttgagatgcctgtgtccatccctgtgagcagccacaacagcctggtgtacagcaaccctgtgagcagcctgggcaaccccaacctgctgcccctggcccaccccagcctgcagagaaattccatgagccctggggtgacccaccggccccccagcgctggcaacacaggaggcctgatgggcggggacctgaccagcggggccggcaccagcgctggaaatggctacggcaaccccaggaacagccctggcctgctggtgtccccaggcaacctgaacaagaacatgcaggccaagagccccccacccatgaacctgggcatgaacaacaggaagccagacctgcgggtgctgatccccccaggcagcaagaacaccatgcccagcgtgaaccagaggatcaacaacagccagagcgcccagagcctggccacccctgtggtgtctgtggccacccccaccctgcccggccagggcatgggcggctaccccagcgccatcagcaccacctatggaacagagtacagcctgagcagcgctgacctgagcagcctgagcggcttcaacacagccagcgccctgcacctgggctctgtgacaggctggcagcagcagcacctgcacaacatgcctccttctgccctgagccagctgggcgcctgcaccagcacccacctgagccagagcagcaacctgagcctgcccagcacccagagcctgaacatcaagtctgagcctgtgtccccaccccgggacaggaccaccacccccagccgctacccccagcacaccaggcatgaggccggccgcagccctgtggacagcctgagcagctgcagcagcagctatgatggcagtgaccgggaggaccacagaaatgagttccacagccccatcggcctgacccggcccagcccagatgagcgggagagccccagcgtgaagaggatgaggctgtctgagggctgggccacctag

SEQ ID NO: 160723 - DNA, 1452 bp, synthetic construct
  misc_feature 1..1452: note = Description of Artificial Sequence: Synthetic coding sequence
  source 1..1452: mol_type = other DNA
atgggcaggaagaagatccagatcacccgcatcatggatgaaagaaaccggcaggtgaccttcaccaagaggaagtttggcctgatgaagaaggcctatgagctgtctgtgctgtgtgactgtgaaattgccctgatcatcttcaacagcaccaacaagctgttccagtatgccagcacagacatggacaaggtgctgctgaagtacacagagtacaatgagccccatgagagcaggaccaacagcgacatcgtggagaccctgaggaagaagggcctgaatggctgtgacagcccagaccctgatgctgatgacagcgccctgaacaagaaggagaacaagggctgtgagagcccagaccctgacagcagctatgccctgacccccaggacagaggagaagtacaagaagatcaatgaggagtttgacaacatgatcaagagccacaagatcccagctgtgcccccacccaactttgagatgcctgtgtccatccctgtgagcagccacaacagcctggtgtacagcaaccctgtgagcagcctgggcaaccccaacctgctgcccctggcccaccccagcctgcagagaaattccatgagccctggggtgacccaccggccccccagcgctggcaacacaggaggcctgatgggcggggacctgaccagcggggccggcaccagcgctggaaatggctacggcaaccccaggaacagccctggcctgctggtgtccccaggcaacctgaacaagaacatgcaggccaagagccccccacccatgaacctgggcatgaacaacaggaagccagacctgcgggtgctgatccccccaggcagcaagaacaccatgcccagcgtgaaccagaggatcaacaacagccagagcgcccagagcctggccacccctgtggtgtctgtggccacccccaccctgcccggccagggcatgggcggctaccccagcgccatcagcaccacctatggaacagagtacagcctgagcagcgctgacctgagcagcctgagcggcttcaacacagccagcgccctgcacctgggctctgtgacaggctggcagcagcagcacctgcacaacatgcctccttctgccctgagccagctgggcgcctgcaccagcacccacctgagccagagcagcaacctgagcctgcccagcacccagagcctgaacatcaagtctgagcctgtgtccccaccccgggacaggaccaccacccccagccgctacccccagcacaccaggcatgaggccggccgcagccctgtggacagcctgagcagctgcagcagcagctatgatggcagtgaccgggaggaccacagaaatgagttccacagccccatcggcctgacccggcccagcccagatgagcgggagagccccagcgtgaagaggatgaggctgtctgagggctgggccacctag

SEQ ID NO: 160724 - DNA, 1563 bp, synthetic construct
  misc_feature 1..1563: note = Description of Artificial Sequence: Synthetic coding sequence
  source 1..1563: mol_type = other DNA
atgggcaggaagaagatccagatccagaggatcacagatgaaagaaaccggcaggtgaccttcaccaagaggaagtttggcctgatgaagaaggcctatgagctgtctgtgctgtgtgactgtgaaattgccctgatcatcttcaaccacagcaacaagctgttccagtatgccagcacagacatggacaaggtgctgctgaagtacacagagtacaatgagccccatgagagcaggaccaatgctgacatcatcgaggccctgcacaagaagcaccgggagtgtgagagccctgaggtggatgaggtgtttgccctgaccccccagacagaggagaagtacaagaagattgatgaggagtttgacaagatgatgcagagctaccgcctggccagcacagtgcctgcccccaactttgccatgcctgtgacagtgcctgtgagcaaccagagcagcctgcagttcagcaaccccagcggcagcctggtgacccccagcctggtgaccagcagcctgacagacccccggctgctgagcccccagcagcctgccctgcagagaaattctgtgtccccaggcctgccccagaggcctgccagcgctggggccatgctgggcggggacctgaacagcgccaatggagcctgccccagccctgtgggcaatggctacgtgtctgcccgggccagccctggcctgctgcctgtggccaacggcaacagcctgaacaaggtgatcccagccaagagccccccaccacccacccacagcacccagctgggcgcccccagcaggaagccagacctgcgggtcatcaccagccaggccggcaagggcctgatgcaccacctgacagaggaccacctggacctgaacaatgcccagaggctgggcgtgtcccagagcacccacagcctgaccacccctgtggtgtctgtggccacccccagcctgctgagccagggcctgcccttcagctccatgcccacagcctacaacacagactaccagctgaccagcgctgagctgagcagcctgcctgccttcagcagccctgggggcctgagcctgggcaatgtgacagcctggcagcagccccagcagccccagcagccccagcagccccagcccccccagcagcagcccccccagccccagcagccccagccccagcagccccagcagccccagcagcccccccagcagcagagccacctggtgcctgtgtccctgagcaacctgatccctggcagccccctgccccacgtgggcgccgccctgactgtgaccacccacccccacatcagcatcaagtctgagcctgtgagccccagccgggagaggagccctgcccctcctcctcctgctgtgtttcctgctgcccggcctgagcctggagatggcctgagcagccctgctgggggcagctatgaaacaggagacagagatgatggccgcggggactttggccccaccctgggcctgctgcggcctgcccctgagcctgaggccgagggcagcgctgtgaagaggatgaggctggacacctggaccctgaagtag

SEQ ID NO: 160725 - DNA, 1566 bp, synthetic construct
  misc_feature 1..1566: note = Description of Artificial Sequence: Synthetic coding sequence
  source 1..1566: mol_type = other DNA
atgggcaggaagaagatccagatccagaggatcacagatgaaagaaaccggcaggtgaccttcaccaagaggaagtttggcctgatgaagaaggcctatgagctgtctgtgctgtgtgactgtgaaattgccctgatcatcttcaaccacagcaacaagctgttccagtatgccagcacagacatggacaaggtgctgctgaagtacacagagtacaatgagccccatgagagcaggaccaatgctgacatcatcgagaccctgaggaagaagggcttcaacggctgtgacagccctgagccagatggagaggacagcctggagcagagccccctgctggaggacaagtaccgccgggccagcgaggagctggatggcctcttcagaagatatggcagcacagtgcctgcccccaactttgccatgcctgtgacagtgcctgtgagcaaccagagcagcctgcagttcagcaaccccagcggcagcctggtgacccccagcctggtgaccagcagcctgacagacccccggctgctgagcccccagcagcctgccctgcagaggaacagcgtgtccccaggcctgccccagaggcctgccagcgctggggccatgctgggcggggacctgaacagcgccaacggggcctgccccagccctgtgggcaatggctacgtgtctgcccgggccagccctggcctgctgcctgtggccaatggaaacagcctgaacaaggtgatcccagccaagagccccccaccacccacccacagcacccagctgggcgcccccagcaggaagccagacctgcgggtcatcaccagccaggccggcaagggcctgatgcaccacctgacagaggaccacctggacctgaacaatgcccagaggctgggcgtgtcccagagcacccacagcctgaccacccctgtggtgtctgtggccacccccagcctgctgagccagggcctgcccttcagctccatgcccacagcctacaacacagactaccagctgaccagcgctgagctgagcagcctgcctgccttcagcagccctgggggcctgagcctgggcaatgtgacagcctggcagcagccccagcagccccagcagccccagcagccccagcccccccagcagcagcccccccagccccagcagccccagccccagcagccccagcagccccagcagcccccccagcagcagagccacctggtgcctgtgtccctgagcaacctgatccctggcagccccctgccccacgtgggcgccgccctgactgtgaccacccacccccacatcagcatcaagtctgagcctgtgagccccagccgggagaggagccctgcccctcctcctcctgctgtgtttcctgctgcccggcctgagcctggagatggcctgagcagccctgctgggggcagctatgagaccggggacagagatgatggccgcggggactttggccccaccctgggcctgctgcggcctgcccctgagcctgaggccgagggcagcgctgtgaagaggatgaggctggacacctggaccctgaagtag

SEQ ID NO: 160726 - DNA, 1428 bp, synthetic construct
  misc_feature 1..1428: note = Description of Artificial Sequence: Synthetic coding sequence
  source 1..1428: mol_type = other DNA
atgggcaggaagaagatccagatccagaggatcacagatgaaagaaaccggcaggtgaccttcaccaagaggaagtttggcctgatgaagaaggcctatgagctgtctgtgctgtgtgactgtgaaattgccctgatcatcttcaaccacagcaacaagctgttccagtatgccagcacagacatggacaaggtgctgctgaagtacacagagtacaatgagccccatgagagcaggaccaatgctgacatcatcgagagcacagtgcctgcccccaactttgccatgcctgtgacagtgcctgtgagcaaccagagcagcctgcagttcagcaaccccagcggcagcctggtgacccccagcctggtgaccagcagcctgacagacccccggctgctgagcccccagcagcctgccctgcagaggaacagcgtgtccccaggcctgccccagaggcctgccagcgctggggccatgctgggcggggacctgaacagcgccaacggggcctgccccagccctgtgggcaatggctacgtgtctgcccgggccagccctggcctgctgcctgtggccaatggaaacagcctgaacaaggtgatcccagccaagagccccccaccacccacccacagcacccagctgggcgcccccagcaggaagccagacctgcgggtcatcaccagccaggccggcaagggcctgatgcaccacctgacagaggaccacctggacctgaacaatgcccagaggctgggcgtgtcccagagcacccacagcctgaccacccctgtggtgtctgtggccacccccagcctgctgagccagggcctgcccttcagctccatgcccacagcctacaacacagactaccagctgaccagcgctgagctgagcagcctgcctgccttcagcagccctgggggcctgagcctgggcaatgtgacagcctggcagcagccccagcagccccagcagccccagcagccccagcccccccagcagcagcccccccagccccagcagccccagccccagcagccccagcagccccagcagcccccccagcagcagagccacctggtgcctgtgtccctgagcaacctgatccctggcagccccctgccccacgtgggcgccgccctgactgtgaccacccacccccacatcagcatcaagtctgagcctgtgagccccagccgggagaggagccctgcccctcctcctcctgctgtgtttcctgctgcccggcctgagcctggagatggcctgagcagccctgctgggggcagctatgagaccggggacagagatgatggccgcggggactttggccccaccctgggcctgctgcggcctgcccctgagcctgaggccgagggcagcgctgtgaagaggatgaggctggacacctggaccctgaagtag

SEQ ID NO: 160727 - DNA, 1545 bp, synthetic construct
  misc_feature 1..1545: note = Description of Artificial Sequence: Synthetic coding sequence
  source 1..1545: mol_type = other DNA
atgggcaggaagaagatccagatccagaggatcacagatgaaagaaaccggcaggtgaccttcaccaagaggaagtttggcctgatgaagaaggcctatgagctgtctgtgctgtgtgactgtgaaattgccctgatcatcttcaaccacagcaacaagctgttccagtatgccagcacagacatggacaaggtgctgctgaagtacacagagtacaatgagccccatgagagcaggaccaatgctgacatcatcgagaccctgaggaagaagggcttcaacggctgtgacagccctgagccagatggagaggacagcctggagcagagccccctgctggaggacaagtaccgccgggccagcgaggagctggatggcctcttcagaagatatggcagcacagtgcctgcccccaactttgccatgcctgtgacagtgcctgtgagcaaccagagcagcctgcagttcagcaaccccagcggcagcctggtgacccccagcctggtgaccagcagcctgacagacccccggctgctgagcccccagcagcctgccctgcagaggaacagcgtgtccccaggcctgccccagaggcctgccagcgctggggccatgctgggcggggacctgaacagcgccaacggggcctgccccagccctgtgggcaatggctacgtgtctgcccgggccagccctggcctgctgcctgtggccaatggaaacagcctgaacaaggtgatcccagccaagagccccccaccacccacccacagcacccagctgggcgcccccagcaggaagccagacctgcgggtcatcaccagccaggccggcaagggcctgatgcaccacctgaacaatgcccagaggctgggcgtgtcccagagcacccacagcctgaccacccctgtggtgtctgtggccacccccagcctgctgagccagggcctgcccttcagctccatgcccacagcctacaacacagactaccagctgaccagcgctgagctgagcagcctgcctgccttcagcagccctgggggcctgagcctgggcaatgtgacagcctggcagcagccccagcagccccagcagccccagcagccccagcccccccagcagcagcccccccagccccagcagccccagccccagcagccccagcagccccagcagcccccccagcagcagagccacctggtgcctgtgtccctgagcaacctgatccctggcagccccctgccccacgtgggcgccgccctgactgtgaccacccacccccacatcagcatcaagtctgagcctgtgagccccagccgggagaggagccctgcccctcctcctcctgctgtgtttcctgctgcccggcctgagcctggagatggcctgagcagccctgctgggggcagctatgaaacaggagacagagatgatggccgcggggactttggccccaccctgggcctgctgcggcctgcccctgagcctgaggccgagggcagcgctgtgaagaggatgaggctggacacctggaccctgaagtag

SEQ ID NO: 160728 - DNA, 1545 bp, synthetic construct; identical to SEQ ID NO: 160727
  misc_feature 1..1545: note = Description of Artificial Sequence: Synthetic coding sequence
  source 1..1545: mol_type = other DNA

SEQ ID NO: 160729 - DNA, 1533 bp, synthetic construct
  misc_feature 1..1533: note = Description of Artificial Sequence: Synthetic coding sequence
  source 1..1533: mol_type = other DNA
atgggcaggaagaagatccagatccagaggatcacagatgaaagaaaccggcaggtgaccttcaccaagaggaagtttggcctgatgaagaaggcctatgagctgtctgtgctgtgtgactgtgaaattgccctgatcatcttcaaccacagcaacaagctgttccagtatgccagcacagacatggacaaggtgctgctgaagtacacagagtacaatgagccccatgagagcaggaccaatgctgacatcatcgaggccctgcacaagaagcaccgggagtgtgagagccctgaggtggatgaggtgtttgccctgaccccccagacagaggagaagtacaagaagattgatgaggagtttgacaagatgatgcagagctaccgcctggccagcacagtgcctgcccccaactttgccatgcctgtgacagtgcctgtgagcaaccagagcagcctgcagttcagcaaccccagcggcagcctggtgacccccagcctggtgaccagcagcctgacagacccccggctgctgagcccccagcagcctgccctgcagagaaattctgtgtccccaggcctgccccagaggcctgccagcgctggggccatgctgggcggggacctgaacagcgccaatggagcctgccccagccctgtgggcaatggctacgtgtctgcccgggccagccctggcctgctgcctgtggccaacggcaacagcctgaacaaggtgatcccagccaagagccccccaccacccacccacagcacccagctgggcgcccccagcaggaagccagacctgcgggtcatcaccagccaggccggcaagggcctgatgcaccacctgaacaatgcccagaggctgggcgtgtcccagagcacccacagcctgaccacccctgtggtgtctgtggccacccccagcctgctgagccagggcctgcccttcagctccatgcccacagcctacaacacagactaccagctgaccagcgctgagctgagcagcctgcctgccttcagcagccctgggggcctgagcctgggcaatgtgacagcctggcagcagccccagcagccccagcagccccagcagccccagcccccccagcagcagcccccccagccccagcagccccagccccagcagccccagcagccccagcagcccccccagcagcagagccacctggtgcctgtgtccctgagcaacctgatccctggcagccccctgccccacgtgggcgccgccctgactgtgaccacccacccccacatcagcatcaagtctgagcctgtgagccccagccgggagaggagccctgcccctcctcctcctgctgtgtttcctgctgcccggcctgagcctggagatggcctgagcagccctgctgggggcagctatgagaccggggacagagatgatggccgcggggactttggccccaccctgggcctgctgcggcctgcccctgagcctgaggccgagggcagcgctgtgaagaggatgaggctggacacctggtag

SEQ ID NO: 160730 - DNA, 420 bp, synthetic construct
  misc_feature 1..420: note = Description of Artificial Sequence: Synthetic coding sequence
  source 1..420: mol_type = other DNA
atgggcaggaagaagatccagatccagaggatcacagatgaaagaaaccggcaggtgaccttcaccaagaggaagtttggcctgatgaagaaggcctatgagctgtctgtgctgtgtgactgtgaaattgccctgatcatcttcaaccacagcaacaagctgttccagtatgccagcacagacatggacaaggtgctgctgaagtacacagagtacaatgagccccatgagagcaggaccaatgctgacatcatcgagaccctgaggaagaagggcttcaacggctgtgacagccctgagccagatggagaggacagcctggagcagagccccctgctggaggacaagtaccgccgggccagcgaggagctggatggcctcttcagaagatatggaggcccctgctggggcgtgacctag

SEQ ID NO: 160731 - DNA, 1410 bp, synthetic construct
  misc_feature 1..1410: note = Description of Artificial Sequence: Synthetic coding sequence
  source 1..1410: mol_type = other DNA
atggccgaggagcgggagcctgagctgtacctgaagtggaagcactgtgagaccccaggagtgaagaccctgtgcaacctgaagcactgtgagaccccaggagtgaagaccctgtgcaacctgaagaagctgctgaaccggctgcagaaggaccaccgggaggatgtgtacctgtacatcagcggccacctgaaccccaacaagctgtaccagcccccagagaccatcctgcagcactggcccaatgcccaccggcccaagggggagcgggccagcgaggtgggggagcccccagctgggaaggtggccaggatgaaggaggccctggcccacttcaccatccacacagccctggtgcccagcgaggcccaggacacccccctcttccgctacctgaacccccaggccagcctgagccacaccagcgaggaggacttcctgcctgtggaggccgtgcgggagggcaaggaggagaagaagggcggccccccaggccggggccccccaggctggaggagaagagaggagctgcggctgcctgacctgaaggtgctgtgctaccaggaggccggcagccggggcacccgggacagacaccactacgtgagcagctacctggccggggccaccagcgctgaccgctacaggatgttcctgcgcttccagaaggaggtgctggccaagcaggacctgctgaagaatgacttcaccggcagcaaggctgctgctggccacgagaggaagctgcagcaggagctgcagaagatctgcacctgcagcccccagcagttcaaccggctgcacgtgtttgggaaggtgtttgaggacatctgcaacagcagcctcatctttggagacctgctgaagaaggtgaaggatgaatatgagctgtacatggccaccctgctggagagccagcctgctgcccagtatgaggccctgctggcccagctgaaggccctgggccagaggcctgtgaagacagctgacatggacctggcccgggaggagctgaggatgctggtgacagccaccaaggccgccctggagcagaatgaccggctgcggtctgagctggagatggaggtggccctgctgcagagcgccaaggagaggtctgagagcagcgagaagcacatcattgatgaaaatcggctgaccctgacagagaaggtggagaagaagagatgtgagatcctgagcaagtgggatgagatccaggccctggagaaggagatcaagaccaccctggtgcacacaggcatcagtgacatcacagaaaatcgcatcaagagcattgaacatgaggccatccagctggagacagagaacatgatcctgaagaagaagatcaagggccccctggagatctaccagggcatctgcaagatccggggcaacagaagatag

SEQ ID NO: 160732 - DNA, 741 bp, synthetic construct
  misc_feature 1..741: note = Description of Artificial Sequence: Synthetic coding sequence
  source 1..741: mol_type = other DNA
atgtaccaggtgtctggccagaggcccagcggctgtgatgccccctacggggcccccagcgctgcccctggccctgcccagaccctgagcctgctgcccggcctggaggtggtgacaggcagcacccaccctgctgaggccgcccctgaggagggcagcctggaggaggccgccacccccatgccccagggcaatggacctggcatcccccagggcctggacagcacagacctggatgtgcccacagaggccgtgacctgccagccccagggcaaccccctgggctgcacccccctgctgcccaatgacagcggccaccccagcgagctgggcggcacccggcgggctggaaatggagccctgggcggccccaaggcccacaggaagctgcagacccaccccagcctggccagccagggcagcaagaagagcaagagcagcagcaagagcaccaccagccagatccccctgcaggcccaggaggactgctgcgtgcactgcatcctgagctgcctcttctgtgagttcctgaccctgtgcaacatcgtgctggactgtgccacctgtggcagctgcagcagcgaggacagctgcctgtgctgctgctgctgcggcagcggggagtgtgccgactgtgacctgccctgtgacctggactgtggcatcctggatgcctgctgtgagagcgctgactgcctggagatctgcatggagtgctgcggcctgtgcttcagcagctag

SEQ ID NO: 160733 - DNA, 696 bp, synthetic construct
  misc_feature 1..696: note = Description of Artificial Sequence: Synthetic coding sequence
  source 1..696: mol_type = other DNA
atgtaccaggtgtctggccagaggcccagcggctgtgatgccccctacggggcccccagcgctgcccctggccctgcccagaccctgagcctgctgcccggcctggaggtggtgacaggcagcacccaccctgctgaggccgcccctgaggagggcagcctggaggaggccgccacccccatgccccagggcaatggacctggcatcccccagggcctggacagcacagacctggatgtgcccacagaggccgtgacctgccagccccagggcaaccccctgggctgcacccccctgctgcccaatgacagcggccaccccagcgagctgggcggcacccggcgggctggaaatggagccctgggcggccccaaggcccacaggaagctgcagacccaccccagcctggccagccagggcagcaagaagagcaagagcagcagcaagagcaccaccagccagatccccctgcaggcccaggaggactgctgcgtgcactgcatcctgagctgcctcttctgtgagttcctgaccctgtgcaacatcgtgctggactgtgccacctgtggcagctgcagcagcgaggacagctgcctgtgctgctgctgctgcggcagcggggagtgtgccgactgtgacctgccctgtgacctggactgtggcatcctggatgcctgctgtgagagcgctgactag

SEQ ID NO: 160734 - DNA, 642 bp, synthetic construct
  misc_feature 1..642: note = Description of Artificial Sequence: Synthetic coding sequence
  source 1..642: mol_type = other DNA
atgtaccaggtgtctggccagaggcccagcggctgtgatgccccctacggggcccccagcgctgcccctggccctgcccagaccctgagcctgctgcccggcctggaggtggtgacaggcagcacccaccctgctgaggccgcccctgaggagggcagcctggaggaggccgccacccccatgccccagggcaatggacctggcatcccccagggcctggacagcacagacctggatgtgcccacagaggccgtgacctgccagccccagggcaaccccctgggctgcacccccctgctgcccaatgacagcggccaccccagcgagctgggcggcacccggcgggctggaaatggagccctgggcggccccaaggcccacaggaagctgcagacccaccccagcctggccagccagggcagcaagaagagcaagagcagcagcaagagcaccaccagccagatccccctgcaggcccaggaggactgctgcgtgcactgcatcctgagctgcctcttctgtgagttcctgaccctgtgcaacatcgtgctggactgtgccacctgtggcagctgcagcagcgaggacagctgcctgtgctgctgctgctgcggcagcggggagtgtgccgactgtgactag

SEQ ID NO: 160735 - DNA, 297 bp, synthetic construct
  misc_feature 1..297: note = Description of Artificial Sequence: Synthetic coding sequence
  source 1..297: mol_type = other DNA
atgtaccaggtgtctggccagaggcccagcggctgtgatgccccctacggggcccccagcgctgcccctggccctgcccagaccctgagcctgctgcccggcctggaggtggtgacaggcagcacccaccctgctgaggccgcccctgaggagggcagcctggaggaggccgccacccccatgccccagggcaatggacctggcatcccccagggcctggacagcacagacctggatgtgcccacagaggccgtgacctgccagccccagggcaaccccctgggctgcaccccctag

SEQ ID NO: 160736 - DNA, 387 bp, synthetic construct
  misc_feature 1..387: note = Description of Artificial Sequence: Synthetic coding sequence
  source 1..387: mol_type = other DNA
atgtaccaggtgtctggccagaggcccagcggctgtgatgccccctacggggcccccagcgctgcccctggccctgcccagaccctgagcctgctgcccggcctggaggtggtgacaggcagcacccaccctgctgaggccgcccctgaggagggcagcctggaggaggccgccacccccatgccccagggcaatggacctggcatcccccagggcctggacagcacagacctggatgtgcccacagaggccgtgacctgccagccccagggcaaccccctgggctgcacccccctgctgcccaatgacagcggccaccccagcgagctgggcggcacccggcgggctggaaatggagccctgggcggccccaaggcccacaggtag

SEQ ID NO: 160737 - DNA, 741 bp, synthetic construct; identical to SEQ ID NO: 160732
  misc_feature 1..741: note = Description of Artificial Sequence: Synthetic coding sequence
  source 1..741: mol_type = other DNA

SEQ ID NO: 160738 - DNA, 729 bp, synthetic construct
  misc_feature 1..729: note = Description of Artificial Sequence: Synthetic coding sequence
  source 1..729: mol_type = other DNA
atgatgatggacctgtttgagaccggcagctacttcttctacctggatggagaaaatgtgaccctgcagcccctggaggtggccgagggcagccccctgtacccaggcagtgatggcaccctgagcccctgccaggaccagatgcctcctgaggccggcagtgacagcagtggagaggagcacgtgctggcccctcctggcctgcagcccccccactgccccggccagtgcctgatctgggcctgcaagacctgcaagaggaagagcgcccccacagacaggaggaaggccgccaccctgcgggagcggcggcggctgaagaagatcaatgaggcctttgaggccctgaagagaagaacagtggccaaccccaaccagaggctgcccaaggtggagatcctgcggagcgccatctcctacatcgagcggctgcaggacctgctgcaccggctggaccagcaggagaagatgcaggagctgggcgtggaccccttctcctaccggcccaagcaggagaacctggagggcgctgacttcctgcggacctgcagcagccagtggcccagcgtgtctgaccacagccggggcctggtgatcacagccaaggagggcggggccagcattgacagcagcgccagcagcagcctgcgctgcctgagcagcatcgtggacagcatcagcagcgaggagaggaagctgccctgtgtggaggaggtggtggagaagtag

SEQ ID NO: 160739 - DNA, 1527 bp, synthetic construct
  misc_feature 1..1527: note = Description of Artificial Sequence: Synthetic coding sequence
  source 1..1527: mol_type = other DNA
atgacccagaccctgaagtatgccagcagggtcttccaccgggtgcgctgggcccctgagctgggcgccagcctgggctaccgggagtaccacagcgcccggcgcagcctggccgacatccctggccccagcacccccagcttcctggccgagctgttctgcaagggcggcctgagccggctgcacgagctgcaggtgcagggcgccgcccacttcggccctgtgtggctggccagctttggcaccgtgaggacagtgtatgtggccgccccagccctggtggaggagctgctgcggcaggagggccccaggcctgagcgctgcagcttcagcccctggacagagcaccggcgctgccggcagagggcctgtggcctgctgacagctgagggggaggagtggcagaggctgcggagcctgctggcccccctgctgctgcggccccaggccgccgcccgctatgccggcaccctgaacaacgtggtgtgtgacctggtgcggcggctgcggcggcagaggggccggggcactggacctccagccctggtgagagatgtggccggggagttctacaagtttggcctggagggcattgctgctgtgctgctgggcagccggctgggctgcctggaggcccaggtgcccccagacacagagaccttcatccgggctgtgggctctgtgtttgtgtccaccctgctgaccatggccatgccccactggctgcggcacctggtgcccggcccctggggccgcctgtgccgggactgggaccagatgtttgcctttgcccagagacatgtggagcggcgggaggccgaggccgccatgagaaatggaggccagcctgagaaggacctggagagcggggcccacctgacccacttcctgttccgggaggagctgcctgcccagagcatcctgggcaatgtgacagagctgctgctggccggcgtggacacagtgagcaacaccctgtcctgggccctgtatgagctgagccgccaccctgaggtgcagacagccctgcacagcgagatcacagctgccctgagccctggcagcagcgcctaccccagcgccaccgtgctgagccagctgcccctgctgaaggctgtggtgaaggaggtgctgcggctgtaccctgtggtgcccggcaacagccgggtgcctgacaaggacatccacgtgggggactacatcatccccaagaacaccctggtgaccctgtgccactacgccaccagccgggaccctgcccagtttcctgagcccaacagcttccggcctgcccgctggctgggggagggccccaccccccacccctttgccagcctgcccttcggctttgggaagaggagctgcatgggccggcggctggccgagctggagctgcagatggccctggcccagatcctgacccactttgaggtgcagcctgagcccggggccgcccctgtgcggcccaagaccaggacagtgctggtgcctgagaggagcatcaacctgcagttcctggacagatag

SEQ ID NO: 160740 - DNA, 675 bp, synthetic construct
  misc_feature 1..675: note = Description of Artificial Sequence: Synthetic coding sequence
  source 1..675: mol_type = other DNA
atggagctgtatgagaccagcccctacttctaccaggagccccgcttctatgatggagagaactacctgcctgtgcacctgcagggctttgagcccccaggctatgaaagaacagagctgaccctgagccctgaggcccctggccccctggaggacaagggcctgggcaccccagagcactgccccggccagtgcctgccctgggcctgcaaggtgtgcaagaggaagtctgtgtctgtggacagaagaagagctgccaccctgcgggagaagaggcggctgaagaaggtgaatgaggcctttgaggccctgaagaggagcaccctgctgaaccccaaccagaggctgcccaaggtggagatcctgcggagcgccatccagtacatcgagcggctgcaggccctgctgagcagcctgaaccaggaggagcgggacctgcgctaccggggcggcggcggcccccagcccggggtgcccagtgaatgtagcagccacagcgccagctgcagccctgagtggggcagcgccctggagttcagcgccaaccctggggaccacctgctgacagctgaccccacagatgcccacaacctgcacagcctgaccagcatcgtggacagcatcaccgtggaggatgtgtctgtggccttcccagatgagaccatgcccaactag

SEQ ID NO: 160741 - DNA, 465 bp, synthetic construct
  misc_feature 1..465: note = Description of Artificial Sequence: Synthetic coding sequence
  source 1..465: mol_type = other DNA
atgggcctgagtgatggagagtggcagctggtgctgaatgtgtggggcaaggtggaggccgacatccctggccacggccaggaggtgctgatccgcctcttcaagggccaccctgagaccctggagaagtttgacaagttcaagcacctgaagtcagaagatgagatgaaggccagcgaggacctgaagaagcatggagccaccgtgctgacagccctgggcggcatcctgaagaagaagggccaccatgaagctgagatcaagcccctggcccagagccacgccaccaagcacaagatccctgtgaagtacctggagttcatcagcgagtgcatcatccaggtgctgcagagcaagcaccctggggactttggagcagatgcccagggcgccatgaacaaggccctggagctgttcaggaaggacatggccagcaactacaaggagctgggcttccagggctag

SEQ ID NO: 160742 - DNA, 465 bp, synthetic construct; identical to SEQ ID NO: 160741
  misc_feature 1..465: note = Description of Artificial Sequence: Synthetic coding sequence
  source 1..465: mol_type = other DNA

SEQ ID NO: 160743 - DNA, 465 bp, synthetic construct; identical to SEQ ID NO: 160741
  misc_feature 1..465: note = Description of Artificial Sequence: Synthetic coding sequence
  source 1..465: mol_type = other DNA

SEQ ID NO: 160744 - DNA, 465 bp, synthetic construct; identical to SEQ ID NO: 160741
  misc_feature 1..465: note = Description of Artificial Sequence: Synthetic coding sequence
  source 1..465: mol_type = other DNA

SEQ ID NO: 160745 - DNA, 234 bp, synthetic construct
  misc_feature 1..234: note = Description of Artificial Sequence: Synthetic coding sequence
  source 1..234: mol_type = other DNA
atgggcctgagtgatggagagtggcagctggtgctgaatgtgtggggcaaggtggaggccgacatccctggccacggccaggaggtgctgatccgcctcttcaagggccaccctgagaccctggagaagtttgacaagttcaagcacctgaagtcagaagatgagatgaaggccagcgaggacctgaagaagcatggagccaccgtgctgacagccctgggcggcatcctgtag

SEQ ID NO: 160746 - DNA, 432 bp, synthetic construct
  misc_feature 1..432: note = Description of Artificial Sequence: Synthetic coding sequence
  source 1..432: mol_type = other DNA
atgggcctgagtgatggagagtggcagctggtgctgaatgtgtggggcaaggtggaggccgacatccctggccacggccaggaggtgctgatccgcctcttcaagggccaccctgagaccctggagaagtttgacaagttcaagcacctgaagtcagaagatgagatgaaggccagcgaggacctgaagaagcatggagccaccgtgctgacagccctgggcggcatcctgaagaagaagggccaccatgaagctgagatcaagcccctggcccagagccacgccaccaagcacaagatccctgtgaagtacctggagttcatcagcgagtgcatcatccaggtgctgcagagcaagcaccctggggactttggagcagatgcccagggcgccatgaacaaggccctggagctgttcaggaaggacatgtag

SEQ ID NO: 160747 - DNA, 321 bp, synthetic construct
  misc_feature 1..321: note = Description of Artificial Sequence: Synthetic coding sequence
  source 1..321: mol_type = other DNA
atgggcctgagtgatggagagtggcagctggtgctgaatgtgtggggcaaggtggaggccgacatccctggccacggccaggaggtgctgatccgcctcttcaagggccaccctgagaccctggagaagtttgacaagttcaagcacctgaagtcagaagatgagatgaaggccagcgaggacctgaagaagcatggagccaccgtgctgacagccctgggcggcatcctgaagaagaagggccaccatgaagctgagatcaagcccctggcccagagccacgccaccaagcacaagatccctgtgaagtacctggagtag

SEQ ID NO: 160748 - DNA, 321 bp, synthetic construct; identical to SEQ ID NO: 160747
  misc_feature 1..321: note = Description of Artificial Sequence: Synthetic coding sequence
  source 1..321: mol_type = other DNA

SEQ ID NO: 160749 - DNA, 411 bp, synthetic construct
  misc_feature 1..411: note = Description of Artificial Sequence: Synthetic coding sequence
  source 1..411: mol_type = other DNA
atggctgtgggcgctgagcggctgggggaggtgctgatccgcctcttcaagggccaccctgagaccctggagaagtttgacaagttcaagcacctgaagtcagaagatgagatgaaggccagcgaggacctgaagaagcatggagccaccgtgctgacagccctgggcggcatcctgaagaagaagggccaccatgaagctgagatcaagcccctggcccagagccacgccaccaagcacaagatccctgtgaagtacctggagttcatcagcgagtgcatcatccaggtgctgcagagcaagcaccctggggactttggagcagatgcccagggcgccatgaacaaggccctggagctgttcaggaaggacatggccagcaactacaaggagctgggcttccagggctag

SEQ ID NO: 160750 - DNA, 4398 bp, synthetic construct
  misc_feature 1..4398: note = Description of Artificial Sequence: Synthetic coding sequence
  source 1..4398: mol_type = other DNA
atgagcctggtgacagtgcccttctaccagaagaggcaccgccactttgaccagagctacagaaacatccagacccgctacctgctggatgaatatgccagcaagaagagggccagcacccaggccagcagccagaagagcctgagccagaggagcagcagccagagggccagcagccagaccagcctgggcggcaccatctgccgggtgtgtgccaagagggtgtccacccaggaggatgaggagcaggagaacagaagccgctaccagagcctggtggccgcctacggggaggccaagaggcagcgcttcctgtctgagctggcccacctggaggaggatgtgcacctggcccggagccaggcccgggacaagctggacaagtatgccatccagcagatgatggaggacaagctggcctgggagcggcacacctttgaggagcgcatcagccgggcccctgagatcctggtgcggctgcggagccacacagtgtgggagaggatgtctgtgaagctgtgcttcaccgtgcagggcttccccacccctgtggtgcagtggtacaaggatggcagcctcatctgccaggccgctgagcccgggaagtacagaattgagagcaactatggagtgcacaccctggagatcaacagagctgactttgatgacacagccacctacagcgctgtggccaccaatgcccacggccaggtgtccaccaatgctgctgtggtggtgcggcgcttcagaggagatgaggagcccttccgctctgtgggcctgcccatcggcctgcccctgagctccatgatcccctacacccactttgatgtgcagttcctggagaagtttggagtgaccttcagaagagaaggagagaccgtgaccctgaagtgcaccatgctggtgaccccagacctgaagagggtgcagcccagggctgagtggtacagagatgatgtgctgctgaaggagagcaagtggaccaagatgttctttggagagggccaggccagcctgtccttcagccacctgcacaaggatgatgagggcctgtacaccctgagaattgtgtccagaggaggagtgtctgaccacagcgccttcctgtttgtgagagatgctgaccccctggtgactggagcccctggggcccccatggacctgcagtgccatgatgccaacagagattatgtgattgtgacctggaagccacccaacaccaccacagagagccctgtgatgggctactttgtggacagatgtgaggtgggcaccaacaactgggtgcagtgcaatgatgcccctgtgaagatctgcaagtaccctgtgacaggcctgtttgagggccgcagctacatcttccgggtgcgggctgtgaacagcgctggcatcagccggcccagccgggtgtctgatgctgtggccgccctggaccccctggacctgcggcggctgcaggccgtgcacctggagggggagaaggagatcgccatctaccaggatgacctggagggagatgcccaggtgcccggccccccaactggagtgcacgccagcgagatcagcaggaactacgtggtgctgtcctgggagccccccaccccccggggcaaggaccccctgatgtacttcatcgagaagtctgtggtgggcagcggctcctggcagagggtgaatgcccagacagctgtgcgcagccccaggtatgctgtgtttgacctgatggagggcaagagctatgtgttccgggtgctgagcgccaacagacatggcctgtctgagcccagcgagatcaccagccccatccaggcccaggatgtgacagtggtgcccagcgcccctggccgggtgctggccagcaggaacaccaagacctctgtggtggtgcagtgggaccggcccaagcatgaggaggacctgctgggctactacgtggactgctgcgtggccggcaccaacctgtgggagccctgcaaccacaagcccatcggctacaacagatttgtggtgcacggcctgaccaccggggagcagtacatcttccgggtgaaggctgtgaatgctgtgggcatgtctgagaacagccaggagagtgatgtgatcaaggtgcaggccgccctgactgtgcccagccacccctacggcatcaccctgctgaactgtgatggccacagcatgaccctgggctggaaggtgcccaagttcagcggcggcagccccatcctgggctactacctggacaagcgggaggtgcaccacaagaactggcatgaggtgaacagcagccccagcaagcccaccatcctgactgtggatggcctgacagagggcagcctgtatgagttcaagattgctgctgtgaacctggccggcattggagagcccagcgaccccagcgagcacttcaagtgtgaggcctggaccatgcctgagcccggccctgcctatgacctgaccttctgtgaggtgcgggacaccagcctggtgatgctgtggaaggcccctgtgtacagcggcagcagccctgtgtctggctactttgtggacttccgggaggaggatgctggggagtggatcaccgtgaaccagaccaccacagccaaccgctacctgaaggtgtctgacctgcagcagggcaagacctacgtgttccgggtgcgggctgtgaatgccaatggagtgggcaagcccagcgacaccagcgagcctgtgctggtggaggcccggcccggcaccaaggagatctctgctggggtggatgagcagggcaacatctacctgggctttgactgccaggagatgacagatgccagccagttcacctggtgcaagagctatgaggagatcagtgatgatgagcgcttcaagattgagaccgtgggggaccacagcaagctgtacctgaagaacccagacaaggaggacctgggcacctacagcgtgtctgtgtctgacacagatggagtgagcagcagctttgtgctggaccctgaggagctggagcggctgatggccctgagcaatgagatcaagaaccccaccatccccctgaagtctgagctggcctatgagatctttgataaaggccgggtgcgcttctggctgcaggccgagcacctgagcccagatgccagctaccgcttcatcatcaatgaccgggaggtgtctgattctgagatccaccgcatcaagtgtgacaaggccaccggcatcatcgagatggtgatggaccgcttcagcattgaaaatgaaggcacctacacagtgcagatccatgatggcaaggccaagagccagagcagcctggtgctgattggagatgccttcaagacagtgctggaggaggccgagttccagaggaaggagttcctgaggaagcagggcccccactttgctgagtacctgcactgggatgtgacagaagaatgtgaggtgcggctggtgtgcaaggtggccaacaccaagaaggagaccgtcttcaagtggctgaaggatgatgtgctgtatgaaacagagaccctgcccaacctggagcggggcatctgtgagctgctgatccccaagctgagcaagaaggaccatggagagtacaaggccaccctgaaggatgaccggggccaggatgtgtccatcctggagattgctgggaaggtgtatgatgacatgatcctggccatgagccgggtgtgtgggaagagcgccagccccctgaaggtgctgtgcaccccagagggcatccggctgcagtgcttcatgaagtacttcacagatgagatgaaggtgaactggtgccacaaggatgccaagatcagcagcagcgagcacatgagaattggaggcagcgaggagatggcctggctgcagatctgtgagcccacagagaaggacaagggcaagtacacctttgagatctttgatggcaaggacaaccaccagaggagcctggacctgagcggccaggcctttgatgaggcctttgctgagttccagcagttcaaggccgccgcctttgctgagaagaacagaggccgcctgattggaggcctgcctgatgtggtgaccatcatggagggcaagaccctgaacctgacctgcaccgtgtttggaaatccagaccctgaggtgatctggttcaagaatgaccaggacatccagctgtctgagcacttctctgtgaaggtggagcaggccaagtatgtgtccatgaccatcaagggcgtgaccagtgaagattctgggaagtacagcatcaacatcaagaacaagtatggaggagagaagattgatgtgacagtgtctgtgtacaagcacggggagaagatcccagacatggccccaccccagcaggccaagcccaagctgatcccagccagcgccagcgctgctggccagtag

SEQ ID NO: 160751 - DNA, 3420 bp, synthetic construct
  misc_feature 1..3420: note = Description of Artificial Sequence: Synthetic coding sequence
  source 1..3420: mol_type = other DNA
atgcctgagcccaccaagaaggaggatgaggaggaggtgtccccaccttctgccctgcccccagactggaccctggtggagaccccacctggagaggagcaggccaagcagaatgccaacagccagctgagcatcctcttcatcgagaagccccagggcggcaccgtgaaggtgggggaggacatcaccttcatcgccaaggtgaaggccgaggacctgctgaggaagcccaccatcaagtggttcaagggcaagtggatggacctggccagcaaggccggcaagcacctgcagctgaaggagacctttgagcggcacagccgggtgtacacctttgagatgcagatcatcaaggccaaggacaactttgctggcaactaccgctgtgaggtgacctacaaggacaagtttgacagctgcagctttgacctggaggtgcatgagagcacaggcaccacccccaacatcgacatccgcagcgccttcaagaggtctggagagggccaggaggatgctggggagctggacttcagcggcctgctgaagagaagagaggtgaagcagcaggaggaggagccccaggtggatgtgtgggagctgctgaagaatgccaagcccagtgaatatgagaagatcgccttccagtatggcatcacagacctgcggggcatgctgaagaggctgaagaggatgaggcgggaggagaagaagtctgctgcctttgccaagatcctggaccctgcctaccaggtggacaagggcggccgggtgcgctttgtggtggagctggccgaccccaagctggaggtgaagtggtacaagaatggccaggagatccggcccagcaccaagtacatctttgagcacaagggctgccagaggatcctcttcatcaacaactgccagatgacagatgattctgagtactacgtgacagctggagatgagaagtgcagcacagagctgtttgtgcgggagccccccatcatggtgaccaagcagctggaggacaccacagcctactgtggggagcgggtggagctggagtgtgaggtgtctgaagatgatgccaacgtgaagtggttcaagaatggagaggagatcatccctggccccaagagccgctaccgcatccgggtggagggcaagaagcacatcctgatcattgaaggagccaccaaggcagatgctgctgagtacagcgtgatgaccactggaggccagagcagcgccaagctgtctgtggacctgaagcccctgaagatcctgacccccctgacagaccagacagtgaacctgggcaaggagatctgcctgaagtgtgagatcagcgagaacatccctgggaagtggaccaagaatggcctgcctgtgcaggagagtgaccggctgaaggtggtgcacaagggccgcatccacaagctggtgattgccaatgccctgacagaagatgaaggagactatgtgtttgccccagatgcctacaacgtgaccctgcctgccaaggtgcacgtgattgacccccccaagatcatcctggatggcctggatgctgacaacacagtgacagtgattgctggcaacaagctgcggctggagatccccatctctggagagcccccacccaaggccatgtggagcagaggagacaaggccatcatggagggcagcggccgcatcagaacagagagctacccagacagcagcaccctggtgattgatattgctgagagagatgattctggagtgtaccacatcaacctgaagaatgaggccggggaggcccacgccagcatcaaggtgaaggtggtggacttcccagacccccctgtggcccccaccgtgacagaggtgggagatgactggtgcatcatgaactgggagcccccagcctatgatggcggcagccccatcctgggctacttcattgaaaggaagaagaagcagagcagccgctggatgaggctgaactttgacctgtgcaaggagaccacctttgagcccaagaagatgattgagggcgtggcctatgaggtgcgcatctttgctgtgaatgccatcggcatcagcaagcccagcatgcccagccggccctttgtgcccctggccgtgaccagcccccccaccctgctgactgtggacagcgtgacagacaccaccgtgaccatgcgctggaggcccccagaccacatcggggccgccggcctggatggctacgtgctggagtactgctttgagggcacagaggactggatcgtggccaacaaggacctgattgacaagaccaagttcaccatcaccggcctgcccacagatgccaagatctttgtgcgggtgaaggctgtgaatgctgctggggccagcgagcccaagtactacagccagcccatcctggtgaaggagatcatcgagccccccaagatccgcatccccaggcacctgaagcagacctacatccggcgggtgggggaggccgtgaacctggtgatccccttccagggcaagcccaggcctgagctgacctggaagaaggatggagctgagattgacaagaaccagatcaacatcagaaattctgaaacagacaccatcatcttcatcaggaaggccgagaggagccacagcggcaagtatgacctgcaggtgaaggtggacaagtttgtggagacagccagcattgacatccagatcatcgacaggcctggccccccccagatcgtgaagattgaagatgtgtggggagaaaatgtggccctgacctggaccccacccaaggatgatggaaatgctgccatcaccggctacaccatccagaaggctgacaagaagtccatggagtggttcaccgtgattgagcactaccacaggaccagcgccaccatcacagagctggtgattggaaatgagtactacttccgggtcttcagcgagaacatgtgtggcctgtctgaagatgccaccatgaccaaggagagcgctgtgattgccagagatggcaagatctacaagaaccctgtgtatgaggactttgacttcagcgaggcccccatgttcacccagcccctggtgaacacctacgccatcgccggctacaatgccaccctgaactgcagcgtgcggggcaaccccaagcccaagatcacctggatgaagaacaaggtggccatcgtggatgacccccgctacaggatgttcagcaaccagggcgtgtgcaccctggagatcaggaagcccagcccctatgatggcggcacctactgctgcaaggctgtgaatgacctgggcaccgtggagattgagtgcaagctggaggtgaagggcggcctgtccttctgccgcctgctgctgcagggcgtgccccccaacatcatcgacagctacctgcgggacctgcacagcagcaaccctgaggagtactag

SEQ ID NO: 160752 - DNA, 3522 bp, synthetic construct
  misc_feature 1..3522: note = Description of Artificial Sequence: Synthetic coding sequence
  source 1..3522: mol_type = other DNA
atgcctgagcccaccaagaaggaggagaatgaggtgcctgccccagcccctcctcctgaggagcccagcaaggagaaggaggccggcaccaccccagccaaggactggaccctggtggagaccccacctggagaggagcaggccaagcagaatgccaacagccagctgagcatcctcttcatcgagaagccccagggcggcaccgtgaaggtgggggaggacatcaccttcatcgccaaggtgaaggccgaggacctgctgaggaagcccaccatcaagtggttcaagggcaagtggatggacctggccagcaaggccggcaagcacctgcagctgaaggagacctttgagcggcacagccgggtgtacacctttgagatgcagatcatcaaggccaaggacaactttgctggcaactaccgctgtgaggtgacctacaaggacaagtttgacagctgcagctttgacctggaggtgcatgagagcacaggcaccacccccaacatcgacatccgcagcgccttcaagaggtctggagagggccaggaggatgctggggagctggacttcagcggcctgctgaagaggcgggaggtgaagcagcaggaggaggagccccaggtggatgtgtgggagctgctgaagaatgccaagcccagtgaatatgagaagatcgccttccagtatggcatcacagacctgcggggcatgctgaagaggctgaagaggatgagaagagaggagaagaagtctgctgcctttgccaagatcctggaccctgcctaccaggtggacaagggcggccgggtgcgctttgtggtggagctggccgaccccaagctggaggtgaagtggtacaagaatggccaggagatccggcccagcaccaagtacatctttgagcacaagggctgccagaggatcctcttcatcaacaactgccagatgacagatgacagcgagtactacgtgacagctggagatgagaagtgcagcacagagctgtttgtgcgggagccccccatcatggtgaccaagcagctggaggacaccacagcctactgtggggagcgggtggagctggagtgtgaggtgtctgaagatgatgccaacgtgaagtggttcaagaatggagaggagatcatccctggccccaagagccgctaccgcatccgggtggagggcaagaagcacatcctgatcatcgagggcgccaccaaggcagatgctgctgagtacagcgtgatgaccaccggcggccagagcagcgccaagctgtctgtggacctgaagcccctgaagatcctgacccccctgacagaccagacagtgaacctgggcaaggagatctgcctgaagtgtgagatcagcgagaacatccctgggaagtggaccaagaatggcctgcctgtgcaggagagtgaccggctgaaggtggtgcacaagggccgcatccacaagctggtgattgccaatgccctgacagaagatgaaggagactatgtgtttgccccagatgcctacaacgtgaccctgcctgccaaggtgcacgtgattgatcctcccaagatcatcctggatggcctggatgctgacaacacagtgacagtgattgctggcaacaagctgcggctggagatccccatcagcggggagcccccacccaaggccatgtggagcagaggagacaaggccatcatggagggcagcggccgcatcagaacagagagctacccagacagcagcaccctggtgattgatattgctgagagagatgacagcggcgtgtaccacatcaacctgaagaatgaagctggggaggcccacgccagcatcaaggtgaaggtggtggacttcccagacccccctgtggcccccaccgtgacagaggtgggagatgactggtgcatcatgaactgggagcccccagcctatgatggcggcagccccatcctgggctacttcatcgagaggaagaagaagcagagcagccgctggatgaggctgaactttgacctgtgcaaggagaccacctttgagcccaagaagatgattgaaggagtggcctatgaggtgcgcatctttgctgtgaatgccatcggcatcagcaagcccagcatgcccagccggccctttgtgcccctggccgtgaccagcccccccaccctgctgactgtggacagcgtgacagacaccaccgtgaccatgcgctggaggcccccagaccacatcggggctgctggcctggatggctacgtgctggagtactgctttgagggcagcaccagcgccaagcagagtgatgaaaatggagaggccgcctatgacctgcctgctgaggactggatcgtggccaacaaggacctgattgacaagaccaagttcaccatcaccggcctgcccacagatgccaagatctttgtgcgggtgaaggctgtgaatgctgctggggccagcgagcccaagtactacagccagcccatcctggtgaaggagatcatcgagccccccaagatccgcatccccaggcacctgaagcagacctacatcagaagagtgggggaggccgtgaacctggtgatccccttccagggcaagcccaggcctgagctgacctggaagaaggatggagctgagattgacaagaaccagatcaacatccggaacagcgagacagacaccatcatcttcatcaggaaggccgagaggagccacagcggcaagtatgacctgcaggtgaaggtggacaagtttgtggagacagccagcattgacatccagatcatcgaccggcccggccccccccagatcgtgaagattgaagatgtgtggggagaaaatgtggccctgacctggaccccacccaaggatgatggaaatgctgccatcaccggctacaccatccagaaggctgacaagaagtccatggagtggttcaccgtcatcgagcactaccacaggaccagcgccaccatcacagagctggtgattggaaatgagtactacttccgggtcttcagcgagaacatgtgtggcctgtctgaagatgccaccatgaccaaggagagcgctgtgattgccagagatggcaagatctacaagaaccctgtgtatgaagattttgacttcagcgaggcccccatgttcacccagcccctggtgaacacctacgccatcgccggctacaatgccaccctgaactgcagcgtgcggggcaaccccaagcccaagatcacctggatgaagaacaaggtggccatcgtggatgacccccgctacaggatgttcagcaaccagggcgtgtgcaccctggagatcaggaagcccagcccctatgatggcggcacctactgctgcaaggctgtgaatgacctgggcaccgtggagattgagtgcaagctggaggtgaaggtgatctaccagggcgtgaacaccccaggccagcctgtgttcctggagggccagcagcaggtgggcagccccagcgctgacagcagctgcaaggcctacctgcagacctag

SEQ ID NO: 160753 - DNA, 3384 bp, synthetic construct
  misc_feature 1..3384: note = Description of Artificial Sequence: Synthetic coding sequence
  source 1..3384: mol_type = other DNA
atgcctgagcccaccaagaaggaggagaatgaggtgcctgccccagcccctcctcctgaggagcccagcaaggagaaggaggccggcaccaccccagccaaggactggaccctggtggagaccccacctggagaggagcaggccaagcagaatgccaacagccagctgagcatcctcttcatcgagaagccccagggcggcaccgtgaaggtgggggaggacatcaccttcatcgccaaggtgaaggccgaggacctgctgaggaagcccaccatcaagtggttcaagggcaagtggatggacctggccagcaaggccggcaagcacctgcagctgaaggagacctttgagcggcacagccgggtgtacacctttgagatgcagatcatcaaggccaaggacaactttgctggcaactaccgctgtgaggtgacctacaaggacaagtttgacagctgcagctttgacctggaggtgcatgagagcacaggcaccacccccaacatcgacatccgcagcgccttcaagagaagagaggtgaagcagcaggaggaggagccccaggtggatgtgtgggagctgctgaagaatgccaagcccagtgaatatgagaagatcgccttccagtatggcatcacagacctgcggggcatgctgaagaggctgaagaggatgaggcgggaggagaagaagtctgctgcctttgccaagatcctggaccctgcctaccaggtggacaagggcggccgggtgcgctttgtggtggagctggccgaccccaagctggaggtgaagtggtacaagaatggccaggagatccggcccagcaccaagtacatctttgagcacaagggctgccagaggatcctcttcatcaacaactgccagatgacagatgattctgagtactacgtgacagctggagatgagaagtgcagcacagagctgtttgtgcgggagccccccatcatggtgaccaagcagctggaggacaccacagcctactgtggggagcgggtggagctggagtgtgaggtgtctgaagatgatgccaacgtgaagtggttcaagaatggagaggagatcatccctggccccaagagccgctaccgcatccgggtggagggcaagaagcacatcctgatcattgaaggagccaccaaggcagatgctgctgagtacagcgtgatgaccactggaggccagagcagcgccaagctgtctgtggacctgaagcccctgaagatcctgacccccctgacagaccagacagtgaacctgggcaaggagatctgcctgaagtgtgagatcagcgagaacatccctgggaagtggaccaagaatggcctgcctgtgcaggagagtgaccggctgaaggtggtgcacaagggccgcatccacaagctggtgattgccaatgccctgacagaagatgaaggagactatgtgtttgccccagatgcctacaacgtgaccctgcctgccaaggtgcacgtgattgacccccccaagatcatcctggatggcctggatgctgacaacacagtgacagtgattgctggcaacaagctgcggctggagatccccatctctggagagcccccacccaaggccatgtggagcagaggagacaaggccatcatggagggcagcggccgcatcagaacagagagctacccagacagcagcaccctggtgattgatattgctgagagagatgattctggagtgtaccacatcaacctgaagaatgaggccggggaggcccacgccagcatcaaggtgaaggtggtggacttcccagacccccctgtggcccccaccgtgacagaggtgggagatgactggtgcatcatgaactgggagcccccagcctatgatggcggcagccccatcctgggctacttcattgaaaggaagaagaagcagagcagccgctggatgaggctgaactttgacctgtgcaaggagaccacctttgagcccaagaagatgattgagggcgtggcctatgaggtgcgcatctttgctgtgaatgccatcggcatcagcaagcccagcatgcccagccggccctttgtgcccctggccgtgaccagcccccccaccctgctgactgtggacagcgtgacagacaccaccgtgaccatgcgctggaggcccccagaccacatcggggccgccggcctggatggctacgtgctggagtactgctttgagggcacagaggactggatcgtggccaacaaggacctgattgacaagaccaagttcaccatcaccggcctgcccacagatgccaagatctttgtgcgggtgaaggctgtgaatgctgctggggccagcgagcccaagtactacagccagcccatcctggtgaaggagatcatcgagccccccaagatccgcatccccaggcacctgaagcagacctacatccggcgggtgggggaggccgtgaacctggtgatccccttccagggcaagcccaggcctgagctgacctggaagaaggatggagctgagattgacaagaaccagatcaacatcagaaattctgaaacagacaccatcatcttcatcaggaaggccgagaggagccacagcggcaagtatgacctgcaggtgaaggtggacaagtttgtggagacagccagcattgacatccagatcatcgacaggcctggccccccccagatcgtgaagattgaagatgtgtggggagaaaatgtggccctgacctggaccccacccaaggatgatggaaatgctgccatcaccggctacaccatccagaaggctgacaagaagtccatggagtggttcaccgtgattgagcactaccacaggaccagcgccaccatcacagagctggtgattggaaatgagtactacttccgggtcttcagcgagaacatgtgtggcctgtctgaagatgccaccatgaccaaggagagcgctgtgattgccagagatggcaagatctacaagaaccctgtgtatgaggactttgacttcagcgaggcccccatgttcacccagcccctggtgaacacctacgccatcgccggctacaatgccaccctgaactgcagcgtgcggggcaaccccaagcccaagatcacctggatgaagaacaaggtggccatcgtggatgacccccgctacaggatgttcagcaaccagggcgtgtgcaccctggagatcaggaagcccagcccctatgatggcggcacctactgctgcaaggctgtgaatgacctgggcaccgtggagattgagtgcaagctggaggtgaaggtgatctaccagggcgtgaacaccccaggccagcccgtcttcctggagggccagcagcagagcctgcacaacaaggacttctag

SEQ ID NO: 160754 - DNA, 3363 bp, synthetic construct
  misc_feature 1..3363: note = Description of Artificial Sequence: Synthetic coding sequence
  source 1..3363: mol_type = other DNA
atgcctgagcccaccaagaaggaggactggaccctggtggagaccccacctggagaggagcaggccaagcagaatgccaacagccagctgagcatcctcttcatcgagaagccccagggcggcaccgtgaaggtgggggaggacatcaccttcatcgccaaggtgaaggccgaggacctgctgaggaagcccaccatcaagtggttcaagggcaagtggatggacctggccagcaaggccggcaagcacctgcagctgaaggagacctttgagcggcacagccgggtgtacacctttgagatgcagatcatcaaggccaaggacaactttgctggcaactaccgctgtgaggtgacctacaaggacaagtttgacagctgcagctttgacctggaggtgcatgagagcacaggcaccacccccaacatcgacatccgcagcgccttcaagaggtctggagagggccaggaggatgctggggagctggacttcagcggcctgctgaagaggcgggaggtgaagcagcaggaggaggagccccaggtggatgtgtgggagctgctgaagaatgccaagcccagtgaatatgagaagatcgccttccagtatggcatcacagacctgcggggcatgctgaagaggctgaagaggatgagaagagaggagaagaagtctgctgcctttgccaagatcctggaccctgcctaccaggtggacaagggcggccgggtgcgctttgtggtggagctggccgaccccaagctggaggtgaagtggtacaagaatggccaggagatccggcccagcaccaagtacatctttgagcacaagggctgccagaggatcctcttcatcaacaactgccagatgacagatgacagcgagtactacgtgacagctggagatgagaagtgcagcacagagctgtttgtgcgggagccccccatcatggtgaccaagcagctggaggacaccacagcctactgtggggagcgggtggagctggagtgtgaggtgtctgaagatgatgccaacgtgaagtggttcaagaatggagaggagatcatccctggccccaagagccgctaccgcatccgggtggagggcaagaagcacatcctgatcatcgagggcgccaccaaggcagatgctgctgagtacagcgtgatgaccaccggcggccagagcagcgccaagctgtctgtggacctgaagcccctgaagatcctgacccccctgacagaccagacagtgaacctgggcaaggagatctgcctgaagtgtgagatcagcgagaacatccctgggaagtggaccaagaatggcctgcctgtgcaggagagtgaccggctgaaggtggtgcacaagggccgcatccacaagctggtgattgccaatgccctgacagaagatgaaggagactatgtgtttgccccagatgcctacaacgtgaccctgcctgccaaggtgcacgtgattgatcctcccaagatcatcctggatggcctggatgctgacaacacagtgacagtgattgctggcaacaagctgcggctggagatccccatcagcggggagcccccacccaaggccatgtggagcagaggagacaaggccatcatggagggcagcggccgcatcagaacagagagctacccagacagcagcaccctggtgattgatattgctgagagagatgacagcggcgtgtaccacatcaacctgaagaatgaagctggggaggcccacgccagcatcaaggtgaaggtggtggacttcccagacccccctgtggcccccaccgtgacagaggtgggagatgactggtgcatcatgaactgggagcccccagcctatgatggcggcagccccatcctgggctacttcatcgagaggaagaagaagcagagcagccgctggatgaggctgaactttgacctgtgcaaggagaccacctttgagcccaagaagatgattgaaggagtggcctatgaggtgcgcatctttgctgtgaatgccatcggcatcagcaagcccagcatgcccagccggccctttgtgcccctggccgtgaccagcccccccaccctgctgactgtggacagcgtgacagacaccaccgtgaccatgcgctggaggcccccagaccacatcggggctgctggcctggatggctacgtgctggagtactgctttgagggcacagaggactggatcgtggccaacaaggacctgattgacaagaccaagttcaccatcaccggcctgcccacagatgccaagatctttgtgcgggtgaaggctgtgaatgctgctggggccagcgagcccaagtactacagccagcccatcctggtgaaggagatcatcgagccccccaagatccgcatccccaggcacctgaagcagacctacatcagaagagtgggggaggccgtgaacctggtgatccccttccagggcaagcccaggcctgagctgacctggaagaaggatggagctgagattgacaagaaccagatcaacatccggaacagcgagacagacaccatcatcttcatcaggaaggccgagaggagccacagcggcaagtatgacctgcaggtgaaggtggacaagtttgtggagacagccagcattgacatccagatcatcgaccggcccggccccccccagatcgtgaagattgaagatgtgtggggagaaaatgtggccctgacctggaccccacccaaggatgatggaaatgctgccatcaccggctacaccatccagaaggctgacaagaagtccatggagtggttcaccgtcatcgagcactaccacaggaccagcgccaccatcacagagctggtgattggaaatgagtactacttccgggtcttcagcgagaacatgtgtggcctgtctgaagatgccaccatgaccaaggagagcgctgtgattgccagagatggcaagatctacaagaaccctgtgtatgaagattttgacttcagcgaggcccccatgttcacccagcccctggtgaacacctacgccatcgccggctacaatgccaccctgaactgcagcgtgcggggcaaccccaagcccaagatcacctggatgaagaacaaggtggccatcgtggatgacccccgctacaggatgttcagcaaccagggcgtgtgcaccctggagatcaggaagcccagcccctatgatggcggcacctactgctgcaaggctgtgaatgacctgggcaccgtggagattgagtgcaagctggaggtgaaggtgatctaccagggcgtgaacaccccaggccagcctgtgttcctggagggccagcagcagagcctgcacaacaaggacttctag

SEQ ID NO: 160755 - DNA, 3399 bp, synthetic construct
  misc_feature 1..3399: note = Description of Artificial Sequence: Synthetic coding sequence
  source 1..3399: mol_type = other DNA
atgcctgagcccaccaagaaggaggagaatgaggtgcctgccccagcccctcctcctgaggactggaccctggtggagaccccacctggagaggagcaggccaagcagaatgccaacagccagctgagcatcctcttcatcgagaagccccagggcggcaccgtgaaggtgggggaggacatcaccttcatcgccaaggtgaaggccgaggacctgctgaggaagcccaccatcaagtggttcaagggcaagtggatggacctggccagcaaggccggcaagcacctgcagctgaaggagacctttgagcggcacagccgggtgtacacctttgagatgcagatcatcaaggccaaggacaactttgctggcaactaccgctgtgaggtgacctacaaggacaagtttgacagctgcagctttgacctggaggtgcatgagagcacaggcaccacccccaacatcgacatccgcagcgccttcaagaggtctggagagggccaggaggatgctggggagctggacttcagcggcctgctgaagaggcgggaggtgaagcagcaggaggaggagccccaggtggatgtgtgggagctgctgaagaatgccaagcccagtgaatatgagaagatcgccttccagtatggcatcacagacctgcggggcatgctgaagaggctgaagaggatgagaagagaggagaagaagtctgctgcctttgccaagatcctggaccctgcctaccaggtggacaagggcggccgggtgcgctttgtggtggagctggccgaccccaagctggaggtgaagtggtacaagaatggccaggagatccggcccagcaccaagtacatctttgagcacaagggctgccagaggatcctcttcatcaacaactgccagatgacagatgacagcgagtactacgtgacagctggagatgagaagtgcagcacagagctgtttgtgcgggagccccccatcatggtgaccaagcagctggaggacaccacagcctactgtggggagcgggtggagctggagtgtgaggtgtctgaagatgatgccaacgtgaagtggttcaagaatggagaggagatcatccctggccccaagagccgctaccgcatccgggtggagggcaagaagcacatcctgatcatcgagggcgccaccaaggcagatgctgctgagtacagcgtgatgaccaccggcggccagagcagcgccaagctgtctgtggacctgaagcccctgaagatcctgacccccctgacagaccagacagtgaacctgggcaaggagatctgcctgaagtgtgagatcagcgagaacatccctgggaagtggaccaagaatggcctgcctgtgcaggagagtgaccggctgaaggtggtgcacaagggccgcatccacaagctggtgattgccaatgccctgacagaagatgaaggagactatgtgtttgccccagatgcctacaacgtgaccctgcctgccaaggtgcacgtgattgatcctcccaagatcatcctggatggcctggatgctgacaacacagtgacagtgattgctggcaacaagctgcggctggagatccccatcagcggggagcccccacccaaggccatgtggagcagaggagacaaggccatcatggagggcagcggccgcatcagaacagagagctacccagacagcagcaccctggtgattgatattgctgagagagatgacagcggcgtgtaccacatcaacctgaagaatgaagctggggaggcccacgccagcatcaaggtgaaggtggtggacttcccagacccccctgtggcccccaccgtgacagaggtgggagatgactggtgcatcatgaactgggagcccccagcctatgatggcggcagccccatcctgggctacttcatcgagaggaagaagaagcagagcagccgctggatgaggctgaactttgacctgtgcaaggagaccacctttgagcccaagaagatgattgaaggagtggcctatgaggtgcgcatctttgctgtgaatgccatcggcatcagcaagcccagcatgcccagccggccctttgtgcccctggccgtgaccagcccccccaccctgctgactgtggacagcgtgacagacaccaccgtgaccatgcgctggaggcccccagaccacatcggggctgctggcctggatggctacgtgctggagtactgctttgagggcacagaggactggatcgtggccaacaaggacctgattgacaagaccaagttcaccatcaccggcctgcccacagatgccaagatctttgtgcgggtgaaggctgtgaatgctgctggggccagcgagcccaagtactacagccagcccatcctggtgaaggagatcatcgagccccccaagatccgcatccccaggcacctgaagcagacctacatcagaagagtgggggaggccgtgaacctggtgatccccttccagggcaagcccaggcctgagctgacctggaagaaggatggagctgagattgacaagaaccagatcaacatccggaacagcgagacagacaccatcatcttcatcaggaaggccgagaggagccacagcggcaagtatgacctgcaggtgaaggtggacaagtttgtggagacagccagcattgacatccagatcatcgaccggcccggccccccccagatcgtgaagattgaagatgtgtggggagaaaatgtggccctgacctggaccccacccaaggatgatggaaatgctgccatcaccggctacaccatccagaaggctgacaagaagtccatggagtggttcaccgtcatcgagcactaccacaggaccagcgccaccatcacagagctggtgattggaaatgagtactacttccgggtcttcagcgagaacatgtgtggcctgtctgaagatgccaccatgaccaaggagagcgctgtgattgccagagatggcaagatctacaagaaccctgtgtatgaagattttgacttcagcgaggcccccatgttcacccagcccctggtgaacacctacgccatcgccggctacaatgccaccctgaactgcagcgtgcggggcaaccccaagcccaagatcacctggatgaagaacaaggtggccatcgtggatgacccccgctacaggatgttcagcaaccagggcgtgtgcaccctggagatcaggaagcccagcccctatgatggcggcacctactgctgcaaggctgtgaatgacctgggcaccgtggagattgagtgcaagctggaggtgaaggtgatctaccagggcgtgaacaccccaggccagcctgtgttcctggagggccagcagcagagcctgcacaacaaggacttctag

SEQ ID NO: 160756 - DNA, 3822 bp, synthetic construct
  misc_feature 1..3822: note = Description of Artificial Sequence: Synthetic coding sequence
  source 1..3822: mol_type = other DNA
atgcctgagcccgggaagaagcctgtgtctgccttcagcaagaagcccaggtctgtggaggtggccgccggcagccctgctgtgtttgaagctgagacagagcgggccggcgtgaaggtgcgctggcagagaggaggcagtgacatcagcgccagcaacaagtatggcctggccacagagggcaccaggcacaccctgactgtgcgggaggtgggccctgctgaccagggcagctatgctgtgattgctggcagcagcaaggtgaagtttgacctgaaggtgattgaagctgagaaggccgagcccatgctggccccagccccagccccagctgaggccaccggggcccctggagaggccccagccccagctgctgagctgggggagagcgcccccagccccaagggcagcagcagcgctgccctgaatggccccacccctggggccccagatgaccccatcggcctgtttgtgatgaggccccaggatggagaggtgacagtgggcggcagcatcaccttcagcgcccgggtggccggggccagcctgctgaagccccctgtggtgaagtggttcaagggcaagtgggtggacctgagcagcaaggtgggccagcacctgcagctgcatgacagctatgaccgggccagcaaggtgtacctgtttgagctgcacatcacagatgcccagcctgccttcaccggcagctaccgctgtgaggtgtccaccaaggacaagtttgactgcagcaacttcaacctgactgtgcatgaggccatgggcaccggggacctggacctgctgagcgccttccggaggaccagcctggccggcggcggccgccgcatcagtgacagccatgaggacaccggcatcctggacttcagcagcctgctgaagaagagcagcagcttccgcaccccccgggacagcaagctggaggccccagcagaagaagatgtgtgggagatcctgcggcaggcccctccttctgaatatgagcgcatcgccttccagtatggagtgacagacctgcggggcatgctgaagaggctgaagggcatgagaagagatgagaagaagagcacagccttccagaagaagctggagcccgcctaccaggtgtccaagggccacaagatccggctgactgtggagctggccgaccatgatgctgaggtgaagtggctgaagaatggccaggagatccagatgagcggccgctacatctttgagagcatcggggccaagaggaccctgaccatcagccagtgcagcctggctgatgatgctgcctaccagtgtgtggtgggcggggagaagtgcagcacagagctgtttgtgaaggagccccctgtgctgatcacccggcccctggaggaccagctggtgatggtgggccagagggtggagtttgaatgtgaggtgtctgaggagggcgcccaggtgaagtggctgaaggatggagtggagctgacccgggaggagaccttcaagtaccgcttcaagaaggatggccagaggcaccacctgatcatcaatgaggccatgctggaggatgctggccactacgccctgtgcaccagcggcggccaggccctggccgagctgattgtgcaggagaagaagctggaggtgtaccagagcattgctgacctgatggtgggcgccaaggaccaggccgtgttcaagtgtgaggtgtctgatgaaaatgtgcggggcgtgtggctgaagaatggcaaggagctggtgcctgacagccgcatcaaggtgagccacatcggccgggtgcacaagctgaccattgatgatgtgaccccagcagatgaagctgactacagctttgtgcctgagggctttgcctgcaacctgagcgccaagctgcacttcatggaggtgaagattgactttgtgccccggcaggagccccccaagatccacctggactgccccggccgcatcccagacaccatcgtggtggtggccggcaacaagctgcggctggatgtgcccatcagcggggaccctgcccccaccgtcatctggcagaaggccatcacccagggcaacaaggccccagcccggcctgccccagatgcccctgaggacaccggggacagtgatgagtgggtgtttgacaagaagctgctgtgtgaaacagagggccgggtgcgggtggagaccaccaaggacaggagcatcttcaccgtggagggcgctgagaaggaggatgagggcgtgtacacagtgacagtgaagaaccctgtgggggaggaccaggtgaacctgactgtgaaggtgattgatgtgcctgatgccccagctgcccccaagatcagcaatgtgggggaggacagctgcaccgtgcagtgggagcccccagcctatgatggcggccagcccatcctgggctacatcctggagaggaagaagaagaagagctaccgctggatgaggctgaactttgacctgatccaggagctgagccatgaggcccggaggatgattgagggcgtggtgtatgagatgagggtgtatgctgtgaatgccatcggcatgagccggcccagccctgccagccagcccttcatgcccatcggcccccccagcgagcccacccacctggccgtggaggatgtgtctgacaccaccgtgtccctgaagtggaggcctcctgagcgggtgggcgccggcggcctggatggctacagcgtggagtactgcccagagggctgcagcgagtgggtggccgccctgcagggcctgacagagcacaccagcatcctggtgaaggacctgcccactggagcccggctgctcttccgggtgcgggcccacaacatggccggccctggggcccctgtgaccaccacagagcctgtgacagtgcaggagatcctgcagaggccccggctgcagctgcccaggcacctgcggcagaccatccagaagaaggtgggggagcctgtgaacctgctgatccccttccagggcaagccccggccccaggtgacctggaccaaggagggccagcccctggccggggaggaggtgtccatccggaacagccccacagacaccatcctcttcatccgggccgccaggagagtgcacagcggcacctaccaggtgacagtgagaattgagaacatggaggacaaggccaccctggtgctgcaggtggtggacaagcccagccccccccaggacctgcgggtgacagatgcctggggcctgaatgtggccctggagtggaagccaccccaggatgtgggcaacacagagctgtggggctacacagtgcagaaggctgacaagaagaccatggagtggttcaccgtgctggagcactacagaaggacccactgtgtggtgcctgagctgatcattggaaatggctactacttccgggtcttcagccagaacatggtgggcttcagtgaccgggccgccaccaccaaggagcccgtcttcatcccccggcccggcatcacctatgagccccccaactacaaggccctggacttcagcgaggcccccagcttcacccagcccctggtgaacagatctgtgattgctggctacacagccatgctgtgctgtgctgtgcggggcagccccaagcccaagatctcctggttcaagaatggcctggacctgggggaggatgcccgcttcaggatgttcagcaagcagggcgtgctgaccctggagatcaggaagccctgcccctttgatggcggcatctacgtgtgccgggccaccaacctgcagggcgaggcccgctgtgagtgccgcctggaggtgcgggtgccccagtag

SEQ ID NO: 160757 - DNA, 3825 bp, synthetic construct
  misc_feature 1..3825: note = Description of Artificial Sequence: Synthetic coding sequence
  source 1..3825: mol_type = other DNA
atgcctgagcccgggaagaagcctgtgtctgccttcagcaagaagcccaggtctgtggaggtggccgccggcagccctgctgtgtttgaagctgagacagagcgggccggcgtgaaggtgcgctggcagagaggaggcagtgacatcagcgccagcaacaagtatggcctggccacagagggcaccaggcacaccctgactgtgcgggaggtgggccctgctgaccagggcagctatgctgtgattgctggcagcagcaaggtgaagtttgacctgaaggtgattgaagctgagaaggccgagcccatgctggccccagccccagccccagctgaggccaccggggcccctggagaggccccagccccagctgctgagctgggggagagcgcccccagccccaagggcagcagcagcgctgccctgaatggccccacccctggggccccagatgaccccatcggcctgtttgtgatgaggccccaggatggagaggtgacagtgggcggcagcatcaccttcagcgcccgggtggccggggccagcctgctgaagccccctgtggtgaagtggttcaagggcaagtgggtggacctgagcagcaaggtgggccagcacctgcagctgcatgacagctatgaccgggccagcaaggtgtacctgtttgagctgcacatcacagatgcccagcctgccttcaccggcagctaccgctgtgaggtgtccaccaaggacaagtttgactgcagcaacttcaacctgactgtgcatgaggccatgggcaccggggacctggacctgctgagcgccttccggaggaccagcctggccggcggcggccgccgcatcagtgacagccatgaggacaccggcatcctggacttcagcagcctgctgaagaagagcagcagcttccgcaccccccgggacagcaagctggaggccccagcagaagaagatgtgtgggagatcctgcggcaggcccctccttctgaatatgagcgcatcgccttccagtatggagtgacagacctgcggggcatgctgaagaggctgaagggcatgagaagagatgagaagaagagcacagccttccagaagaagctggagcccgcctaccaggtgtccaagggccacaagatccggctgactgtggagctggccgaccatgatgctgaggtgaagtggctgaagaatggccaggagatccagatgagcggcagcaagtacatctttgagagcattggagccaagaggaccctgaccatcagccagtgcagcctggctgatgatgctgcctaccagtgtgtggtgggcggggagaagtgcagcacagagctgtttgtgaaggagccccctgtgctgatcacccggcccctggaggaccagctggtgatggtgggccagagggtggagtttgaatgtgaggtgtctgaggagggcgcccaggtgaagtggctgaaggatggagtggagctgacccgggaggagaccttcaagtaccgcttcaagaaggatggccagaggcaccacctgatcatcaatgaggccatgctggaggatgctggccactacgccctgtgcaccagcggcggccaggccctggccgagctgattgtgcaggagaagaagctggaggtgtaccagagcattgctgacctgatggtgggcgccaaggaccaggccgtgttcaagtgtgaggtgtctgatgaaaatgtgcggggcgtgtggctgaagaatggcaaggagctggtgcctgacagccgcatcaaggtgagccacatcggccgggtgcacaagctgaccattgatgatgtgaccccagcagatgaggccgactacagctttgtgcctgagggctttgcctgcaacctgagcgccaagctgcacttcatggaggtgaagattgactttgtgccccggcaggagccccccaagatccacctggactgccccggccgcatcccagacaccatcgtggtggtggccggcaacaagctgcggctggatgtgcccatcagcggggaccctgcccccaccgtcatctggcagaaggccatcacccagggcaacaaggccccagcccggcctgccccagatgccccagaagatactggagacagtgatgagtgggtgtttgacaagaagctgctgtgtgaaacagagggccgggtgcgggtggagaccaccaaggacaggagcatcttcaccgtggagggcgctgagaaggaggatgaaggagtgtacacagtgacagtgaagaaccctgtgggggaggaccaggtgaacctgactgtgaaggtgattgatgtgcctgatgccccagctgcccccaagatcagcaatgtgggggaggacagctgcaccgtgcagtgggagcccccagcctatgatggcggccagcccatcctgggctacatcctggagaggaagaagaagaagagctaccgctggatgaggctgaactttgacctgatccaggagctgagccatgaggcccggaggatgattgaaggagtggtgtatgagatgagggtgtatgctgtgaatgccatcggcatgagccggcccagccctgccagccagcccttcatgcccatcggccccccatctgagcccacccacctggccgtggaggatgtgtctgacaccaccgtgtccctgaagtggaggcctcctgagcgggtgggcgctgggggcctggatggctacagcgtggagtactgcccagagggctgcagcgagtgggtggccgccctgcagggcctgacagagcacaccagcatcctggtgaaggacctgcccaccggggcccggctgctcttccgggtgcgggcccacaacatggccggccctggggcccctgtgaccaccacagagcctgtgacagtgcaggagatcctgcagaggccccggctgcagctgcccaggcacctgcggcagaccatccagaagaaggtgggggagcctgtgaacctgctgatccccttccagggcaagccccggccccaggtgacctggaccaaggagggccagcccctggccggggaggaggtgtccatccggaacagccccacagacaccatcctcttcatccgggccgcccggcgggtgcacagcggcacctaccaggtgacagtgagaattgagaacatggaggacaaggccaccctggtgctgcaggtggtggacaagcccagccccccccaggacctgcgggtgacagatgcctggggcctgaatgtggccctggagtggaagccaccccaggatgtgggcaacacagagctgtggggctacacagtgcagaaggctgacaagaagaccatggagtggttcaccgtgctggagcactacagaaggacccactgtgtggtgcctgagctgatcattggaaatggctactacttccgggtcttcagccagaacatggtgggcttcagtgacagagctgccaccaccaaggagcctgtgttcatccccaggcctggcatcacctatgagccccccaactacaaggccctggacttcagcgaggcccccagcttcacccagcccctggtgaacagatctgtgattgctggctacacagccatgctgtgctgtgctgtgcggggcagccccaagcccaagatctcctggttcaagaatggcctggacctgggagaagatgcccgcttcaggatgttcagcaagcagggcgtgctgaccctggagatcaggaagccctgcccctttgatggcggcatctacgtgtgccgggccaccaacctgcagggcgaggcccgctgtgaatgtcggctggaggtgcgggtgccccagtag

SEQ ID NO: 160758 - DNA, 3825 bp, synthetic construct
  misc_feature 1..3825: note = Description of Artificial Sequence: Synthetic coding sequence
  source 1..3825: mol_type = other DNA
atgcctgagcccgggaagaagcctgtgtctgccttcagcaagaagcccaggtctgtggaggtggccgccggcagccctgctgtgtttgaagctgagacagagcgggccggcgtgaaggtgcgctggcagagaggaggcagtgacatcagcgccagcaacaagtatggcctggccacagagggcaccaggcacaccctgactgtgcgggaggtgggccctgctgaccagggcagctatgctgtgattgctggcagcagcaaggtgaagtttgacctgaaggtgattgaagctgagaaggccgagcccatgctggccccagccccagccccagctgaggccaccggggcccctggagaggccccagccccagctgctgagctgggggagagcgcccccagccccaagggcagcagcagcgctgccctgaatggccccacccctggggccccagatgaccccatcggcctgtttgtgatgaggccccaggatggagaggtgacagtgggcggcagcatcaccttcagcgcccgggtggccggggccagcctgctgaagccccctgtggtgaagtggttcaagggcaagtgggtggacctgagcagcaaggtgggccagcacctgcagctgcatgacagctatgaccgggccagcaaggtgtacctgtttgagctgcacatcacagatgcccagcctgccttcaccggcagctaccgctgtgaggtgtccaccaaggacaagtttgactgcagcaacttcaacctgactgtgcatgaggccatgggcaccggggacctggacctgctgagcgccttccggaggaccagcctggccggcggcggccgccgcatcagtgacagccatgaggacaccggcatcctggacttcagcagcctgctgaagaagagggacagcttccgcaccccccgggacagcaagctggaggccccagcagaagaagatgtgtgggagatcctgcggcaggcccctccttctgaatatgagcgcatcgccttccagtatggagtgacagacctgcggggcatgctgaagaggctgaagggcatgagaagagatgagaagaagagcacagccttccagaagaagctggagcccgcctaccaggtgtccaagggccacaagatccggctgactgtggagctggccgaccatgatgctgaggtgaagtggctgaagaatggccaggagatccagatgagcggcagcaagtacatctttgagagcattggagccaagaggaccctgaccatcagccagtgcagcctggctgatgatgctgcctaccagtgtgtggtgggcggggagaagtgcagcacagagctgtttgtgaaggagccccctgtgctgatcacccggcccctggaggaccagctggtgatggtgggccagagggtggagtttgaatgtgaggtgtctgaggagggcgcccaggtgaagtggctgaaggatggagtggagctgacccgggaggagaccttcaagtaccgcttcaagaaggatggccagaggcaccacctgatcatcaatgaggccatgctggaggatgctggccactacgccctgtgcaccagcggcggccaggccctggccgagctgattgtgcaggagaagaagctggaggtgtaccagagcattgctgacctgatggtgggcgccaaggaccaggccgtgttcaagtgtgaggtgtctgatgaaaatgtgcggggcgtgtggctgaagaatggcaaggagctggtgcctgacagccgcatcaaggtgagccacatcggccgggtgcacaagctgaccattgatgatgtgaccccagcagatgaggccgactacagctttgtgcctgagggctttgcctgcaacctgagcgccaagctgcacttcatggaggtgaagattgactttgtgccccggcaggagccccccaagatccacctggactgccccggccgcatcccagacaccatcgtggtggtggccggcaacaagctgcggctggatgtgcccatcagcggggaccctgcccccaccgtcatctggcagaaggccatcacccagggcaacaaggccccagcccggcctgccccagatgccccagaagatactggagacagtgatgagtgggtgtttgacaagaagctgctgtgtgaaacagagggccgggtgcgggtggagaccaccaaggacaggagcatcttcaccgtggagggcgctgagaaggaggatgaaggagtgtacacagtgacagtgaagaaccctgtgggggaggaccaggtgaacctgactgtgaaggtgattgatgtgcctgatgccccagctgcccccaagatcagcaatgtgggggaggacagctgcaccgtgcagtgggagcccccagcctatgatggcggccagcccatcctgggctacatcctggagaggaagaagaagaagagctaccgctggatgaggctgaactttgacctgatccaggagctgagccatgaggcccggaggatgattgaaggagtggtgtatgagatgagggtgtatgctgtgaatgccatcggcatgagccggcccagccctgccagccagcccttcatgcccatcggccccccatctgagcccacccacctggccgtggaggatgtgtctgacaccaccgtgtccctgaagtggaggcctcctgagcgggtgggcgctgggggcctggatggctacagcgtggagtactgcccagagggctgcagcgagtgggtggccgccctgcagggcctgacagagcacaccagcatcctggtgaaggacctgcccaccggggcccggctgctcttccgggtgcgggcccacaacatggccggccctggggcccctgtgaccaccacagagcctgtgacagtgcaggagatcctgcagaggccccggctgcagctgcccaggcacctgcggcagaccatccagaagaaggtgggggagcctgtgaacctgctgatccccttccagggcaagccccggccccaggtgacctggaccaaggagggccagcccctggccggggaggaggtgtccatccggaacagccccacagacaccatcctcttcatccgggccgcccggcgggtgcacagcggcacctaccaggtgacagtgagaattgagaacatggaggacaaggccaccctggtgctgcaggtggtggacaagcccagccccccccaggacctgcgggtgacagatgcctggggcctgaatgtggccctggagtggaagccaccccaggatgtgggcaacacagagctgtggggctacacagtgcagaaggctgacaagaagaccatggagtggttcaccgtgctggagcactacagaaggacccactgtgtggtgcctgagctgatcattggaaatggctactacttccgggtcttcagccagaacatggtgggcttcagtgacagagctgccaccaccaaggagcctgtgttcatccccaggcctggcatcacctatgagccccccaactacaaggccctggacttcagcgaggcccccagcttcacccagcccctggtgaacagatctgtgattgctggctacacagccatgctgtgctgtgctgtgcggggcagccccaagcccaagatctcctggttcaagaatggcctggacctgggagaagatgcccgcttcaggatgttcagcaagcagggcgtgctgaccctggagatcaggaagccctgcccctttgatggcggcatctacgtgtgccgggccaccaacctgcagggcgaggcccgctgtgaatgtcggctggaggtgcgggtgccccagtag

SEQ ID NO: 160759 - DNA, 3426 bp, synthetic construct
  misc_feature 1..3426: note = Description of Artificial Sequence: Synthetic coding sequence
  source 1..3426: mol_type = other DNA
atgcctgaggccaagccagctgccaagaaggcccccaagggcaaggatgcccccaagggggcccccaaggaggccccacccaaggaggccccagctgaggcccccaaggaggcccccccagaggaccagagccccacagctgaggagcccactggagtcttcctgaagaagccagacagcgtgtctgtggagaccgggaaggatgctgtggtggtggccaaggtgaatggcaaggagctgcctgacaagcccaccatcaagtggttcaagggcaagtggctggagctgggcagcaagagcggggcccgcttctccttcaaggagagccacaacagcgccagcaatgtgtacacagtggagctgcacatcggcaaggtggtgctgggggaccggggctactaccgcctggaggtgaaggccaaggacacctgtgacagctgtggcttcaacattgatgtggaggccccccggcaggatgccagcggccagagcctggagagcttcaagaggaccagcgagaagaagagtgacacagctggggagctggacttcagcggcctgctgaagaagcgggaggtggtggaggaggagaagaagaagaagaagaaggatgatgatgacctgggcatccccccagagatctgggagctgctgaagggggccaagaagtcagaatatgagaagatcgccttccagtatggcatcacagacctgcggggcatgctgaagaggctgaagaaggccaaggtggaggtgaagaagtctgctgccttcaccaagaagctggaccctgcctaccaggtggaccggggcaacaagatcaagctgatggtggagatcagtgaccctgacctgaccctgaagtggttcaagaatggccaggagatcaagcccagcagcaaatatgtgtttgaaaatgtgggcaagaagaggatcctgaccatcaacaagtgcaccctggctgatgatgctgcctatgaggtggccgtgaaggatgagaagtgcttcacagagctgtttgtgaaggagccccctgtgctgattgtgacccccctggaggaccagcaggtgtttgtgggggacagagtggagatggctgtggaggtgtctgaggagggcgcccaggtgatgtggatgaaggatggagtggagctgacccgggaggacagcttcaaggcccgctaccgcttcaagaaggatggcaagaggcacatcctgatcttcagtgatgtggtgcaggaggaccggggccgctaccaggtgatcaccaacggcggccagtgtgaggccgagctgattgtggaggagaagcagctggaggtgctgcaggacattgctgacctgactgtgaaggccagcgagcaggccgtgttcaagtgtgaggtgtctgatgagaaggtgacaggcaagtggtacaagaatggagtggaggtgcggcccagcaagaggatcaccatcagccacgtgggccgcttccacaagctggtgattgatgatgtgcggccagaagatgaaggagactacacctttgtgcctgatggctacgccctgagcctgagcgccaagctgaacttcctggagatcaaggtggagtatgtgcccaagcaggagccccccaagatccacctggactgcagcggcaagaccagtgaaaatgccatcgtggtggtggccggcaacaagctgcggctggatgtgtccatcactggagagcccccacctgtggccacctggctgaagggagatgaggtgttcaccaccacagagggccgcacccgcatcgagaagagggtggactgcagcagctttgtgattgaaagtgcccagagagaagatgagggccgctacaccatcaaggtgaccaaccctgtgggggaggatgtggccagcatcttcctgcaggtggtggatgtgcctgaccccccagaggccgtgcgcatcacctctgtgggggaggactgggccatcctggtgtgggagccccccatgtatgatggcggcaagcctgtgacaggctacctggtggagaggaagaagaagggcagccagcgctggatgaagctgaactttgaggtgttcacagagaccacctatgagagcaccaagatgattgagggcatcctgtatgagatgagggtgtttgctgtgaatgccatcggcgtgtcccagcccagcatgaacaccaagcccttcatgcccatcgcccccaccagcgagcccctgcacctgattgtggaggatgtgacagacaccaccaccaccctgaagtggaggcctcccaacagaattggagctgggggcattgatggctacctggtggagtactgcctggagggcagcgaggagtgggtgcctgccaacacagagcctgtggagcgctgtggcttcaccgtgaagaacctgcccactggagcccgcatcctcttccgggtggtgggcgtgaacattgctggccgctctgagcccgccaccctggcccagcctgtgaccatccgggagattgctgagccccccaagatccggctgcccaggcacctgcggcagacctacatcaggaaggtgggggagcagctgaacctggtggtgcccttccagggcaagccccggccccaggtggtgtggaccaagggcggggcccccctggacaccagccgggtgcacgtgaggaccagtgactttgacacagtgttctttgtgcggcaggccgcccggagtgacagcggggagtatgagctgtctgtgcagatcgagaacatgaaggacacagccaccatccgcatccgggtggtggagaaggccggcccccccatcaacgtgatggtgaaggaggtgtggggcaccaatgccctggtggagtggcaggcccccaaggatgatggcaacagcgagatcatgggctactttgtgcagaaggctgacaagaagaccatggagtggttcaacgtgtatgaaagaaacagacacaccagctgcaccgtgtctgacctgattgtgggcaatgagtactacttccgggtgtacacagagaacatctgtggcctgagtgacagccctggggtgtccaagaacacagcccgcatcctgaagacaggcatcaccttcaagccctttgagtacaaggagcatgacttcaggatggcccccaagttcctgacccccctgattgacagagtggtggtggccggctacagcgctgccctgaactgtgctgtgcggggccaccccaagcccaaggtggtgtggatgaagaacaagatggagatccgggaggaccccaagttcctgatcaccaactaccagggcgtgctgaccctgaacatccggcggcccagcccctttgatgctggcacctacacctgcagagctgtgaatgagctgggggaggccctggccgagtgcaagctggaggtgcgggtgccccagtag

SEQ ID NO: 160760 - DNA, 3426 bp, synthetic construct
  misc_feature 1..3426: note = Description of Artificial Sequence: Synthetic coding sequence
  source 1..3426: mol_type = other DNA
atgcctgagcccaccaagaaggaggagaatgaggtgcctgccccagcccctcctcctgaggagcccagcaaggagaaggaggccggcaccaccccagccaaggactggaccctggtggagaccccacctggagaggagcaggccaagcagaatgccaacagccagctgagcatcctcttcatcgagaagccccagggcggcaccgtgaaggtgggggaggacatcaccttcatcgccaaggtgaaggccgaggacctgctgaggaagcccaccatcaagtggttcaagggcaagtggatggacctggccagcaaggccggcaagcacctgcagctgaaggagacctttgagcggcacagccgggtgtacacctttgagatgcagatcatcaaggccaaggacaactttgctggcaactaccgctgtgaggtgacctacaaggacaagtttgacagctgcagctttgacctggaggtgcatgagagcacaggcaccacccccaacatcgacatccgcagcgccttcaagaggtctggagagggccaggaggatgctggggagctggacttcagcggcctgctgaagaggcgggaggtgaagcagcaggaggaggagccccaggtggatgtgtgggagctgctgaagaatgccaagcccagtgaatatgagaagatcgccttccagtatggcatcacagacctgcggggcatgctgaagaggctgaagaggatgagaagagaggagaagaagtctgctgcctttgccaagatcctggaccctgcctaccaggtggacaagggcggccgggtgcgctttgtggtggagctggccgaccccaagctggaggtgaagtggtacaagaatggccaggagatccggcccagcaccaagtacatctttgagcacaagggctgccagaggatcctcttcatcaacaactgccagatgacagatgacagcgagtactacgtgacagctggagatgagaagtgcagcacagagctgtttgtgcgggagccccccatcatggtgaccaagcagctggaggacaccacagcctactgtggggagcgggtggagctggagtgtgaggtgtctgaagatgatgccaacgtgaagtggttcaagaatggagaggagatcatccctggccccaagagccgctaccgcatccgggtggagggcaagaagcacatcctgatcatcgagggcgccaccaaggcagatgctgctgagtacagcgtgatgaccaccggcggccagagcagcgccaagctgtctgtggacctgaagcccctgaagatcctgacccccctgacagaccagacagtgaacctgggcaaggagatctgcctgaagtgtgagatcagcgagaacatccctgggaagtggaccaagaatggcctgcctgtgcaggagagtgaccggctgaaggtggtgcacaagggccgcatccacaagctggtgattgccaatgccctgacagaagatgaaggagactatgtgtttgccccagatgcctacaacgtgaccctgcctgccaaggtgcacgtgattgatcctcccaagatcatcctggatggcctggatgctgacaacacagtgacagtgattgctggcaacaagctgcggctggagatccccatcagcggggagcccccacccaaggccatgtggagcagaggagacaaggccatcatggagggcagcggccgcatcagaacagagagctacccagacagcagcaccctggtgattgatattgctgagagagatgacagcggcgtgtaccacatcaacctgaagaatgaagctggggaggcccacgccagcatcaaggtgaaggtggtggacttcccagacccccctgtggcccccaccgtgacagaggtgggagatgactggtgcatcatgaactgggagcccccagcctatgatggcggcagccccatcctgggctacttcatcgagaggaagaagaagcagagcagccgctggatgaggctgaactttgacctgtgcaaggagaccacctttgagcccaagaagatgattgaaggagtggcctatgaggtgcgcatctttgctgtgaatgccatcggcatcagcaagcccagcatgcccagccggccctttgtgcccctggccgtgaccagcccccccaccctgctgactgtggacagcgtgacagacaccaccgtgaccatgcgctggaggcccccagaccacatcggggctgctggcctggatggctacgtgctggagtactgctttgagggcagcaccagcgccaagcagagtgatgaaaatggagaggccgcctatgacctgcctgctgaggactggatcgtggccaacaaggacctgattgacaagaccaagttcaccatcaccggcctgcccacagatgccaagatctttgtgcgggtgaaggctgtgaatgctgctggggccagcgagcccaagtactacagccagcccatcctggtgaaggagatcatcgagccccccaagatccgcatccccaggcacctgaagcagacctacatcagaagagtgggggaggccgtgaacctggtgatccccttccagggcaagcccaggcctgagctgacctggaagaaggatggagctgagattgacaagaaccagatcaacatccggaacagcgagacagacaccatcatcttcatcaggaaggccgagaggagccacagcggcaagtatgacctgcaggtgaaggtggacaagtttgtggagacagccagcattgacatccagatcatcgaccggcccggccccccccagatcgtgaagattgaagatgtgtggggagaaaatgtggccctgacctggaccccacccaaggatgatggaaatgctgccatcaccggctacaccatccagaaggctgacaagaagtccatggagtggttcaccgtcatcgagcactaccacaggaccagcgccaccatcacagagctggtgattggaaatgagtactacttccgggtcttcagcgagaacatgtgtggcctgtctgaagatgccaccatgaccaaggagagcgctgtgattgccagagatggcaagatctacaagaaccctgtgtatgaagattttgacttcagcgaggcccccatgttcacccagcccctggtgaacacctacgccatcgccggctacaatgccaccctgaactgcagcgtgcggggcaaccccaagcccaagatcacctggatgaagaacaaggtggccatcgtggatgacccccgctacaggatgttcagcaaccagggcgtgtgcaccctggagatcaggaagcccagcccctatgatggcggcacctactgctgcaaggctgtgaatgacctgggcaccgtggagattgagtgcaagctggaggtgaaggtgattgcccagtag

SEQ ID NO: 160761 - DNA, 3516 bp, synthetic construct
  misc_feature 1..3516: note = Description of Artificial Sequence: Synthetic coding sequence
  source 1..3516: mol_type = other DNA
atgcctgagcccaccaagaaggaggagaatgaggtgcctgccccagcccctcctcctgaggagcccagcaaggagaaggaggccggcaccaccccagccaaggatgaggaggaggtgtccccaccttctgccctgcccccaggcctgggcagccgggccctggagaggaaggacagcgactggaccctggtggagaccccacctggagaggagcaggccaagcagaatgccaacagccagctgagcatcctcttcatcgagaagccccagggcggcaccgtgaaggtgggggaggacatcaccttcatcgccaaggtgaaggccgaggacctgctgaggaagcccaccatcaagtggttcaagggcaagtggatggacctggccagcaaggccggcaagcacctgcagctgaaggagacctttgagcggcacagccgggtgtacacctttgagatgcagatcatcaaggccaaggacaactttgctggcaactaccgctgtgaggtgacctacaaggacaagtttgacagctgcagctttgacctggaggtgcatgagagcacaggcaccacccccaacatcgacatccgcagcgccttcaagaggtctggagagggccaggaggatgctggggagctggacttcagcggcctgctgaagagaagagaggtgaagcagcaggaggaggagccccaggtggatgtgtgggagctgctgaagaatgccaagcccagtgaatatgagaagatcgccttccagtatggcatcacagacctgcggggcatgctgaagaggctgaagaggatgaggcgggaggagaagaagtctgctgcctttgccaagatcctggaccctgcctaccaggtggacaagggcggccgggtgcgctttgtggtggagctggccgaccccaagctggaggtgaagtggtacaagaatggccaggagatccggcccagcaccaagtacatctttgagcacaagggctgccagaggatcctcttcatcaacaactgccagatgacagatgattctgagtactacgtgacagctggagatgagaagtgcagcacagagctgtttgtgcgggagccccccatcatggtgaccaagcagctggaggacaccacagcctactgtggggagcgggtggagctggagtgtgaggtgtctgaagatgatgccaacgtgaagtggttcaagaatggagaggagatcatccctggccccaagagccgctaccgcatccgggtggagggcaagaagcacatcctgatcattgaaggagccaccaaggcagatgctgctgagtacagcgtgatgaccactggaggccagagcagcgccaagctgtctgtggacctgaagcccctgaagatcctgacccccctgacagaccagacagtgaacctgggcaaggagatctgcctgaagtgtgagatcagcgagaacatccctgggaagtggaccaagaatggcctgcctgtgcaggagagtgaccggctgaaggtggtgcacaagggccgcatccacaagctggtgattgccaatgccctgacagaagatgaaggagactatgtgtttgccccagatgcctacaacgtgaccctgcctgccaaggtgcacgtgattgacccccccaagatcatcctggatggcctggatgctgacaacacagtgacagtgattgctggcaacaagctgcggctggagatccccatctctggagagcccccacccaaggccatgtggagcagaggagacaaggccatcatggagggcagcggccgcatcagaacagagagctacccagacagcagcaccctggtgattgatattgctgagagagatgattctggagtgtaccacatcaacctgaagaatgaggccggggaggcccacgccagcatcaaggtgaaggtggtggacttcccagacccccctgtggcccccaccgtgacagaggtgggagatgactggtgcatcatgaactgggagcccccagcctatgatggcggcagccccatcctgggctacttcattgaaaggaagaagaagcagagcagccgctggatgaggctgaactttgacctgtgcaaggagaccacctttgagcccaagaagatgattgagggcgtggcctatgaggtgcgcatctttgctgtgaatgccatcggcatcagcaagcccagcatgcccagccggccctttgtgcccctggccgtgaccagcccccccaccctgctgactgtggacagcgtgacagacaccaccgtgaccatgcgctggaggcccccagaccacatcggggccgccggcctggatggctacgtgctggagtactgctttgagggcacagaggactggatcgtggccaacaaggacctgattgacaagaccaagttcaccatcaccggcctgcccacagatgccaagatctttgtgcgggtgaaggctgtgaatgctgctggggccagcgagcccaagtactacagccagcccatcctggtgaaggagatcatcgagccccccaagatccgcatccccaggcacctgaagcagacctacatccggcgggtgggggaggccgtgaacctggtgatccccttccagggcaagcccaggcctgagctgacctggaagaaggatggagctgagattgacaagaaccagatcaacatcagaaattctgaaacagacaccatcatcttcatcaggaaggccgagaggagccacagcggcaagtatgacctgcaggtgaaggtggacaagtttgtggagacagccagcattgacatccagatcatcgacaggcctggccccccccagatcgtgaagattgaagatgtgtggggagaaaatgtggccctgacctggaccccacccaaggatgatggaaatgctgccatcaccggctacaccatccagaaggctgacaagaagtccatggagtggttcaccgtgattgagcactaccacaggaccagcgccaccatcacagagctggtgattggaaatgagtactacttccgggtcttcagcgagaacatgtgtggcctgtctgaagatgccaccatgaccaaggagagcgctgtgattgccagagatggcaagatctacaagaaccctgtgtatgaggactttgacttcagcgaggcccccatgttcacccagcccctggtgaacacctacgccatcgccggctacaatgccaccctgaactgcagcgtgcggggcaaccccaagcccaagatcacctggatgaagaacaaggtggccatcgtggatgacccccgctacaggatgttcagcaaccagggcgtgtgcaccctggagatcaggaagcccagcccctatgatggcggcacctactgctgcaaggctgtgaatgacctgggcaccgtggagattgagtgcaagctggaggtgaaggtgatctaccagggcgtgaacaccccaggccagcccgtcttcctggagggccagcagcagagcctgcacaacaaggacttctag

SEQ ID NO: 160762 - DNA, 3447 bp, synthetic construct
  misc_feature 1..3447: note = Description of Artificial Sequence: Synthetic coding sequence
  source 1..3447: mol_type = other DNA
atgcctgagcccaccaagaaggaggagaatgaggtgcctgccccagcccctcctcctgaggagcccagcaaggagaaggaggccggcaccaccccagccaaggatgaggaggaggtgtccccaccttctgccctgcccccaggcctgggcagccgggccctggagaggaaggacagcgactggaccctggtggagaccccacctggagaggagcaggccaagcagaatgccaacagccagctgagcatcctcttcatcgagaagccccagggcggcaccgtgaaggtgggggaggacatcaccttcatcgccaaggtgaaggccgaggacctgctgaggaagcccaccatcaagtggttcaagggcaagtggatggacctggccagcaaggccggcaagcacctgcagctgaaggagacctttgagcggcacagccgggtgtacacctttgagatgcagatcatcaaggccaaggacaactttgctggcaactaccgctgtgaggtgacctacaaggacaagtttgacagctgcagctttgacctggaggtgcatgagagcacaggcaccacccccaacatcgacatccgcagcgccttcaagaggtctggagagggccaggaggatgctggggagctggacttcagcggcctgctgaagagaagagaggtgaagcagcaggaggaggagccccaggtggatgtgtgggagctgctgaagaatgccaagcccagtgaatatgagaagatcgccttccagtatggcatcacagacctgcggggcatgctgaagaggctgaagaggatgaggcgggaggagaagaagtctgctgcctttgccaagatcctggaccctgcctaccaggtggacaagggcggccgggtgcgctttgtggtggagctggccgaccccaagctggaggtgaagtggtacaagaatggccaggagatccggcccagcaccaagtacatctttgagcacaagggctgccagaggatcctcttcatcaacaactgccagatgacagatgattctgagtactacgtgacagctggagatgagaagtgcagcacagagctgtttgtgcgggagccccccatcatggtgaccaagcagctggaggacaccacagcctactgtggggagcgggtggagctggagtgtgaggtgtctgaagatgatgccaacgtgaagtggttcaagaatggagaggagatcatccctggccccaagagccgctaccgcatccgggtggagggcaagaagcacatcctgatcattgaaggagccaccaaggcagatgctgctgagtacagcgtgatgaccactggaggccagagcagcgccaagctgtctgtggacctgaagcccctgaagatcctgacccccctgacagaccagacagtgaacctgggcaaggagatctgcctgaagtgtgagatcagcgagaacatccctgggaagtggaccaagaatggcctgcctgtgcaggagagtgaccggctgaaggtggtgcacaagggccgcatccacaagctggtgattgccaatgccctgacagaagatgaaggagactatgtgtttgccccagatgcctacaacgtgaccctgcctgccaaggtgcacgtgattgacccccccaagatcatcctggatggcctggatgctgacaacacagtgacagtgattgctggcaacaagctgcggctggagatccccatctctggagagcccccacccaaggccatgtggagcagaggagacaaggccatcatggagggcagcggccgcatcagaacagagagctacccagacagcagcaccctggtgattgatattgctgagagagatgattctggagtgtaccacatcaacctgaagaatgaggccggggaggcccacgccagcatcaaggtgaaggtggtggacttcccagacccccctgtggcccccaccgtgacagaggtgggagatgactggtgcatcatgaactgggagcccccagcctatgatggcggcagccccatcctgggctacttcattgaaaggaagaagaagcagagcagccgctggatgaggctgaactttgacctgtgcaaggagaccacctttgagcccaagaagatgattgagggcgtggcctatgaggtgcgcatctttgctgtgaatgccatcggcatcagcaagcccagcatgcccagccggccctttgtgcccctggccgtgaccagcccccccaccctgctgactgtggacagcgtgacagacaccaccgtgaccatgcgctggaggcccccagaccacatcggggccgccggcctggatggctacgtgctggagtactgctttgagggcacagaggactggatcgtggccaacaaggacctgattgacaagaccaagttcaccatcaccggcctgcccacagatgccaagatctttgtgcgggtgaaggctgtgaatgctgctggggccagcgagcccaagtactacagccagcccatcctggtgaaggagatcatcgagccccccaagatccgcatccccaggcacctgaagcagacctacatccggcgggtgggggaggccgtgaacctggtgatccccttccagggcaagcccaggcctgagctgacctggaagaaggatggagctgagattgacaagaaccagatcaacatcagaaattctgaaacagacaccatcatcttcatcaggaaggccgagaggagccacagcggcaagtatgacctgcaggtgaaggtggacaagtttgtggagacagccagcattgacatccagatcatcgacaggcctggccccccccagatcgtgaagattgaagatgtgtggggagaaaatgtggccctgacctggaccccacccaaggatgatggaaatgctgccatcaccggctacaccatccagaaggctgacaagaagtccatggagtggttcaccgtgattgagcactaccacaggaccagcgccaccatcacagagctggtgattggaaatgagtactacttccgggtcttcagcgagaacatgtgtggcctgtctgaagatgccaccatgaccaaggagagcgctgtgattgccagagatggcaagatctacaagaaccctgtgtatgaggactttgacttcagcgaggcccccatgttcacccagcccctggtgaacacctacgccatcgccggctacaatgccaccctgaactgcagcgtgcggggcaaccccaagcccaagatcacctggatgaagaacaaggtggccatcgtggatgacccccgctacaggatgttcagcaaccagggcgtgtgcaccctggagatcaggaagcccagcccctatgatggcggcacctactgctgcaaggctgtgaatgacctgggcaccgtggagattgagtgcaagctggaggtgaaggtgattgcccagtag

SEQ ID NO: 160763 - DNA, 3495 bp, synthetic construct
  misc_feature 1..3495: note = Description of Artificial Sequence: Synthetic coding sequence
  source 1..3495: mol_type = other DNA
atgcctgagcccaccaagaaggaggagaatgaggtgcctgccccagcccctcctcctgaggagcccagcaaggagaaggaggccggcaccaccccagccaaggactggaccctggtggagaccccacctggagaggagcaggccaagcagaatgccaacagccagctgagcatcctcttcatcgagaagccccagggcggcaccgtgaaggtgggggaggacatcaccttcatcgccaaggtgaaggccgaggacctgctgaggaagcccaccatcaagtggttcaagggcaagtggatggacctggccagcaaggccggcaagcacctgcagctgaaggagacctttgagcggcacagccgggtgtacacctttgagatgcagatcatcaaggccaaggacaactttgctggcaactaccgctgtgaggtgacctacaaggacaagtttgacagctgcagctttgacctggaggtgcatgagagcacaggcaccacccccaacatcgacatccgcagcgccttcaagaggtctggagagggccaggaggatgctggggagctggacttcagcggcctgctgaagaggcgggaggtgaagcagcaggaggaggagccccaggtggatgtgtgggagctgctgaagaatgccaagcccagtgaatatgagaagatcgccttccagtatggcatcacagacctgcggggcatgctgaagaggctgaagaggatgagaagagaggagaagaagtctgctgcctttgccaagatcctggaccctgcctaccaggtggacaagggcggccgggtgcgctttgtggtggagctggccgaccccaagctggaggtgaagtggtacaagaatggccaggagatccggcccagcaccaagtacatctttgagcacaagggctgccagaggatcctcttcatcaacaactgccagatgacagatgacagcgagtactacgtgacagctggagatgagaagtgcagcacagagctgtttgtgcgggagccccccatcatggtgaccaagcagctggaggacaccacagcctactgtggggagcgggtggagctggagtgtgaggtgtctgaagatgatgccaacgtgaagtggttcaagaatggagaggagatcatccctggccccaagagccgctaccgcatccgggtggagggcaagaagcacatcctgatcatcgagggcgccaccaaggcagatgctgctgagtacagcgtgatgaccaccggcggccagagcagcgccaagctgtctgtggacctgaagcccctgaagatcctgacccccctgacagaccagacagtgaacctgggcaaggagatctgcctgaagtgtgagatcagcgagaacatccctgggaagtggaccaagaatggcctgcctgtgcaggagagtgaccggctgaaggtggtgcacaagggccgcatccacaagctggtgattgccaatgccctgacagaagatgaaggagactatgtgtttgccccagatgcctacaacgtgaccctgcctgccaaggtgcacgtgattgatcctcccaagatcatcctggatggcctggatgctgacaacacagtgacagtgattgctggcaacaagctgcggctggagatccccatcagcggggagcccccacccaaggccatgtggagcagaggagacaaggccatcatggagggcagcggccgcatcagaacagagagctacccagacagcagcaccctggtgattgatattgctgagagagatgacagcggcgtgtaccacatcaacctgaagaatgaagctggggaggcccacgccagcatcaaggtgaaggtggtggacttcccagacccccctgtggcccccaccgtgacagaggtgggagatgactggtgcatcatgaactgggagcccccagcctatgatggcggcagccccatcctgggctacttcatcgagaggaagaagaagcagagcagccgctggatgaggctgaactttgacctgtgcaaggagaccacctttgagcccaagaagatgattgaaggagtggcctatgaggtgcgcatctttgctgtgaatgccatcggcatcagcaagcccagcatgcccagccggccctttgtgcccctggccgtgaccagcccccccaccctgctgactgtggacagcgtgacagacaccaccgtgaccatgcgctggaggcccccagaccacatcggggctgctggcctggatggctacgtgctggagtactgctttgagggcagcaccagcgccaagcagagtgatgaaaatggagaggccgcctatgacctgcctgctgaggactggatcgtggccaacaaggacctgattgacaagaccaagttcaccatcaccggcctgcccacagatgccaagatctttgtgcgggtgaaggctgtgaatgctgctggggccagcgagcccaagtactacagccagcccatcctggtgaaggagatcatcgagccccccaagatccgcatccccaggcacctgaagcagacctacatcagaagagtgggggaggccgtgaacctggtgatccccttccagggcaagcccaggcctgagctgacctggaagaaggatggagctgagattgacaagaaccagatcaacatccggaacagcgagacagacaccatcatcttcatcaggaaggccgagaggagccacagcggcaagtatgacctgcaggtgaaggtggacaagtttgtggagacagccagcattgacatccagatcatcgaccggcccggccccccccagatcgtgaagattgaagatgtgtggggagaaaatgtggccctgacctggaccccacccaaggatgatggaaatgctgccatcaccggctacaccatccagaaggctgacaagaagtccatggagtggttcaccgtcatcgagcactaccacaggaccagcgccaccatcacagagctggtgattggaaatgagtactacttccgggtcttcagcgagaacatgtgtggcctgtctgaagatgccaccatgaccaaggagagcgctgtgattgccagagatggcaagatctacaagaaccctgtgtatgaagattttgacttcagcgaggcccccatgttcacccagcccctggtgaacacctacgccatcgccggctacaatgccaccctgaactgcagcgtgcggggcaaccccaagcccaagatcacctggatgaagaacaaggtggccatcgtggatgacccccgctacaggatgttcagcaaccagggcgtgtgcaccctggagatcaggaagcccagcccctatgatggcggcacctactgctgcaaggctgtgaatgacctgggcaccgtggagattgagtgcaagctggaggtgaaggtgatctaccagggcgtgaacaccccaggccagcctgtgttcctggagggccagcagcagagcctgcacaacaaggacttctag

SEQ ID NO: 160764 - DNA, 2349 bp, synthetic construct
  misc_feature 1..2349: note = Description of Artificial Sequence: Synthetic coding sequence
  source 1..2349: mol_type = other DNA
atgcctgagcccaccaagaaggaggagaatgaggtgcctgccccagcccctcctcctgaggagcccagcaaggagaaggaggccggcaccaccccagccaaggatgaggaggaggtgtccccaccttctgccctgcccccaggcctgggcagccgggccctggagaggaaggacagcgactggaccctggtggagaccccacctggagaggagcaggccaagcagaatgccaacagccagctgagcatcctcttcatcgagaagccccagggcggcaccgtgaaggtgggggaggacatcaccttcatcgccaaggtgaaggccgaggacctgctgaggaagcccaccatcaagtggttcaagggcaagtggatggacctggccagcaaggccggcaagcacctgcagctgaaggagacctttgagcggcacagccgggtgtacacctttgagatgcagatcatcaaggccaaggacaactttgctggcaactaccgctgtgaggtgacctacaaggacaagtttgacagctgcagctttgacctggaggtgcatgagagcacaggcaccacccccaacatcgacatccgcagcgccttcaagaggtctggagagggccaggaggatgctggggagctggacttcagcggcctgctgaagagaagagaggtgaagcagcaggaggaggagccccaggtggatgtgtgggagctgctgaagaatgccaagcccagtgaatatgagaagatcgccttccagtatggcatcacagacctgcggggcatgctgaagaggctgaagaggatgaggcgggaggagaagaagtctgctgcctttgccaagatcctggaccctgcctaccaggtggacaagggcggccgggtgcgctttgtggtggagctggccgaccccaagctggaggtgaagtggtacaagaatggccaggagatccggcccagcaccaagtacatctttgagcacaagggctgccagaggatcctcttcatcaacaactgccagatgacagatgattctgagtactacgtgacagctggagatgagaagtgcagcacagagctgtttgtgcgggagccccccatcatggtgaccaagcagctggaggacaccacagcctactgtggggagcgggtggagctggagtgtgaggtgtctgaagatgatgccaacgtgaagtggttcaagaatggagaggagatcatccctggccccaagagccgctaccgcatccgggtggagggcaagaagcacatcctgatcattgaaggagccaccaaggcagatgctgctgagtacagcgtgatgaccactggaggccagagcagcgccaagctgtctgtggacctgaagcccctgaagatcctgacccccctgacagaccagacagtgaacctgggcaaggagatctgcctgaagtgtgagatcagcgagaacatccctgggaagtggaccaagaatggcctgcctgtgcaggagagtgaccggctgaaggtggtgcacaagggccgcatccacaagctggtgattgccaatgccctgacagaagatgaaggagactatgtgtttgccccagatgcctacaacgtgaccctgcctgccaaggtgcacgtgattgacccccccaagatcatcctggatggcctggatgctgacaacacagtgacagtgattgctggcaacaagctgcggctggagatccccatctctggagagcccccacccaaggccatgtggagcagaggagacaaggccatcatggagggcagcggccgcatcagaacagagagctacccagacagcagcaccctggtgattgatattgctgagagagatgattctggagtgtaccacatcaacctgaagaatgaggccggggaggcccacgccagcatcaaggtgaaggtggtggacttcccagacccccctgtggcccccaccgtgacagaggtgggagatgactggtgcatcatgaactgggagcccccagcctatgatggcggcagccccatcctgggctacttcattgaaaggaagaagaagcagagcagccgctggatgaggctgaactttgacctgtgcaaggagaccacctttgagcccaagaagatgattgagggcgtggcctatgaggtgcgcatctttgctgtgaatgccatcggcatcagcaagcccagcatgcccagccggccctttgtgcccctggccgtgaccagcccccccaccctgctgactgtggacagcgtgacagacaccaccgtgaccatgcgctggaggccccggccccactggtgcagccgcttccgctggctgtgtgcccgggtgctgctgtag

SEQ ID NO: 160765 - DNA, 3426 bp, synthetic construct; identical to SEQ ID NO: 160760
  misc_feature 1..3426: note = Description of Artificial Sequence: Synthetic coding sequence
  source 1..3426: mol_type = other DNA

SEQ ID NO: 160766 - DNA, 3372 bp, synthetic construct
  misc_feature 1..3372: note = Description of Artificial Sequence: Synthetic coding sequence
  source 1..3372: mol_type = other DNA
atgcctgagcccaccaagaaggaggagaatgaggtgcctgccccagcccctcctcctgaggagcccagcaaggagaaggaggccggcaccaccccagccaaggactggaccctggtggagaccccacctggagaggagcaggccaagcagaatgccaacagccagctgagcatcctcttcatcgagaagccccagggcggcaccgtgaaggtgggggaggacatcaccttcatcgccaaggtgaaggccgaggacctgctgaggaagcccaccatcaagtggttcaagggcaagtggatggacctggccagcaaggccggcaagcacctgcagctgaaggagacctttgagcggcacagccgggtgtacacctttgagatgcagatcatcaaggccaaggacaactttgctggcaactaccgctgtgaggtgacctacaaggacaagtttgacagctgcagctttgacctggaggtgcatgagagcacaggcaccacccccaacatcgacatccgcagcgccttcaagaggtctggagagggccaggaggatgctggggagctggacttcagcggcctgctgaagaggcgggaggtgaagcagcaggaggaggagccccaggtggatgtgtgggagctgctgaagaatgccaagcccagtgaatatgagaagatcgccttccagtatggcatcacagacctgcggggcatgctgaagaggctgaagaggatgagaagagaggagaagaagtctgctgcctttgccaagatcctggaccctgcctaccaggtggacaagggcggccgggtgcgctttgtggtggagctggccgaccccaagctggaggtgaagtggtacaagaatggccaggagatccggcccagcaccaagtacatctttgagcacaagggctgccagaggatcctcttcatcaacaactgccagatgacagatgacagcgagtactacgtgacagctggagatgagaagtgcagcacagagctgtttgtgcgggagccccccatcatggtgaccaagcagctggaggacaccacagcctactgtggggagcgggtggagctggagtgtgaggtgtctgaagatgatgccaacgtgaagtggttcaagaatggagaggagatcatccctggccccaagagccgctaccgcatccgggtggagggcaagaagcacatcctgatcatcgagggcgccaccaaggcagatgctgctgagtacagcgtgatgaccaccggcggccagagcagcgccaagctgtctgtggacctgaagcccctgaagatcctgacccccctgacagaccagacagtgaacctgggcaaggagatctgcctgaagtgtgagatcagcgagaacatccctgggaagtggaccaagaatggcctgcctgtgcaggagagtgaccggctgaaggtggtgcacaagggccgcatccacaagctggtgattgccaatgccctgacagaagatgaaggagactatgtgtttgccccagatgcctacaacgtgaccctgcctgccaaggtgcacgtgattgatcctcccaagatcatcctggatggcctggatgctgacaacacagtgacagtgattgctggcaacaagctgcggctggagatccccatcagcggggagcccccacccaaggccatgtggagcagaggagacaaggccatcatggagggcagcggccgcatcagaacagagagctacccagacagcagcaccctggtgattgatattgctgagagagatgacagcggcgtgtaccacatcaacctgaagaatgaagctggggaggcccacgccagcatcaaggtgaaggtggtggacttcccagacccccctgtggcccccaccgtgacagaggtgggagatgactggtgcatcatgaactgggagcccccagcctatgatggcggcagccccatcctgggctacttcatcgagaggaagaagaagcagagcagccgctggatgaggctgaactttgacctgtgcaaggagaccacctttgagcccaagaagatgattgaaggagtggcctatgaggtgcgcatctttgctgtgaatgccatcggcatcagcaagcccagcatgcccagccggccctttgtgcccctggccgtgaccagcccccccaccctgctgactgtggacagcgtgacagacaccaccgtgaccatgcgctggaggcccccagaccacatcggggctgctggcctggatggctacgtgctggagtactgctttgagggcacagaggactggatcgtggccaacaaggacctgattgacaagaccaagttcaccatcaccggcctgcccacagatgccaagatctttgtgcgggtgaaggctgtgaatgctgctggggccagcgagcccaagtactacagccagcccatcctggtgaaggagatcatcgagccccccaagatccgcatccccaggcacctgaagcagacctacatcagaagagtgggggaggccgtgaacctggtgatccccttccagggcaagcccaggcctgagctgacctggaagaaggatggagctgagattgacaagaaccagatcaacatccggaacagcgagacagacaccatcatcttcatcaggaaggccgagaggagccacagcggcaagtatgacctgcaggtgaaggtggacaagtttgtggagacagccagcattgacatccagatcatcgaccggcccggccccccccagatcgtgaagattgaagatgtgtggggagaaaatgtggccctgacctggaccccacccaaggatgatggaaatgctgccatcaccggctacaccatccagaaggctgacaagaagtccatggagtggttcaccgtcatcgagcactaccacaggaccagcgccaccatcacagagctggtgattggaaatgagtactacttccgggtcttcagcgagaacatgtgtggcctgtctgaagatgccaccatgaccaaggagagcgctgtgattgccagagatggcaagatctacaagaaccctgtgtatgaagattttgacttcagcgaggcccccatgttcacccagcccctggtgaacacctacgccatcgccggctacaatgccaccctgaactgcagcgtgcggggcaaccccaagcccaagatcacctggatgaagaacaaggtggccatcgtggatgacccccgctacaggatgttcagcaaccagggcgtgtgcaccctggagatcaggaagcccagcccctatgatggcggcacctactgctgcaaggctgtgaatgacctgggcaccgtggagattgagtgcaagctggaggtgaaggtgattgcccagtag

SEQ ID NO: 160767 - DNA, 1434 bp, synthetic construct
  misc_feature 1..1434: note = Description of Artificial Sequence: Synthetic coding sequence
  source 1..1434: mol_type = other DNA
atgatggagaagaacaccagcgagggccctgcctgcagccctgaggagacagccagcgagagcgccaaggtgcccacagctgagcccccaggagaggtggccgtgtctgagagcacccgggaggagcaggtgcccaagccccaggccccagccccccaggcccccacagccagcacagccaccaagccagcccctccttctgaagatgtgcccagcgcccccctgctgctgaccctggatgatgtgagcagcagctctgtgacagtgtcctgggagcccccagagcggctgggccgcctgggcctgcagggctacgtgctggagctgtgccgggagggcgccagcgagtgggtgcctgtgtctgcccggcccatgatggtgacccagcagacagtgaggaacctggccctgggggacaagttcctgctgcgggtgtctgctgtgagcagcgctggagctggccccccagccatgctggaccagcccatccacatcagagaaaatattgaggcccccaagatccgggtgcccaggcacctgcggcagacctacatccggcaggtgggggagaccgtgaacctgcagatccccttccagggcaagcccaagccccaggccacctggacccacaatggacatgccctggacagccagagggtgtccatgaggactggagaccaggacagcatcctcttcatccgcagcgcccagaggagtgacagcggccgctatgagctgactgtgcgggtggaggacctggaggccaaggctgtgattgacatcctggtgattgagaagccaggcccccccagcagcatccggctgctggatgtgtggggctgcaatgctgccctgcagtggaccccaccccaggacaccggcaacacagagctgctgggctacatggtgcagaaggctgacaagaagacaggccagtggttcaccgtgctggagcgctaccaccccaccacctgcaccatcagtgacctgatcatcggcaacagctacagcttccgggtcttcagcgagaacctgtgtggcctgagcaccagcgccaccgtgaccaaggagctggcccacatccagaaggctgacattgctgccaagcccaagggcttcatcgagcgggacttcagcgaggcccccagcttcacccagcccctggccgaccacaccagcaccccaggctacagcacccagctgttctgcagcgtgcgggccagccccaagcccaagatcatctggatgaagaacaagatggagatccagggcaaccccaagtaccgggccctgtctgagcagggcgtgtgcaccctggagatcaggaagcccagcccctttgattctggagtgtacacctgcaaggccatcaacgtgctgggggaggcctctgtggactgccgcctggaggtgaaggccagcgctgcccactag

SEQ ID NO: 160768 - DNA, 5817 bp, synthetic construct
  misc_feature 1..5817: note = Description of Artificial Sequence: Synthetic coding sequence
  source 1..5817: mol_type = other DNA
atgagcagtgatgctgagatggccatctttggagaggccgccccctacctgaggaagccagagaaggagagaattgaggcccagaaccggccctttgacagcaagaaggcctgctttgtggccgacaacaaggagatgtatgtgaagggcatgatccagacccgggagaatgacaaggtgattgtgaagaccctggatgacaggatgctgaccctgaacaatgaccaggtgttccccatgaacccccccaagtttgacaagattgaggacatggccatgatgacccacctgcacgagcctgctgtgctgtacaacctgaaggagagatatgctgcctggatgatctacacctacagcggcctcttctgtgtgacagtgaacccctacaagtggctgcctgtgtacaagccagaggtggtggccgcctaccggggcaagaagaggcaggaggccccaccccacatcttcagcatcagtgacaatgcctaccagttcatgctgacagaccgggacaaccagagcatcctgatcaccggggagagcggggccggcaagacagtgaacaccaagagggtcatccagtactttgccaccatcgctgtgactggagacaagaagaaggagacccagcccgggaagatgcagggcaccctggaggaccagatcatccaggccaaccccctgctggaggcctttggaaatgccaagacagtgagaaatgacaacagcagcagatttgggaagttcatccgcatccactttggagccaccgggaagctggccagcgctgacatcgagacctacctgctggagaagagccgggtgaccttccagctgagcagcgagaggagctaccacatcttctaccagatcatgagcaacaagaagccagagctgattgacctgctgctgatcagcaccaacccctttgacttcccctttgtgtcccagggcgaggtgacagtggccagcattgatgacagcgaggagctgctggccacagacaatgccatcgacatcctgggcttcagcagcgaggagaaggtgggcatctacaagctgactggagctgtgatgcactacggcaacatgaagttcaagcagaagcagcgggaggagcaggccgagccagatggaacagaggtggccgacaaggccggctacctgatgggcctgaacagcgctgagatgctgaagggcctgtgctgcccccgggtgaaggtgggcaatgaatatgtgaccaagggccagaatgtgcagcaggtgaccaacagcgtgggcgccctggccaaggctgtgtatgagaagatgttcctgtggatggtgacccgcatcaaccagcagctggacaccaagcagccccggcagtacttcatcggcgtgctggacattgctggctttgagatctttgacttcaacagcctggagcagctgtgcatcaacttcaccaatgagaagctgcagcagttcttcaaccaccacatgtttgtgctggagcaggaggagtacaagaaggagggcatcgagtgggagttcatcgactttggcatggacctggccgcctgcatcgagctgattgagaagcccatgggcatcttcagcatcctggaggaggagtgcatgttccccaaggccacagacaccagcttcaagaacaagctgtatgaccagcacctgggcaagagcaacaacttccagaagcccaagccagccaagggcaaggccgaggcccacttcagcctggtgcactacgccggcaccgtggactacaacattgctggctggctggacaagaacaaggaccccctgaatgagaccgtggtgggcctgtaccagaagagcagcctgaagctgctgtccttcctgttcagcaactatgctggagctgagactggagacagcggcggcagcaagaagggcggcaagaagaagggcagcagcttccagacagtgtctgctgtgttccgggagaacctgaacaagctgatgaccaacctgcggagcacccacccccactttgtgcgctgcctgatccccaatgagaccaagaccccaggagtgatggaccactacctggtgatgcaccagctgcgctgcaatggagtgctggagggcatccgcatctgcaggaagggcttccccagccgcatcctgtatgctgacttcaagcagcgctaccgcatcctgaatgccagcgccatccctgagggccagttcatcgacagcaagaatgccagcgagaagctgctgaacagcattgatgtggaccgggagcagttccgcttcggcaacaccaaggtgttcttcaaggccggcctgctgggcctgctggaggagatgagagatgagaagctggtgaccctgatgaccagcacccaggccgtgtgccggggctacctgatgagggtggagttcaagaagatgatggagcggcgggacagcatcttctgcatccagtacaacatccgctccttcatgaatgtgaagcactggccctggatgaacctcttcttcaagatcaagcccctgctgaagtctgctgaggccgagaaggagatggccaccatgaaggaggactttgagaggaccaaggaggagctggcccggtctgaggcccggaggaaggagctggaggagaagatggtgtccctgctgcaggagaagaatgacctgcagctgcaggtgcagagcgagacagagaacctgatggatgctgaggagcgctgtgagggcctcatcaagagcaagatcctgctggaggccaaggtgaaggagctgacagagcggctggaggaggaggaggagatgaacagcgagctggtggccaagaagaggaacctggaggacaagtgcagcagcctgaagagggacattgatgacctggagctgaccctgaccaaggtggagaaggagaagcacgccacagagaacaaggtgaagaacctgtctgaggagatgacagccctggaggagaacatcagcaagctgaccaaggagaagaagagcctgcaggaggcccaccagcagaccctggatgacctgcaggtggaggaggacaaggtgaatggcctcatcaagatcaatgccaagctggagcagcagacagatgacctggagggcagcctggagcaggagaagaagctgcgggctgacctggagcgggccaagaggaagctggagggggacctgaagatgagccaggagagcatcatggacctggagaatgacaagcagcagatcgaggagaagctgaagaagaaggagtttgagctgagccagctgcaggccaagattgatgatgagcaggtgcacagcctgcagttccagaagaagatcaaggagctgcaggccagaattgaggagctggaggaggagattgaggccgagcacaccctgcgggccaagattgagaagcagaggagtgacctggcccgggagctggaggagatcagcgagcggctggaggaggccagcggggccaccagcgcccagatcgagatgaacaagaagcgggaggccgagttccagaagatgagaagagacctggaggaggccaccctgcagcacgaggccacagctgccaccctgaggaagaagcaggccgacagcgtggccgagctgggggagcagattgacaacctgcagagggtgaagcagaagctggagaaggagaagtctgagctgaagatggagattgatgacatggccagcaacatcgaggccctgagcaagagcaagagcaacattgaaagaacctgcaggacagtggaggaccagttcagcgagatcaaggccaaggatgagcagcagacccagctgattcatgacctgaacatgcagaaggcccggctgcagacccagaatggagagctgagccaccgggtggaggagaaggagagcctcatcagccagctgaccaagagcaagcaggccctgacccagcagctggaggagctgaagaggcagatggaggaggagaccaaggccaagaatgccatggcccacgccctgcagagcagcagacatgactgtgacctgctgcgggagcagtatgaggaggagcaggaggccaaggccgagctgcagagggccctgagcaaggccaacagcgaggtggcccagtggaggaccaagtatgaaacagatgccatccagaggacagaggagctggaggaggccaagaagaagctggcccagaggctgcaggaggccgaggagaacacagaaacagccaacagcaaatgtgccagcctggagaagaccaagcagaggctgcagggcgaggtggaggacctgatgagggacctggagaggagccacacagcctgtgccaccctggacaagaagcagaggaactttgacaaggtgctggccgagtggaagcagaagctggatgagagccaggccgagctggaggccgcccagaaggagagccgcagcctgagcacagagctgttcaagatgagaaatgcctatgaggaggtggtggaccagctggagaccctgcggcgggagaacaagaacctgcaggaggagatcagtgacctgacagagcagattgctgagaccgggaagaacctgcaggaggccgagaagaccaagaagctggtggagcaggagaagagtgacctgcaggtggccctggaggaggtggagggcagcctggagcacgaggagagcaagatcctgcgggtgcagctggagctgagccaggtgaagtctgagctggacaggaaggtgattgagaaggatgaggagattgagcagctgaagaggaacagccagagagctgctgaggccctgcagagcgtgctggatgctgagatccgcagcagaaatgatgccctgcggctgaagaagaagatggagggggacctgaatgagatggagatccagctgggccacagcaaccggcagatggccgagacccagaagcacctgaggacagtgcagggccagctgaaggacagccagctgcacctggatgatgccctgcggagcaatgaagacctgaaggagcagctggccatcgtggagaggagaaatggcctgctgctggaggagctggaggagatgaaggtggccctggagcagacagagaggacccggcggctgtctgagcaggagctgctggatgccagtgacagagtgcagctgctgcacagccagaacaccagcctcatcaacaccaagaagaagctggaggccgacatcgcccagtgccaggccgaggtggagaacagcatccaggagagcagaaatgctgaggagaaggccaagaaggccatcacagatgctgccatgatggccgaggagctgaagaaggagcaggacaccagcgcccacctggagaggatgaagaagaacctggagcagacagtgaaggacctgcagcaccggctggatgaggccgagcagctggccctgaagggcggcaagaagcagatccagaagctggagaacagagtgcgggagctggagaatgagctggatgtggagcagaagagaggagctgaggccctgaagggggcccacaagtatgaaaggaaggtgaaggagatgacctaccaggccgaggaggaccacaagaacatcctgcggctgcaggacctggtggacaagctgcaggccaaggtgaagagctacaagaggcaggccgaggaggccgaggagcaggccaacacccagctgagccgctgcagaagagtgcagcacgagctggaggaggccgctgagagagctgacattgctgagagccaggtgaacaagctgcgggccaagagcagagatgtgggcagccagaagatggaggagtag

SEQ ID NO: 160769 - DNA, 6111 bp, synthetic construct
  misc_feature 1..6111: note = Description of Artificial Sequence: Synthetic coding sequence
  source 1..6111: mol_type = other DNA
atggctgctgtgaccatgtctgtgcccggcaggaaggccccacccaggcctggccctgtgcctgaggccgcccagcccttcctgttcaccccccggggccccagcgctgggggcggccctggcagcggcaccagcccccaggtggagtggacagcccggcggctggtgtgggtgcccagcgagctgcacggctttgaagctgctgccctgagagatgaaggagaggaggaggccgaggtggagctggccgagagcggccgccgcctgcggctgccccgggaccagatccagaggatgaacccccccaagttcagcaaggccgaggacatggccgagctgacctgcctgaatgaggcctctgtgctgcacaacctgcgggagcgctactacagcggcctcatctacacctacagcggcctcttctgtgtggtgatcaacccctacaagcagctgcccatctacacagaggccatcgtggagatgtaccggggcaagaagagacatgaggtgccccctcatgtgtatgctgtgacagagggcgcctaccgctccatgctgcaggaccgggaggaccagagcatcctgtgcacaggagagagcggggccggcaagacagagaacaccaagaaggtgatccagtacctggcccacgtggccagcagccccaagggcaggaaggagcccggggtgcctgcctctgtgtccacagtgtcctatggagagctggagcggcagctgctgcaggccaaccccatcctggaggcctttggaaatgccaagacagtgaagaatgacaacagcagcagatttgggaagttcatccgcatcaactttgatgtggccggctacatcgtgggcgccaacatcgagacctacctgctggagaagagccgggccatccggcaggccaaggatgagtgcagcttccacatcttctaccagctgctgggcggggccggggagcagctgaaggctgacctgctgctggagccctgcagccactaccgcttcctgaccaacggccccagcagcagccctggccaggagcgggagctgttccaggagaccctggagagcctgcgggtgctgggcttcagccatgaggagatcatctccatgctgaggatggtgtctgctgtgctgcagtttggaaacatcgccctgaagcgggagaggaacacagaccaggccaccatgccagacaacacagctgcccagaagctgtgccgcctgctgggcctgggcgtgacagacttcagccgggccctgctgaccccccgcatcaaggtgggccgggactatgtgcagaaggcccagaccaaggagcaggccgactttgccctggaggccctggccaaggccacctatgaaagactcttccgctggctggtgctgcggctgaacagagccctggacaggagcccccggcagggcgccagcttcctgggcatcctggacattgctggctttgagatcttccagctgaacagctttgagcagctgtgcatcaactacaccaatgagaagctgcagcagctgttcaaccacaccatgtttgtgctggagcaggaggagtaccagcgggagggcatcccctggaccttcctggactttggcctggacctgcagccctgcatcgacctgattgaaagacctgccaaccccccaggcctgctggccctgctggatgaggagtgctggttccccaaggccacagacaagagctttgtggagaaggtggcccaggagcagggcggccaccccaagttccagaggcccaggcacctgcgggaccaggccgacttctctgtgctgcactacgccggcaaggtggactacaaggccaatgagtggctgatgaagaacatggaccccctgaatgacaacgtggccgccctgctgcaccagagcacagaccggctgacagctgagatctggaaggatgagcacggcggcttccagcagttctccttcctgggcagcttcccccccagccccccaggcagcgctgagcgctgcagcagcgccatcagccccccaggagtggagggcatcgtgggcctggagcaggtgagcagcctgggagatggccccccaggcggccggccccggcggggcatgttcagaacagtgggccagctgtacaaggagagcctgagccggctgatggccaccctgagcaacaccaaccccagctttgtgcgctgcatcgtgcccaaccacgagaagagagctgggaagctggagccccggctggtgctggaccagctgcgctgcaatggagtgctggagggcatccgcatctgccggcagggcttccccaaccgcatcctcttccaggagttccggcagagatatgagatcctgaccccaaatgccatccccaagggcttcatggatggcaagcaggcctgtgagaagatgatccaggccctggagctggaccccaacctgtacagagtgggccagagcaagatcttcttccgggccggcgtgctggcccagctggaggaggagcgggacctgaaggtgacagacatcatcgtgtccttccaggccgccgcccggggctacctggcccggcgggccttccagaagaggcagcagcagcagagcgccctgcgggtgatgcagaggaactgtgccgcctacctgaagctgcggcactggcagtggtggaggctcttcaccaaggtgaagcccctgctgcaggtgacccggcaggatgaggtgctgcaggcccgggcccaggagctgcagaaggtgcaggagctgcagcagcagagcgcccgggaggtgggggagctgcagggccgggtggcccagctggaggaggagcgggcccggctggccgagcagctgcgggcagaggccgagctgtgtgccgaggccgaggagacccggggccgcctggccgccaggaagcaggagctggagctggtggtgtctgagctggaggcccgggtgggggaggaggaggagtgcagccggcagatgcagacagagaagaagaggctgcagcagcacatccaggagctggaggcccacctggaggccgaggagggcgcccggcagaagctgcagctggagaaggtgaccacagaggccaagatgaagaagtttgaggaggacctgctgctgctggaggaccagaacagcaagctgagcaaggagaggaagctgctggaggaccggctggccgagttcagcagccaggccgctgaggaggaggagaaggtgaagagcctgaacaagctgcggctgaagtatgaggccaccatcgctgacatggaggaccggctgaggaaggaggagaagggccggcaggagctggagaagctgaagaggcggctggatggagagagcagcgagctgcaggagcagatggtggagcagcagcagagagctgaggagctgcgggcccagctgggcaggaaggaggaggagctgcaggccgccctggcccgggcagaagatgaaggaggagcccgggcccagctgctgaagagcctgcgggaggcccaggccgccctggccgaggcccaggaggacctggagagcgagcgggtggcccggaccaaggccgagaagcagaggcgggacctgggggaggagctggaggccctgcggggggagctggaggacaccctggacagcaccaatgcccagcaggagctgcggagcaagcgggagcaggaggtgacagagctgaagaagaccctggaggaggagacccgcatccacgaggccgctgtgcaggagctgcggcagagacatggccaggccctgggggagctggccgagcagctggagcaggcccggcggggcaaaggagcctgggagaagacccggctggccctggaggccgaggtgtctgagctgcgggcagagctgagcagcctgcagacagcccggcaggagggggagcagaggagaagaaggctggagctgcagctgcaggaggtgcagggccgggctggagatggagagcgggcccgggcagaggccgctgagaagctgcagagggcccaggccgagctggagaatgtgtctggggccctgaatgaagctgagagcaagaccatccggctgagcaaggagctgagcagcacagaggcccagctgcatgatgcccaggagctgctgcaggaggagacccgggccaagctggccctgggcagccgggtgcgggccatggaggccgaggccgccggcctgcgggagcagctggaggaggaggccgccgcccgggagcgggccggccgggagctgcagacagcccaggcccagctgtctgagtggaggcggcggcaggaggaggaggccggggccctggaggccggggaggaggccaggagaagagctgcccgggaggccgaggccctgacccagaggctggccgagaagacagagaccgtggaccggctggagcggggcagaagaaggctgcagcaggagctggatgatgccaccatggacctggagcagcagaggcagctggtgtccaccctggagaagaagcagaggaagtttgaccagctgctggccgaggagaaggctgctgtgctgcgggctgtggaggagcgggagcgggcagaggccgagggccgggagcgggaggcccgggccctgagcctgacccgggccctggaggaggagcaggaggcccgggaggagctggagcggcagaacagagccctgcgggcagagctggaggccctgctgagcagcaaggatgatgtgggcaagtctgtgcatgagctggagcgggcctgccgggtggccgagcaggccgccaatgacctgcgggcccaggtgacagagctggaggatgagctgacagctgctgaagatgccaagctgcggctggaggtgacagtgcaggccctgaagacccagcacgagcgggacctgcagggcagagatgaggccggggaggagcggcggcggcagctggccaagcagctgagagatgctgaggtggagagagatgaggagaggaagcagaggaccctggccgtggccgccaggaagaagctggagggggagctggaggagctgaaggcccagatggccagcgctggccagggcaaggaggaggccgtgaagcagctgaggaagatgcaggcccagatgaaggagctgtggagggaggtggaggagaccaggaccagccgggaggagatcttcagccagaaccgggagagcgagaagaggctgaagggcctggaggccgaggtgctgcggctgcaggaggagctggccgccagtgaccgggcccggcggcaggcccagcaggacagagatgagatggctgatgaggtggccaatggaaacctgagcaaggccgccatcctggaggagaagaggcagctggagggccgcctgggccagctggaggaggagctggaggaggagcagagcaacagcgagctgctgaatgaccgctacaggaagctgctgctgcaggtggagagcctgaccacagagctgtctgctgagaggagcttcagcgccaaggccgagagcggccggcagcagctggagcggcagatccaggagctgcggggccgcctgggggaggaggatgctggggcccgggcccggcacaagatgaccatcgccgccctggagagcaagctggcccaggccgaggagcagctggagcaggagacccgggagcgcatcctgagcggcaagctggtgagaagagctgagaagaggctgaaggaggtggtgctgcaggtggaggaggagcggcgggtggccgaccagctgcgggaccagctggagaagggcaacctgcgggtgaagcagctgaagaggcagctggaggaggccgaggaggaggccagccgggcccaggccggcagaagaaggctgcagcgggagctggaggatgtgacagaatctgctgagagcatgaaccgggaggtgaccaccctgaggaaccggctgcggcggggccccctgaccttcaccaccaggacagtgcggcaggtgttccggctggaggagggcgtggccagtgatgaggaggccgaggaggcccagcccggcagcggccccagccctgagcctgagggcagccccccagcccacccccagtag

SEQ ID NO: 160770 - DNA, 5823 bp, synthetic construct
  misc_feature 1..5823: note = Description of Artificial Sequence: Synthetic coding sequence
  source 1..5823: mol_type = other DNA
atgagcagtgacacagagatggaggtgtttggaattgctgcccccttcctgaggaagtctgagaaggagagaattgaggcccagaaccagccctttgatgccaagacctactgctttgtggtggacagcaaggaggagtatgccaagggcaagatcaagagcagccaggacggcaaggtgacagtggagacagaggacaacagaaccctggtggtgaagccagaagatgtgtatgccatgaacccccccaagtttgacagaattgaggacatggccatgctgacccacctgaatgaacctgctgtgctgtacaacctgaaggaccgctacacctcctggatgatctacacctacagcggcctcttctgtgtgacagtgaacccctacaagtggctgcctgtgtacaaccctgaggtggtggagggctaccggggcaagaagaggcaggaggccccaccccacatcttcagcatcagtgacaatgcctaccagttcatgctgacagaccgggagaaccagagcatcctgatcaccggggagagcggggccggcaagacagtgaacaccaagagggtcatccagtactttgccaccatcgccgccaccggggacctggccaagaagaaggacagcaagatgaagggcaccctggaggaccagatcatcagcgccaaccccctgctggaggcctttggaaatgccaagacagtgagaaatgacaacagcagcagatttgggaagttcatccgcatccacttcggcaccaccgggaagctggccagcgctgacatcgagacctacctgctggagaagagccgggtgaccttccagctgaaggccgagaggagctaccacatcttctaccagatcctgagcaacaagaagccagagctgattgagctgctgctgatcaccaccaacccctatgactaccccttcatcagccagggcgagatcctggtggccagcattgatgatgctgaggagctgctggccacagattctgccatcgacatcctgggcttcaccccagaggagaagagcggcctgtacaagctgaccggggctgtgatgcactacggcaacatgaagttcaagcagaagcagcgggaggagcaggccgagccagatggaacagaggtggccgacaagacagcctacctgatgggcctgaacagcagtgacctgctgaaggccctgtgcttcccccgggtgaaggtgggcaatgaatatgtgaccaagggccagacagtggaccaggtgcaccacgctgtgaatgccctgagcaagtctgtgtatgagaagctgttcctgtggatggtgacccgcatcaaccagcagctggacaccaagctgccccggcagcacttcatcggcgtgctggacattgctggctttgagatctttgagtacaacagcctggagcagctgtgcatcaacttcaccaatgagaagctgcagcagttcttcaaccaccacatgtttgtgctggagcaggaggagtacaagaaggagggcatcgagtggaccttcatcgactttggcatggacctggccgcctgcatcgagctgattgagaagcccatgggcatcttcagcatcctggaggaggagtgcatgttccccaaggccacagacaccagcttcaagaacaagctgtatgaccagcacctgggcaagagcaacaacttccagaagcccaaggtggtgaagggccgggcagaggcccacttcagcctcatccactacgccggcaccgtggactacagcgtgtctggctggctggagaagaacaaggaccccctgaatgaaacagtggtgggcctgtaccagaagagcagcaaccggctgctggcccacctgtatgccacctttgccacagcagatgctgacagcggcaagaagaaggtggccaagaagaagggcagcagcttccagacagtgtctgccctcttccgggagaacctgaacaagctgatgagcaacctgcggaccacccacccccactttgtgcgctgcatcatccccaatgagaccaagacccctggggccatggagcacagcctggtgctgcaccagctgcgctgcaatggagtgctggagggcatccgcatctgcaggaagggcttccccaaccgcatcctgtatggagacttcaagcagcgctacagagtgctgaatgccagcgccatccctgagggccagttcatcgacagcaagaaggcctgtgagaagctgctggccagcattgacatcgaccacacccagtacaagtttggccacaccaaggtgttcttcaaggccggcctgctgggcaccctggaggagatgagagatgaccggctggccaagctgatcaccaggacccaggccgtgtgccggggcttcctgatgagggtggagttccagaagatggtgcagaggcgggagagcatcttctgcatccagtacaacatccgctccttcatgaatgtgaagcactggccctggatgaagctgttcttcaagatcaagcccctgctgaagtctgctgagacagagaaggagatggccaccatgaaggaggagttccagaagaccaaggatgagctggccaagtctgaggccaagaggaaggagctggaggagaagctggtgaccctggtgcaggagaagaatgacctgcagctgcaggtgcaggccgagagcgagaacctgctggatgctgaggagcgctgtgaccagctgatcaaggccaagttccagctggaggccaagatcaaggaggtgacagaaagagcagaagatgaggaggagatcaatgctgagctgacagccaagaagaggaagctggaggatgaatgttctgagctgaagaaggacattgatgacctggagctgaccctggccaaggtggagaaggagaagcacgccacagagaacaaggtgaagaacctgacagaggagctgagcggcctggatgagaccatcgccaagctgacccgggagaagaaggccctgcaggaggcccaccagcaggccctggatgacctgcaggccgaggaggacaaggtgaacagcctgaacaagaccaagagcaagctggagcagcaggtggaggacctggagagcagcctggagcaggagaagaagctgcgggtggacctggagaggaacaagaggaagctggagggggacctgaagctggcccaggagagcatcctggacctggagaatgacaagcagcagctggatgagcggctgaagaagaaggactttgagtactgccagctgcagagcaaggtggaggatgagcagaccctgggcctgcagttccagaagaagatcaaggagctgcaggcccgcatcgaggagctggaggaggagattgaagctgagcgggccacccgggccaagacagagaagcagaggagtgactatgcccgggagctggaggagctgtctgagcggctggaggaggccggcggcgtgaccagcacccagatcgagctgaacaagaagcgggaggccgagttcctgaagctgcggcgggacctggaggaggccaccctgcagcacgaggccatggtggccgccctgaggaagaagcacgccgacagcgtggccgagctgggggagcagattgacaacctgcagagggtgaagcagaagctggagaaggagaagtctgagttcaagctggagattgatgacctgagcagctccatggagagcgtgtccaagagcaaggccaacctggagaagatctgcaggaccctggaggaccagctgtctgaggcccggggcaagaatgaggagatccagaggagcctgtctgagctgaccacccagaagagccggctgcagacagaagctggggagctgagccggcagctggaggagaaggagagcatcgtgtcccagctgagccgcagcaagcaggccttcacccagcagacagaggagctgaagaggcagctggaggaggagaacaaggccaagaatgccctggcccacgccctgcagagcagcagacatgactgtgacctgctgcgggagcagtatgaggaggagcaggagggcaaggccgagctgcagagggccctgagcaaggccaacagcgaggtggcccagtggaggaccaagtatgaaacagatgccatccagaggacagaggagctggaggaggccaagaagaagctggcccagaggctgcaggacagcgaggagcaggtggaggccgtgaatgccaagtgtgccagcctggagaagaccaagcagaggctgcagggcgaggtggaggacctgatggtggatgtggagcgggccaacagcctggccgccgccctggacaagaagcagaggaactttgacaaggtgctggccgagtggaagaccaagtgtgaggagagccaggccgagctggaggccagcctgaaggagagccgcagcctgagcacagagctgttcaagctgaagaatgcctatgaggaggccctggaccagctggagaccgtgaagcgggagaacaagaacctggagcaggagattgctgacctgacagagcagattgctgaaaatggcaagaccatccacgagctggagaagagcaggaagcagatcgagctggagaaggctgacatccagctggccctggaggaggccgaggccgccctggagcacgaggaggccaagatcctgcgcatccagctggagctgacccaggtgaagtcagaaattgacaggaagattgctgagaaggatgaggagattgagcagctgaagaggaactaccagaggacagtggagaccatgcagagcgccctggatgctgaggtgcgcagcagaaatgaggccatccggctgaagaagaagatggagggggacctgaatgaaattgagatccagctgagccacgccaaccggcaggccgctgagaccctgaagcacctgcggtctgtgcagggccagctgaaggacacccagctgcacctggatgatgccctgcggggccaggaggacctgaaggagcagctggccatcgtggagcggcgggccaacctgctgcaggccgaggtggaggagctgcgggccaccctggagcagacagagcgggccaggaagctggccgagcaggagctgctggacagcaatgaaagagtgcagctgctgcacacccagaacaccagcctcatccacaccaagaagaagctggagacagacctgatgcagctgcagagcgaggtggaggatgccagcagagatgccagaaatgctgaggagaaggccaagaaggccatcacagatgctgccatgatggccgaggagctgaagaaggagcaggacaccagcgcccacctggagaggatgaagaagaacctggagcagacagtgaaggacctgcagcaccggctggatgaagctgagcagctggccctgaagggcggcaagaagcagatccagaagctggagacccgcatccgggagctggagtttgagctggagggggagcagaagaagaacacagaatctgtgaagggcctgaggaaatatgaaagaagagtgaaggagctgacctaccagagcgaggaggacaggaagaatgtgctgcggctgcaggacctggtggacaagctgcaggtgaaggtgaagagctacaagaggcaggccgaggaggctgatgagcaggccaatgcccacctgaccaagttcaggaaggcccagcacgagctggaggaggccgaggagagagctgacattgctgagagccaggtgaacaagctgcgggccaagacccgggacttcaccagcagcaggatggtggtgcatgagagcgaggagtag

SEQ ID NO: 160771 - DNA, 3132 bp, synthetic construct
  misc_feature 1..3132: note = Description of Artificial Sequence: Synthetic coding sequence
  source 1..3132: mol_type = other DNA
atgcccctgctggagggctctgtgggcgtggaggacctggtgctgctggagcccctggtggaggagagcctgctgaagaacctgcagctgcgctatgagaacaaggagatctacacctacatcggaaatgtggtgatctctgtgaacccctaccagcagctgcccatctacggccctgagttcatcgccaagtaccaggactacaccttctatgagctgaagccccacatctatgccctggccaacgtggcctaccagagcctgcgggaccgggaccgggaccagtgcatcctgatcaccggggagagcggcagcggcaagacagaggccagcaagctggtgatgtcctatgtggccgctgtgtgtgggaagggggagcaggtgaacagcgtgaaggagcagctgctgcagagcaaccctgtgctggaggcctttggaaatgccaagaccatccggaacaacaacagcagcagatttgggaagtacatggacattgaatttgacttcaagggcagccccctgggcggcgtcatcaccaactacctgctggagaagagccggctggtgaagcagctgaagggggagaggaacttccacatcttctaccagctgctggccggggctgatgagcagctgctgaaggccctgaagctggagcgggacaccaccggctacgcctacctgaaccacgaggtgtcccgggtggatggcatggatgatgccagcagcttccgggctgtgcagagcgccatggccgtcatcggcttcagcgaggaggagatccggcaggtgctggaggtgacctccatggtgctgaagctgggcaatgtgctggtggctgatgagttccaggccagcggcatcccagccagcggcatcagagatggccggggcgtgcgggagatcggggagatggtgggcctgaacagcgaggaggtggagcgggccctgtgcagcaggaccatggagacagccaaggagaaggtggtgacagccctgaatgtgatgcaggcccagtatgccagagatgccctggccaagaacatctacagccggctgtttgactggatcgtgaaccgcatcaatgaaagcatcaaggtgggcattggagagaagaagaaggtgatgggcgtgctggacatctacggctttgagatcctggaggacaacagctttgagcagtttgtgatcaactactgcaatgagaagctgcagcaggtgttcatcgagatgaccctgaaggaggagcaggaggagtacaagcgggagggcatcccctggaccaaggtggactactttgacaatggcatcatctgcaagctgattgagcacaaccagaggggcatcctggccatgctggatgaggagtgcctgcggcctggggtggtgtctgacagcaccttcctggccaagctgaaccagctgttcagcaagcacggccactatgagagcaaggtgacccagaatgcccagaggcagtatgaccacaccatgggcctgagctgcttccgcatctgccactacgccggcaaggtgacctacaacgtgaccagcttcatcgacaagaacaatgacctgctcttccgggacctgctgcaggccatgtggaaggcccagcaccccctgctgcggagcctcttccctgagggcaaccccaagcaggccagcctgaagaggcctcccacagctggggcccagttcaagagctctgtggccatcctgatgaagaacctgtacagcaagagccccaactacatccgctgcatcaagcccaatgagcaccagcagaggggccagttcagcagtgacctggtggccacccaggcccgctacctgggcctgctggagaatgtgcgggtgagaagagctggctacgcccaccggcagggctacggccccttcctggagcgctaccgcctgctgagccgcagcacctggccccactggaatggaggagaccgggagggcgtggagaaggtgctgggggagctgtccatgagcagcggggagctggccttcggcaagaccaagatcttcatccgcagccccaagaccctcttctacctggaggagcagaggcggctgcggctgcagcagctggccaccctcatccagaagatctaccggggctggcgctgcaggacccactaccagctgatgaggaagagccagatcctgatcagctcctggttccggggcaacatgcagaagaagtgctacggcaagatcaaggcctctgtgctgctgatccaggcctttgtgcggggctggaaggccaggaagaactacaggaagtacttccgctctgaggccgccctgaccctggccgacttcatctacaagtccatggtgcagaagttcctgctgggcctgaagaacaacctgcccagcaccaacgtgctggacaagacctggccagctgccccctacaagtgcctgagcacagccaaccaggagctgcagcagctgttctaccagtggaagtgcaagcgcttccgggaccagctgagccccaagcaggtggagatcctgcgggagaagctgtgtgccagcgagctgttcaagggcaagaaggccagctacccccagagcgtgcccatccccttctgtggggactacatcggcctgcagggcaaccccaagctgcagaagctgaagggcggggaggagggccctgtgctgatggccgaggccgtgaagaaggtgaacagaggaaatggcaagaccagcagccgcatcctgctgctgaccaagggccacgtgatcctgacagacaccaagaagagccaggccaagatcgtgattggcctggacaacgtggccggcgtgtctgtgaccagcctgaaggatggcctcttcagcctgcacctgtctgagatgagctctgtgggcagcaagggggacttcctgctggtgtctgaacatgtgattgagctgctgaccaagatgtacagagctgtgctggatgccacccagaggcagctgactgtgacagtgacagagaagttctctgtgcgcttcaaggaaaattctgtggccgtgaaggtggtgcagggccctgctggaggagacaacagcaagctgcgctacaagaagaagggcagccactgcctggaggtgacagtgcagtag

SEQ ID NO: 160772 - DNA, 291 bp, synthetic construct
  misc_feature 1..291: note = Description of Artificial Sequence: Synthetic coding sequence
  source 1..291: mol_type = other DNA
atgcccctgctggagggctctgtgggcgtggaggacctggtgctgctggagcccctggtggaggagagcctgctgaagaacctgcagctgcgctatgagaacaaggagatctacacctacatcggaaatgtggtgatctctgtgaacccctaccagcagctgcccatctacggccctgagttcatcgccaagtaccaggactacaccttctatgagctgaagccccacatctatgccctggccaacgtggcctaccagagcctgcgggaccgggaccgggaccagtgctag

SEQ ID NO: 160773 - DNA, 3132 bp, synthetic construct; identical to SEQ ID NO: 160771
  misc_feature 1..3132: note = Description of Artificial Sequence: Synthetic coding sequence
  source 1..3132: mol_type = other DNA

SEQ ID NO: 160774 - DNA, 2646 bp, synthetic construct
  misc_feature 1..2646: note = Description of Artificial Sequence: Synthetic coding sequence
  source 1..2646: mol_type = other DNA
atggacattgaatttgacttcaagggcagccccctgggcggcgtcatcaccaactacctgctggagaagagccggctggtgaagcagctgaagggggagaggaacttccacatcttctaccagctgctggccggggctgatgagcagctgctgaaggccctgaagctggagcgggacaccaccggctacgcctacctgaaccacgaggtgtcccgggtggatggcatggatgatgccagcagcttccgggctgtgcagagcgccatggccgtcatcggcttcagcgaggaggagatccggcaggtgctggaggtgacctccatggtgctgaagctgggcaatgtgctggtggctgatgagttccaggccagcggcatcccagccagcggcatcagagatggccggggcgtgcgggagatcggggagatggtgggcctgaacagcgaggaggtggagcgggccctgtgcagcaggaccatggagacagccaaggagaaggtggtgacagccctgaatgtgatgcaggcccagtatgccagagatgccctggccaagaacatctacagccggctgtttgactggatcgtgaaccgcatcaatgaaagcatcaaggtgggcattggagagaagaagaaggtgatgggcgtgctggacatctacggctttgagatcctggaggacaacagctttgagcagtttgtgatcaactactgcaatgagaagctgcagcaggtgttcatcgagatgaccctgaaggaggagcaggaggagtacaagcgggagggcatcccctggaccaaggtggactactttgacaatggcatcatctgcaagctgattgagcacaaccagaggggcatcctggccatgctggatgaggagtgcctgcggcctggggtggtgtctgacagcaccttcctggccaagctgaaccagctgttcagcaagcacggccactatgagagcaaggtgacccagaatgcccagaggcagtatgaccacaccatgggcctgagctgcttccgcatctgccactacgccggcaaggtgacctacaacgtgaccagcttcatcgacaagaacaatgacctgctcttccgggacctgctgcaggccatgtggaaggcccagcaccccctgctgcggagcctcttccctgagggcaaccccaagcaggccagcctgaagaggcctcccacagctggggcccagttcaagagctctgtggccatcctgatgaagaacctgtacagcaagagccccaactacatccgctgcatcaagcccaatgagcaccagcagaggggccagttcagcagtgacctggtggccacccaggcccgctacctgggcctgctggagaatgtgcgggtgagaagagctggctacgcccaccggcagggctacggccccttcctggagcgctaccgcctgctgagccgcagcacctggccccactggaatggaggagaccgggagggcgtggagaaggtgctgggggagctgtccatgagcagcggggagctggccttcggcaagaccaagatcttcatccgcagccccaagaccctcttctacctggaggagcagaggcggctgcggctgcagcagctggccaccctcatccagaagatctaccggggctggcgctgcaggacccactaccagctgatgaggaagagccagatcctgatcagctcctggttccggggcaacatgcagaagaagtgctacggcaagatcaaggcctctgtgctgctgatccaggcctttgtgcggggctggaaggccaggaagaactacaggaagtacttccgctctgaggccgccctgaccctggccgacttcatctacaagtccatggtgcagaagttcctgctgggcctgaagaacaacctgcccagcaccaacgtgctggacaagacctggccagctgccccctacaagtgcctgagcacagccaaccaggagctgcagcagctgttctaccagtggaagtgcaagcgcttccgggaccagctgagccccaagcaggtggagatcctgcgggagaagctgtgtgccagcgagctgttcaagggcaagaaggccagctacccccagagcgtgcccatccccttctgtggggactacatcggcctgcagggcaaccccaagctgcagaagctgaagggcggggaggagggccctgtgctgatggccgaggccgtgaagaaggtgaacagaggaaatggcaagaccagcagccgcatcctgctgctgaccaagggccacgtgatcctgacagacaccaagaagagccaggccaagatcgtgattggcctggacaacgtggccggcgtgtctgtgaccagcctgaaggatggcctcttcagcctgcacctgtctgagatgagctctgtgggcagcaagggggacttcctgctggtgtctgaacatgtgattgagctgctgaccaagatgtacagagctgtgctggatgccacccagaggcagctgactgtgacagtgacagagaagttctctgtgcgcttcaaggaaaattctgtggccgtgaaggtggtgcagggccctgctggaggagacaacagcaagctgcgctacaagaagaagggcagccactgcctggaggtgacagtgcagtag

SEQ ID NO: 160775 - DNA, 3411 bp, synthetic construct
  misc_feature 1..3411: note = Description of Artificial Sequence: Synthetic coding sequence
  source 1..3411: mol_type = other DNA
atggccaagatggaggtgaagaccagcctgctggacaacatgattggagtgggggacatggtgctgctggagcccctgaatgaggagaccttcatcaacaacctgaagaagagatttgaccacagcgagatctacacctacatcggctctgtggtgatctctgtgaacccctaccgcagcctgcccatctacagccctgagaaggtggaggagtacagaaacagaaacttctatgagctgagcccccacatctttgccctgagtgatgaggcctaccgcagcctgcgggaccaggacaaggaccagtgcatcctgatcactggagagagcggggccggcaagacagaggccagcaagctggtgatgtcctatgtggccgctgtgtgtgggaaaggagctgaggtgaaccaggtgaaggagcagctgctgcagagcaaccctgtgctggaggcctttggaaatgccaagacagtgagaaatgacaacagcagcagatttgggaagtacatggacatcgagtttgacttcaagggggaccccctgggcggcgtcatcagcaactacctgctggagaagagccgggtggtgaagcagcccagaggagagaggaacttccacgtgttctaccagctgctgagcggggccagcgaggagctgctgaacaagctgaagctggagcgggacttcagccgctacaactacctgagcctggacagcgccaaggtgaatggagtggatgatgctgccaacttcagaacagtgagaaatgccatgcagatcgtgggcttcatggaccacgaggccgagagcgtgctggccgtggtggccgctgtgctgaagctgggcaacatcgagttcaagccagagagccgggtgaatggcctggatgagagcaagatcaaggacaagaatgagctgaaggagatctgtgagctgactggaattgaccagagcgtgctggagcgggccttctccttcagaacagtggaggccaagcaggagaaggtgtccaccaccctgaatgtggcccaggcctactatgccagagatgccctggccaagaacctgtacagccgcctcttctcctggctggtgaaccgcatcaatgaaagcatcaaggcccagaccaaggtgaggaagaaggtgatgggcgtgctggacatctacggctttgagatctttgaggacaacagctttgagcagttcatcatcaactactgcaatgagaagctgcagcagatcttcatcgagctgaccctgaaggaggagcaggaggagtacatccgggaggacatcgagtggacccacatcgactacttcaacaatgccatcatctgtgacctgattgagaacaacaccaacggcatcctggccatgctggatgaagaatgtctgcggcccggcaccgtgacagatgagaccttcctggagaagctgaaccaggtgtgtgccacccaccagcactttgagagcaggatgagcaagtgcagccgcttcctgaatgacaccagcctgccccacagctgcttccgcatccagcactacgccggcaaggtgctgtaccaggtggagggctttgtggacaagaacaatgacctgctgtacagagacctgagccaggccatgtggaaggccagccacgccctgatcaagagcctcttccctgagggcaacccagccaagatcaacctgaagaggcctcccacagctggcagccagttcaaggcctctgtggccaccctgatgaagaacctgcagaccaagaaccccaactacatccgctgcatcaagcccaatgacaagaaggccgcccacatcttcaatgaggccctggtgtgccaccagatccgctacctgggcctgctggagaatgtgcgggtgcggcgggccggctacgccttccggcaggcctatgagccctgcctggagcgctacaagatgctgtgcaagcagacctggccccactggaagggccctgcccggtctggagtggaggtgctcttcaatgagctggagatccctgtggaggagtacagctttggccgcagcaagatcttcatccggaaccccaggaccctcttcaagctggaggacctgaggaagcagaggctggaggacctggccaccctcatccagaagatctaccggggctggaagtgcaggacccacttcctgctgatgaagaagagccagatcgtgattgctgcctggtacagaagatatgcccagcagaagcgctaccagcagaccaagagcagcgccctggtgatccagagctacatccggggctggaaggccaggaagatcctgcgggagctgaagcaccagaagcgctgcaaggaggccgtgaccaccatcgccgcctactggcacggcacccaggcccggcgggagctgcggcggctgaaggaggaggccaggaacaagcacgccatcgctgtgatctgggcctactggctgggcagcaaggcccggcgggagctgaagaggctgaaggaggaggcccggaggaagcatgctgtggccgtcatctgggcctactggctgggcctgaaggtgcggcgggagtacaggaagttcttccgggccaatgccggcaagaagatctatgagttcaccctgcagagaattgtgcagaagtacttcctggagatgaagaacaagatgcccagcctgagccccatcgacaagaactggcccagccggccctacctgttcctggacagcacccacaaggagctgaagaggatcttccacctgtggcgctgcaagaagtacagagaccagttcacagaccagcagaagctgatctatgaggagaagctggaggccagcgagctgttcaaggacaagaaggccctgtaccccagctctgtgggccagcccttccagggcgcctacctggagatcaacaagaaccccaagtacaagaagctgaaggatgccatcgaggagaagatcatcatcgccgaggtggtgaacaagatcaacagagccaacgggaagagcaccagccgcatcttcctgctgaccaacaacaacctgctgctggccgaccagaagagcggccagatcaagtctgaggtgcccctggtggatgtgaccaaggtgtccatgagcagccagaatgatggcttctttgctgtgcacctgaaggagggcagcgaggccgccagcaagggggacttcctgttcagcagtgaccacctgattgagatggccaccaagctgtaccgcaccaccctgagccagaccaagcagaagctgaacatcgagatcagtgatgagttcctggtgcagttccggcaggacaaggtgtgtgtgaagttcatccagggcaaccagaagaatggatctgtgcccacctgcaagaggaagaacaaccggctgctggaggtggccgtgccctag

SEQ ID NO: 160776 - DNA, 3237 bp, synthetic construct
  misc_feature 1..3237: note = Description of Artificial Sequence: Synthetic coding sequence
  source 1..3237: mol_type = other DNA
atggccaagatggaggtgaagaccagcctgctggacaacatgattggagtgggggacatggtgctgctggagcccctgaatgaggagaccttcatcaacaacctgaagaagagatttgaccacagcgagatctacacctacatcggctctgtggtgatctctgtgaacccctaccgcagcctgcccatctacagccctgagaaggtggaggagtacagaaacagaaacttctatgagctgagcccccacatctttgccctgagtgatgaggcctaccgcagcctgcgggaccaggacaaggaccagtgcatcctgatcactggagagagcggggccggcaagacagaggccagcaagctggtgatgtcctatgtggccgctgtgtgtgggaaaggagctgaggtgaaccaggtgaaggagcagctgctgcagagcaaccctgtgctggaggcctttggaaatgccaagacagtgagaaatgacaacagcagcagatttgggaagtacatggacatcgagtttgacttcaagggggaccccctgggcggcgtcatcagcaactacctgctggagaagagccgggtggtgaagcagcccagaggagagaggaacttccacgtgttctaccagctgctgagcggggccagcgaggagctgctgaacaagctgaagctggagcgggacttcagccgctacaactacctgagcctggacagcgccaaggtgaatggagtggatgatgctgccaacttcagaacagtgagaaatgccatgcagatcgtgggcttcatggaccacgaggccgagagcgtgctggccgtggtggccgctgtgctgaagctgggcaacatcgagttcaagccagagagccgggtgaatggcctggatgagagcaagatcaaggacaagaatgagctgaaggagatctgtgagctgactggaattgaccagagcgtgctggagcgggccttctccttcagaacagtggaggccaagcaggagaaggtgtccaccaccctgaatgtggcccaggcctactatgccagagatgccctggccaagaacctgtacagccgcctcttctcctggctggtgaaccgcatcaatgaaagcatcaaggcccagaccaaggtgaggaagaaggtgatgggcgtgctggacatctacggctttgagatctttgaggacaacagctttgagcagttcatcatcaactactgcaatgagaagctgcagcagatcttcatcgagctgaccctgaaggaggagcaggaggagtacatccgggaggacatcgagtggacccacatcgactacttcaacaatgccatcatctgtgacctgattgagaacaacaccaacggcatcctggccatgctggatgaagaatgtctgcggcccggcaccgtgacagatgagaccttcctggagaagctgaaccaggtgtgtgccacccaccagcactttgagagcaggatgagcaagtgcagccgcttcctgaatgacaccagcctgccccacagctgcttccgcatccagcactacgccggcaaggtgctgtaccaggtggagggctttgtggacaagaacaatgacctgctgtacagagacctgagccaggccatgtggaaggccagccacgccctgatcaagagcctcttccctgagggcaacccagccaagatcaacctgaagaggcctcccacagctggcagccagttcaaggcctctgtggccaccctgatgaagaacctgcagaccaagaaccccaactacatccgctgcatcaagcccaatgacaagaaggccgcccacatcttcaatgaggccctggtgtgccaccagatccgctacctgggcctgctggagaatgtgcgggtgcggcgggccggctacgccttccggcaggcctatgagccctgcctggagcgctacaagatgctgtgcaagcagacctggccccactggaagggccctgcccggtctggagtggaggtgctcttcaatgagctggagatccctgtggaggagtacagctttggccgcagcaagatcttcatccggaaccccaggaccctcttcaagctggaggacctgaggaagcagaggctggaggacctggccaccctcatccagaagatctaccggggctggaagtgcaggacccacttcctgctgatgaagaagagccagatcgtgattgctgcctggtacagaagatatgcccagcagaagcgctaccagcagaccaagagcagcgccctggtgatccagagctacatccggggctggaaggccaggaagatcctgcgggagctgaagcaccagaagcgctgcaaggaggccgtgaccaccatcgccgcctactggcacggcacccaggtgcggcgggagtacaggaagttcttccgggccaatgccggcaagaagatctatgagttcaccctgcagagaattgtgcagaagtacttcctggagatgaagaacaagatgcccagcctgagccccatcgacaagaactggcccagccggccctacctgttcctggacagcacccacaaggagctgaagaggatcttccacctgtggcgctgcaagaagtacagagaccagttcacagaccagcagaagctgatctatgaggagaagctggaggccagcgagctgttcaaggacaagaaggccctgtaccccagctctgtgggccagcccttccagggcgcctacctggagatcaacaagaaccccaagtacaagaagctgaaggatgccatcgaggagaagatcatcatcgccgaggtggtgaacaagatcaacagagccaacgggaagagcaccagccgcatcttcctgctgaccaacaacaacctgctgctggccgaccagaagagcggccagatcaagtctgaggtgcccctggtggatgtgaccaaggtgtccatgagcagccagaatgatggcttctttgctgtgcacctgaaggagggcagcgaggccgccagcaagggggacttcctgttcagcagtgaccacctgattgagatggccaccaagctgtaccgcaccaccctgagccagaccaagcagaagctgaacatcgagatcagtgatgagttcctggtgcagttccggcaggacaaggtgtgtgtgaagttcatccagggcaaccagaagaatggatctgtgcccacctgcaagaggaagaacaaccggctgctggaggtggccgtgccctag

SEQ ID NO: 160777 - DNA, 3324 bp, synthetic construct
  misc_feature 1..3324: note = Description of Artificial Sequence: Synthetic coding sequence
  source 1..3324: mol_type = other DNA
atggccaagatggaggtgaagaccagcctgctggacaacatgattggagtgggggacatggtgctgctggagcccctgaatgaggagaccttcatcaacaacctgaagaagagatttgaccacagcgagatctacacctacatcggctctgtggtgatctctgtgaacccctaccgcagcctgcccatctacagccctgagaaggtggaggagtacagaaacagaaacttctatgagctgagcccccacatctttgccctgagtgatgaggcctaccgcagcctgcgggaccaggacaaggaccagtgcatcctgatcactggagagagcggggccggcaagacagaggccagcaagctggtgatgtcctatgtggccgctgtgtgtgggaaaggagctgaggtgaaccaggtgaaggagcagctgctgcagagcaaccctgtgctggaggcctttggaaatgccaagacagtgagaaatgacaacagcagcagatttgggaagtacatggacatcgagtttgacttcaagggggaccccctgggcggcgtcatcagcaactacctgctggagaagagccgggtggtgaagcagcccagaggagagaggaacttccacgtgttctaccagctgctgagcggggccagcgaggagctgctgaacaagctgaagctggagcgggacttcagccgctacaactacctgagcctggacagcgccaaggtgaatggagtggatgatgctgccaacttcagaacagtgagaaatgccatgcagatcgtgggcttcatggaccacgaggccgagagcgtgctggccgtggtggccgctgtgctgaagctgggcaacatcgagttcaagccagagagccgggtgaatggcctggatgagagcaagatcaaggacaagaatgagctgaaggagatctgtgagctgactggaattgaccagagcgtgctggagcgggccttctccttcagaacagtggaggccaagcaggagaaggtgtccaccaccctgaatgtggcccaggcctactatgccagagatgccctggccaagaacctgtacagccgcctcttctcctggctggtgaaccgcatcaatgaaagcatcaaggcccagaccaaggtgaggaagaaggtgatgggcgtgctggacatctacggctttgagatctttgaggacaacagctttgagcagttcatcatcaactactgcaatgagaagctgcagcagatcttcatcgagctgaccctgaaggaggagcaggaggagtacatccgggaggacatcgagtggacccacatcgactacttcaacaatgccatcatctgtgacctgattgagaacaacaccaacggcatcctggccatgctggatgaagaatgtctgcggcccggcaccgtgacagatgagaccttcctggagaagctgaaccaggtgtgtgccacccaccagcactttgagagcaggatgagcaagtgcagccgcttcctgaatgacaccagcctgccccacagctgcttccgcatccagcactacgccggcaaggtgctgtaccaggtggagggctttgtggacaagaacaatgacctgctgtacagagacctgagccaggccatgtggaaggccagccacgccctgatcaagagcctcttccctgagggcaacccagccaagatcaacctgaagaggcctcccacagctggcagccagttcaaggcctctgtggccaccctgatgaagaacctgcagaccaagaaccccaactacatccgctgcatcaagcccaatgacaagaaggccgcccacatcttcaatgaggccctggtgtgccaccagatccgctacctgggcctgctggagaatgtgcgggtgcggcgggccggctacgccttccggcaggcctatgagccctgcctggagcgctacaagatgctgtgcaagcagacctggccccactggaagggccctgcccggtctggagtggaggtgctcttcaatgagctggagatccctgtggaggagtacagctttggccgcagcaagatcttcatccggaaccccaggaccctcttcaagctggaggacctgaggaagcagaggctggaggacctggccaccctcatccagaagatctaccggggctggaagtgcaggacccacttcctgctgatgaagaagagccagatcgtgattgctgcctggtacagaagatatgcccagcagaagcgctaccagcagaccaagagcagcgccctggtgatccagagctacatccggggctggaaggccaggaagatcctgcgggagctgaagcaccagaagcgctgcaaggaggccgtgaccaccatcgccgcctactggcacggcacccaggcccggcgggagctgaagaggctgaaggaggaggcccggaggaagcatgctgtggccgtcatctgggcctactggctgggcctgaaggtgagaagagagtacaggaagttcttccgggccaatgctgggaagaagatctatgagttcaccctgcagagaattgtgcagaagtacttcctggagatgaagaacaagatgcccagcctgagccccatcgacaagaactggcccagccggccctacctgttcctggacagcacccacaaggagctgaagaggatcttccacctgtggcgctgcaagaagtacagagaccagttcacagaccagcagaagctgatctatgaggagaagctggaggccagcgagctgttcaaggacaagaaggccctgtaccccagctctgtgggccagcccttccagggcgcctacctggagatcaacaagaaccccaagtacaagaagctgaaggatgccatcgaggagaagatcatcatcgccgaggtggtgaacaagatcaacagagccaacgggaagagcaccagccgcatcttcctgctgaccaacaacaacctgctgctggccgaccagaagagcggccagatcaagtctgaggtgcccctggtggatgtgaccaaggtgtccatgagcagccagaatgatggcttctttgctgtgcacctgaaggagggcagcgaggccgccagcaaaggagacttcctgttcagcagtgaccacctgattgagatggccaccaagctgtaccgcaccaccctgagccagaccaagcagaagctgaacatcgagatcagtgatgagttcctggtgcagttccggcaggacaaggtgtgtgtgaagttcatccagggcaaccagaagaatggatctgtgcccacctgcaagaggaagaacaaccggctgctggaggtggccgtgccctag

SEQ ID NO: 160778 - DNA, 3411 bp, synthetic construct; identical to SEQ ID NO: 160775
  misc_feature 1..3411: note = Description of Artificial Sequence: Synthetic coding sequence
  source 1..3411: mol_type = other DNA

SEQ ID NO: 160779 - DNA, 492 bp, synthetic construct
  misc_feature 1..492: note = Description of Artificial Sequence: Synthetic coding sequence
  source 1..492: mol_type = other DNA
atggccaagatggaggtgaagaccagcctgctggacaacatgattggagtgggggacatggtgctgctggagcccctgaatgaggagaccttcatcaacaacctgaagaagagatttgaccacagcgagatctacacctacatcggctctgtggtgatctctgtgaacccctaccgcagcctgcccatctacagccctgagaaggtggaggagtacagaaacagaaacttctatgagctgagcccccacatctttgccctgagtgatgaggcctaccgcagcctgcgggaccaggacaaggaccagtgcatcctgatcactggagagagcggggccggcaagacagaggccagcaagctggtgatgtcctatgtggccgctgtgtgtgggaaaggagctgaggtgaaccaggtgaaggagcagctgctgcagagcaaccctgtgctggaggcctttggaaatgccaagacagtgagaaatgacaacagctag

SEQ ID NO: 160780 - DNA, 252 bp, synthetic construct
  misc_feature 1..252: note = Description of Artificial Sequence: Synthetic coding sequence
  source 1..252: mol_type = other DNA
atggccaagatggaggtgaagaccagcctgctggacaacatgattggagtgggggacatggtgctgctggagcccctgaatgaggagaccttcatcaacaacctgaagaagagatttgaccacagcgagatctacacctacatcggctctgtggtgatctctgtgaacccctaccgcagcctgcccatctacagccctgagaaggtggaggagtacagaaacagaaacttctatgagctgagcccccactag

SEQ ID NO: 160781 - DNA, 450 bp, synthetic construct
  misc_feature 1..450: note = Description of Artificial Sequence: Synthetic coding sequence
  source 1..450: mol_type = other DNA
atggccaagatggaggtgaagaccagcctgctggacaacatgattggagtgggggacatggtgctgctggagcccctgaatgaggagaccttcatcaacaacctgaagaagagatttgaccacagcgagatctacacctacatcggctctgtggtgatctctgtgaacccctaccgcagcctgcccatctacagccctgagaaggtggaggagtacagaaacagaaacttctatgagctgagcccccacatctttgccctgagtgatgaggcctaccgcagcctgcgggaccaggacaaggaccagtgcatcctgatcactggagagagcggggccggcaagacagaggccagcaagctggtgatgtcctatgtggccgctgtgtgtgggaaaggagctgaggtgaaccaggtgaaggagcagctgctgcagagcaaccctgtgctgtag

SEQ ID NO: 160782 - DNA, 1146 bp, synthetic construct
  misc_feature 1..1146: note = Description of Artificial Sequence: Synthetic coding sequence
  source 1..1146: mol_type = other DNA
atgaagaagagccagatcgtgattgctgcctggtacagaagatatgcccagcagaagcgctaccagcagaccaagagcagcgccctggtgatccagagctacatccggggctggaaggccaggaagatcctgcgggagctgaagcaccagaagcgctgcaaggaggccgtgaccaccatcgccgcctactggcacggcacccaggcccggcgggagctgaagaggctgaaggaggaggcccggaggaagcatgctgtggccgtcatctgggcctactggctgggcctgaaggtgagaagagagtacaggaagttcttccgggccaatgctgggaagaagatctatgagttcaccctgcagagaattgtgcagaagtacttcctggagatgaagaacaagatgcccagcctgagccccatcgacaagaactggcccagccggccctacctgttcctggacagcacccacaaggagctgaagaggatcttccacctgtggcgctgcaagaagtacagagaccagttcacagaccagcagaagctgatctatgaggagaagctggaggccagcgagctgttcaaggacaagaaggccctgtaccccagctctgtgggccagcccttccagggcgcctacctggagatcaacaagaaccccaagtacaagaagctgaaggatgccatcgaggagaagatcatcatcgccgaggtggtgaacaagatcaacagagccaacgggaagagcaccagccgcatcttcctgctgaccaacaacaacctgctgctggccgaccagaagagcggccagatcaagtctgaggtgcccctggtggatgtgaccaaggtgtccatgagcagccagaatgatggcttctttgctgtgcacctgaaggagggcagcgaggccgccagcaaaggagacttcctgttcagcagtgaccacctgattgagatggccaccaagctgtaccgcaccaccctgagccagaccaagcagaagctgaacatcgagatcagtgatgagttcctggtgcagttccggcaggacaaggtgtgtgtgaagttcatccagggcaaccagaagaatggatctgtgcccacctgcaagaggaagaacaaccggctgctggaggtggccgtgccctag

SEQ ID NO: 160783 - DNA, 924 bp, synthetic construct
  misc_feature 1..924: note = Description of Artificial Sequence: Synthetic coding sequence
  source 1..924: mol_type = other DNA
atggccaagatggaggtgaagaccagcctgctggacaacatgattggagtgggggacatggtgctgctggagcccctgaatgaggagaccttcatcaacaacctgaagaagagatttgaccacagcgagatctacacctacatcggctctgtggtgatctctgtgaacccctaccgcagcctgcccatctacagccctgagaaggtggaggagtacagaaacagaaacttctatgagctgagcccccacatctttgccctgagtgatgaggcctaccgcagcctgcgggaccaggacaaggaccagtgcatcctgatcactggagagagcggggccggcaagacagaggccagcaagctggtgatgtcctatgtggccgctgtgtgtgggaaaggagctgaggtgaaccaggtgaaggagcagctgctgcagagcaaccctgtgctggaggcctttggaaatgccaagacagtgagaaatgacaacagcagcagatttgggaagtacatggacatcgagtttgacttcaagggggaccccctgggcggcgtcatcagcaactacctgctggagaagagccgggtggtgaagcagcccagaggagagaggaacttccacgtgttctaccagctgctgagcggggccagcgaggagctgctgaacaagctgaagctggagcgggacttcagccgctacaactacctgagcctggacagcgccaaggtgaatggagtggatgatgctgccaacttcagaacagtgagaaatgccatgcagatcgtgggcttcatggaccacgaggccgagagcgtgctggccgtggtggccgctgtgctgaagctgggcaacatcgagttcaagccagagagccgggtgaatggcctggatgagagcaagatcaaggacaagaatgaaagcaagtag

SEQ ID NO: 160784 - DNA, 912 bp, synthetic construct
  misc_feature 1..912: note = Description of Artificial Sequence: Synthetic coding sequence
  source 1..912: mol_type = other DNA
atggccaagatggaggtgaagaccagcctgctggacaacatgattggagtgggggacatggtgctgctggagcccctgaatgaggagaccttcatcaacaacctgaagaagagatttgaccacagcgagatctacacctacatcggctctgtggtgatctctgtgaacccctaccgcagcctgcccatctacagccctgagaaggtggaggagtacagaaacagaaacttctatgagctgagcccccacatctttgccctgagtgatgaggcctaccgcagcctgcgggaccaggacaaggaccagtgcatcctgatcactggagagagcggggccggcaagacagaggccagcaagctggtgatgtcctatgtggccgctgtgtgtgggaaaggagctgaggtgaaccaggtgaaggagcagctgctgcagagcaaccctgtgctggaggcctttggaaatgccaagacagtgagaaatgacaacagcagcagatttgggaagtacatggacatcgagtttgacttcaagggggaccccctgggcggcgtcatcagcaactacctgctggagaagagccgggtggtgaagcagcccagaggagagaggaacttccacgtgttctaccagctgctgagcggggccagcgaggagctgctgaacaagctgaagctggagcgggacttcagccgctacaactacctgagcctggacagcgccaaggtgaatggagtggatgatgctgccaacttcagaacagtgagaaatgccatgcagatcgtgggcttcatggaccacgaggccgagagcgtgctggccgtggtggccgctgtgctgaagctgggcaacatcgagttcaagccagagagccgggtgaatggcctggatgagagcaagatcaaggacaagtag

SEQ ID NO: 160785 - DNA, 3192 bp, synthetic construct
  misc_feature 1..3192: note = Description of Artificial Sequence: Synthetic coding sequence
  source 1..3192: mol_type = other DNA
atggccctgcaggtggagctggtgcccaccggggagatcatccgggtggtgcacccccaccggccctgcaagctggccctgggcagtgatggagtgcgggtgaccatggagagcgccctgacagcccgggacagagtgggcgtgcaggactttgtgctgctggagaacttcaccagcgaggccgccttcatcgagaacctgcggcggcgcttcagagaaaatctcatctacacctacatcggccctgtgctggtgtctgtgaacccctacagagacctgcagatctacagccggcagcacatggagcgctaccggggcgtgtccttctatgaggtgcccccccacctgtttgctgtggccgacacagtgtaccgggccctgaggacagaaagaagagaccaggccgtgatgatctctggagagagcggggccggcaagacagaggccaccaagaggctgctgcagttctacgccgagacctgcccagcccctgagcggggcggcgctgtgcgggaccggctgctgcagagcaaccctgtgctggaggcctttggaaatgccaagaccctgagaaatgacaacagcagcagatttgggaagtacatggatgtgcagtttgacttcaagggggcccctgtgggcggccacatcctgagctacctgctggagaagagccgggtggtgcaccagaaccacggggagaggaacttccacatcttctaccagctgctggagggcggggaggaggagaccctgcggcggctgggcctggagaggaacccccagagctacctgtacctggtgaagggccagtgtgccaaggtgagcagcatcaatgacaagagtgactggaaggtggtgaggaaggccctgaccgtcatcgacttcacagaagatgaggtggaggacctgctgagcatcgtggcctctgtgctgcacctgggcaacatccactttgctgccaatgaggagagcaatgcccaggtgaccacagagaaccagctgaagtacctgacccggctgctgtctgtggagggcagcaccctgcgggaggccctgacccacaggaagatcatcgccaagggggaggagctgctgagccccctgaacctggagcaggccgcctatgccagagatgccctggccaaggctgtgtacagcaggaccttcacctggctggtgggcaagatcaacagaagcctggccagcaaggatgtggagagccccagctggaggagcaccaccgtgctgggcctgctggacatctacggctttgaggtgttccagcacaacagctttgagcagttctgcatcaactactgcaatgagaagctgcagcagctgttcatcgagctgaccctgaagtctgagcaggaggagtatgaagctgagggcatcgcctgggagcctgtgcagtacttcaacaacaagatcatctgtgacctggtggaggagaagttcaagggcatcatcagcatcctggatgaagaatgtctgcggcctggagaggccacagacctgaccttcctggagaagctggaggacacagtgaagcaccacccccacttcctgacccacaagctggccgaccagaggaccaggaagagcctgggccgcggggagttccggctgctgcactacgccggggaggtgacctacagcgtgacaggcttcctggacaagaacaatgacctgctcttcaggaacctgaaggagaccatgtgcagcagcaagaaccccatcatgagccagtgctttgacagaagtgagctgagtgacaagaagaggcctgagaccgtggccacccagttcaagatgagcctgctgcagctggtggagatcctgcagagcaaggagcccgcctacgtgcgctgcatcaagcccaatgatgccaagcagcccggccgctttgatgaggtgctgatccgccaccaggtgaagtacctgggcctgctggagaacctgcgggtgcggcgggccggctttgcctacagaagaaaatatgaggccttcctgcagcgctacaagagcctgtgcccagagacctggcccacctgggccggccggccccaggatggagtggccgtgctggtgcgccacctgggctacaagccagaggagtacaagatgggccgcaccaagatcttcatccgcttccccaagaccctgtttgccacagaagatgccctggaggtgcggcggcagagcctggccaccaagatccaggccgcctggaggggcttccactggaggcagaagttcctgcgggtgaagaggtctgccatctgcatccagagctggtggaggggcaccctgggccgcaggaaggccgccaagaggaagtgggccgcccagaccatccggcggctcatccggggctttgtgctgcggcatgccccccgctgcccagaaaatgccttcttcctggaccacgtgaggaccagcttcctgctgaacctgcggcggcagctgccccagaatgtgctggacacctcctggcccaccccacctccagccctgcgggaggccagcgagctgctgcgggagctgtgcatcaagaacatggtgtggaagtactgccgcagcatcagccctgagtggaagcagcagctgcagcagaaggctgtggccagcgagatcttcaagggcaagaaggacaactacccccagagcgtgcccaggctcttcatcagcacccggctgggcacagatgagatcagcccccgggtgctgcaggccctgggcagcgagcccatccagtatgctgtgcctgtggtgaagtatgacaggaagggctacaagcccaggagccggcagctgctgctgaccccaaatgctgtggtgattgtggaggatgccaaggtgaagcagagaattgattatgccaacctgaccggcatctctgtgagcagcctgagtgacagcctgtttgtgctgcacgtgcagagagctgacaacaagcagaagggagatgtggtgctgcagagcgaccacgtgattgagaccctgaccaagacagccctgagcgccaacagagtgaacagcatcaacatcaaccagggcagcatcacctttgctgggggccctggaagagatggcaccatcgacttcaccccaggcagcgagctgctgatcaccaaggccaagaatggccacctggccgtggtggccccccggctgaacagcaggtag

SEQ ID NO: 160786 - DNA, 3087 bp, synthetic construct
  misc_feature 1..3087: note = Description of Artificial Sequence: Synthetic coding sequence
  source 1..3087: mol_type = other DNA
atggagagcgccctgacagcccgggacagagtgggcgtgcaggactttgtgctgctggagaacttcaccagcgaggccgccttcatcgagaacctgcggcggcgcttccgggagaacctgatctacacctacatcggccctgtgctggtgtctgtgaacccctacagagacctgcagatctacagccggcagcacatggagcgctacagaggagtgtccttctatgaggtgcccccccacctgtttgctgtggccgacacagtgtaccgggccctgaggacagagcggcgggaccaggccgtgatgatcagcggggagagcggggccggcaagacagaggccaccaagaggctgctgcagttctatgcagagacctgcccagcccctgagcggggcggcgctgtgcgggaccggctgctgcagagcaaccctgtgctggaggcctttggaaatgccaagaccctgagaaatgacaacagcagcagatttgggaagtacatggatgtgcagtttgacttcaagggggcccctgtgggcggccacatcctgagctacctgctggagaagagccgggtggtgcaccagaaccacggggagaggaacttccacatcttctaccagctgctggagggcggggaggaggagaccctgcggcggctgggcctggagaggaacccccagagctacctgtacctggtgaagggccagtgtgccaaggtgagcagcatcaatgacaagagtgactggaaggtggtgaggaaggccctgactgtgattgacttcacagaagatgaggtggaggacctgctgagcatcgtggcctctgtgctgcacctgggcaacatccactttgctgccaatgaggagagcaatgcccaggtgaccacagagaaccagctgaagtacctgacccggctgctgtctgtggagggcagcaccctgcgggaggccctgacccacaggaagatcatcgccaagggggaggagctgctgagccccctgaacctggagcaggccgcctatgccagagatgccctggccaaggctgtgtacagcaggaccttcacctggctggtgggcaagatcaacagaagcctggccagcaaggatgtggagagccccagctggaggagcaccaccgtgctgggcctgctggacatctacggctttgaggtgttccagcacaacagctttgagcagttctgcatcaactactgcaatgagaagctgcagcagctgttcatcgagctgaccctgaagtctgagcaggaggagtatgaggccgagggcatcgcctgggagcctgtgcagtacttcaacaacaagatcatctgtgacctggtggaggagaagttcaagggcatcatcagcatcctggatgaggagtgcctgcggcctggagaggccacagacctgaccttcctggagaagctggaggacacagtgaagcaccacccccacttcctgacccacaagctggccgaccagaggaccaggaagagcctgggccgcggggagttccggctgctgcactacgccggggaggtgacctacagcgtgacaggcttcctggacaagaacaatgacctgctcttcaggaacctgaaggagaccatgtgcagcagcaagaaccccatcatgagccagtgctttgacagaagtgagctgagtgacaagaagaggcctgagaccgtggccacccagttcaagatgagcctgctgcagctggtggagatcctgcagagcaaggagcccgcctacgtgcgctgcatcaagcccaatgatgccaagcagcccggccgctttgatgaggtgctgatccgccaccaggtgaagtacctgggcctgctggagaacctgcgggtgagaagagctggctttgcctacagaagaaaatatgaggccttcctgcagcgctacaagagcctgtgcccagagacctggcccacctgggccggccggccccaggatggagtggccgtgctggtgcgccacctgggctacaagccagaggagtacaagatgggccgcaccaagatcttcatccgcttccccaagaccctgtttgccacagaagatgccctggaggtgcggcggcagagcctggccaccaagatccaggccgcctggaggggcttccactggaggcagaagttcctgcgggtgaagaggtctgccatctgcatccagagctggtggaggggcaccctgggccgcaggaaggccgccaagaggaagtgggccgcccagaccatcagaagactcatccggggctttgtgctgcggcatgccccccgctgcccagaaaatgccttcttcctggaccacgtgaggaccagcttcctgctgaacctgcggcggcagctgccccagaatgtgctggacacctcctggcccaccccacctccagccctgcgggaggccagcgagctgctgcgggagctgtgcatcaagaacatggtgtggaagtactgccgcagcatcagccctgagtggaagcagcagctgcagcagaaggctgtggccagcgagatcttcaagggcaagaaggacaactacccccagagcgtgcccaggctcttcatcagcacccggctgggcacagatgagatcagcccccgggtgctgcaggccctgggcagcgagcccatccagtatgctgtgcctgtggtgaagtatgacaggaagggctacaagcccaggagccggcagctgctgctgaccccaaatgctgtggtgattgtggaggatgccaaggtgaagcagagaattgattatgccaacctgaccggcatctctgtgagcagcctgagtgacagcctgtttgtgctgcacgtgcagagagctgacaacaagcagaagggagatgtggtgctgcagagcgaccacgtgattgagaccctgaccaagacagccctgagcgccaacagagtgaacagcatcaacatcaaccagggcagcatcacctttgctgggggccctggaagagatggcaccatcgacttcaccccaggcagcgagctgctgatcaccaaggccaagaatggccacctggccgtggtggccccccggctgaacagcaggtag

SEQ ID NO: 160787 - DNA, 3135 bp, synthetic construct
  misc_feature 1..3135: note = Description of Artificial Sequence: Synthetic coding sequence
  source 1..3135: mol_type = other DNA
atgagataccgggccagcgccctgggcagtgatggagtgcgggtgaccatggagagcgccctgacagcccgggacagagtgggcgtgcaggactttgtgctgctggagaacttcaccagcgaggccgccttcatcgagaacctgcggcggcgcttccgggagaacctgatctacacctacatcggccctgtgctggtgtctgtgaacccctacagagacctgcagatctacagccggcagcacatggagcgctacagaggagtgtccttctatgaggtgcccccccacctgtttgctgtggccgacacagtgtaccgggccctgaggacagagcggcgggaccaggccgtgatgatcagcggggagagcggggccggcaagacagaggccaccaagaggctgctgcagttctatgcagagacctgcccagcccctgagcggggcggcgctgtgcgggaccggctgctgcagagcaaccctgtgctggaggcctttggaaatgccaagaccctgagaaatgacaacagcagcagatttgggaagtacatggatgtgcagtttgacttcaagggggcccctgtgggcggccacatcctgagctacctgctggagaagagccgggtggtgcaccagaaccacggggagaggaacttccacatcttctaccagctgctggagggcggggaggaggagaccctgcggcggctgggcctggagaggaacccccagagctacctgtacctggtgaagggccagtgtgccaaggtgagcagcatcaatgacaagagtgactggaaggtggtgaggaaggccctgactgtgattgacttcacagaagatgaggtggaggacctgctgagcatcgtggcctctgtgctgcacctgggcaacatccactttgctgccaatgaggagagcaatgcccaggtgaccacagagaaccagctgaagtacctgacccggctgctgtctgtggagggcagcaccctgcgggaggccctgacccacaggaagatcatcgccaagggggaggagctgctgagccccctgaacctggagcaggccgcctatgccagagatgccctggccaaggctgtgtacagcaggaccttcacctggctggtgggcaagatcaacagaagcctggccagcaaggatgtggagagccccagctggaggagcaccaccgtgctgggcctgctggacatctacggctttgaggtgttccagcacaacagctttgagcagttctgcatcaactactgcaatgagaagctgcagcagctgttcatcgagctgaccctgaagtctgagcaggaggagtatgaggccgagggcatcgcctgggagcctgtgcagtacttcaacaacaagatcatctgtgacctggtggaggagaagttcaagggcatcatcagcatcctggatgaggagtgcctgcggcctggagaggccacagacctgaccttcctggagaagctggaggacacagtgaagcaccacccccacttcctgacccacaagctggccgaccagaggaccaggaagagcctgggccgcggggagttccggctgctgcactacgccggggaggtgacctacagcgtgacaggcttcctggacaagaacaatgacctgctcttcaggaacctgaaggagaccatgtgcagcagcaagaaccccatcatgagccagtgctttgacagaagtgagctgagtgacaagaagaggcctgagaccgtggccacccagttcaagatgagcctgctgcagctggtggagatcctgcagagcaaggagcccgcctacgtgcgctgcatcaagcccaatgatgccaagcagcccggccgctttgatgaggtgctgatccgccaccaggtgaagtacctgggcctgctggagaacctgcgggtgagaagagctggctttgcctacagaagaaaatatgaggccttcctgcagcgctacaagagcctgtgcccagagacctggcccacctgggccggccggccccaggatggagtggccgtgctggtgcgccacctgggctacaagccagaggagtacaagatgggccgcaccaagatcttcatccgcttccccaagaccctgtttgccacagaagatgccctggaggtgcggcggcagagcctggccaccaagatccaggccgcctggaggggcttccactggaggcagaagttcctgcgggtgaagaggtctgccatctgcatccagagctggtggaggggcaccctgggccgcaggaaggccgccaagaggaagtgggccgcccagaccatcagaagactcatccggggctttgtgctgcggcatgccccccgctgcccagaaaatgccttcttcctggaccacgtgaggaccagcttcctgctgaacctgcggcggcagctgccccagaatgtgctggacacctcctggcccaccccacctccagccctgcgggaggccagcgagctgctgcgggagctgtgcatcaagaacatggtgtggaagtactgccgcagcatcagccctgagtggaagcagcagctgcagcagaaggctgtggccagcgagatcttcaagggcaagaaggacaactacccccagagcgtgcccaggctcttcatcagcacccggctgggcacagatgagatcagcccccgggtgctgcaggccctgggcagcgagcccatccagtatgctgtgcctgtggtgaagtatgacaggaagggctacaagcccaggagccggcagctgctgctgaccccaaatgctgtggtgattgtggaggatgccaaggtgaagcagagaattgattatgccaacctgaccggcatctctgtgagcagcctgagtgacagcctgtttgtgctgcacgtgcagagagctgacaacaagcagaagggagatgtggtgctgcagagcgaccacgtgattgagaccctgaccaagacagccctgagcgccaacagagtgaacagcatcaacatcaaccagggcagcatcacctttgctgggggccctggaagagatggcaccatcgacttcaccccaggcagcgagctgctgatcaccaaggccaagaatggccacctggccgtggtggccccccggctgaacagcaggtag

SEQ ID NO: 160788 - DNA, 2418 bp, synthetic construct
  misc_feature 1..2418: note = Description of Artificial Sequence: Synthetic coding sequence
  source 1..2418: mol_type = other DNA
atggagagcgccctgacagcccgggacagagtgggcgtgcaggactttgtgctgctggagaacttcaccagcgaggccgccttcatcgagaacctgcggcggcgcttccgggagaacctgatctacacctacatcggccctgtgctggtgtctgtgaacccctacagagacctgcagatctacagccggcagcacatggagcgctacagaggagtgtccttctatgaggtgcccccccacctgtttgctgtggccgacacagtgtaccgggccctgaggacagagcggcgggaccaggccgtgatgatcagcggggagagcggggccggcaagacagaggccaccaagaggctgctgcagttctatgcagagacctgcccagcccctgagcggggcggcgctgtgcgggaccggctgctgcagagcaaccctgtgctggaggcctttggaaatgccaagaccctgagaaatgacaacagcagcagatttgggaagtacatggatgtgcagtttgacttcaagggggcccctgtgggcggccacatcctgagctacctgctggagaagagccgggtggtgcaccagaaccacggggagaggaacttccacatcttctaccagctgctggagggcggggaggaggagaccctgcggcggctgggcctggagaggaacccccagagctacctgtacctggtgaagggccagtgtgccaaggtgagcagcatcaatgacaagagtgactggaaggtggtgaggaaggccctgactgtgattgacttcacagaagatgaggtggaggacctgctgagcatcgtggcctctgtgctgcacctgggcaacatccactttgctgccaatgaggagagcaatgcccaggtgaccacagagaaccagctgaagtacctgacccggctgctgtctgtggagggcagcaccctgcgggaggccctgacccacaggaagatcatcgccaagggggaggagctgctgagccccctgaacctggagcaggccgcctatgccagagatgccctggccaaggctgtgtacagcaggaccttcacctggctggtgggcaagatcaacagaagcctggccagcaaggatgtggagagccccagctggaggagcaccaccgtgctgggcctgctggacatctacggctttgaggtgttccagcacaacagctttgagcagttctgcatcaactactgcaatgagaagctgcagcagctgttcatcgagctgaccctgaagtctgagcaggaggagtatgaggccgagggcatcgcctgggagcctgtgcagtacttcaacaacaagatcatctgtgacctggtggaggagaagttcaagggcatcatcagcatcctggatgaggagtgcctgcggcctggagaggccacagacctgaccttcctggagaagctggaggacacagtgaagcaccacccccacttcctgacccacaagctggccgaccagaggaccaggaagagcctgggccgcggggagttccggctgctgcactacgccggggaggtgacctacagcgtgacaggcttcctggacaagaacaatgacctgctcttcaggaacctgaaggagaccatgtgcagcagcaagaaccccatcatgagccagtgctttgacagaagtgagctgagtgacaagaagaggcctgagaccgtggccacccagttcaagatgagcctgctgcagctggtggagatcctgcagagcaaggagcccgcctacgtgcgctgcatcaagcccaatgatgccaagcagcccggccgctttgatgaggtgctgatccgccaccaggtgaagtacctgggcctgctggagaacctgcgggtgagaagagctggctttgcctacagaagaaaatatgaggccttcctgcagcgctacaagagcctgtgcccagagacctggcccacctgggccggccggccccaggatggagtggccgtgctggtgcgccacctgggctacaagccagaggagtacaagatgggccgcaccaagatcttcatccgcttccccaagaccctgtttgccacagaagatgccctggaggtgcggcggcagagcctggccaccaagatccaggccgcctggaggggcttccactggaggcagaagttcctgcgggtgaagaggtctgccatctgcatccagagctggtggaggggcaccctgggccgcaggaaggccgccaaggaggtgggcggcacagaccaccctgctgcccacccccggctgcggcctgccccccggccccccctgccccgggagcggctgctgcccggcccctgtgcccacctgttctttgccaagccagaggccgccgccgccccagaatgtcctggccacctggtggcccacgcccccacctgcccagcctag

SEQ ID NO: 160789 - DNA, 3135 bp, synthetic construct
  misc_feature 1..3135: note = Description of Artificial Sequence: Synthetic coding sequence
  source 1..3135: mol_type = other DNA
atgaggggccgggccagcgccctgggcagtgatggagtgcgggtgaccatggagagcgccctgacagcccgggacagagtgggcgtgcaggactttgtgctgctggagaacttcaccagcgaggccgccttcatcgagaacctgcggcggcgcttccgggagaacctgatctacacctacatcggccctgtgctggtgtctgtgaacccctacagagacctgcagatctacagccggcagcacatggagcgctacagaggagtgtccttctatgaggtgcccccccacctgtttgctgtggccgacacagtgtaccgggccctgaggacagagcggcgggaccaggccgtgatgatcagcggggagagcggggccggcaagacagaggccaccaagaggctgctgcagttctatgcagagacctgcccagcccctgagcggggcggcgctgtgcgggaccggctgctgcagagcaaccctgtgctggaggcctttggaaatgccaagaccctgagaaatgacaacagcagcagatttgggaagtacatggatgtgcagtttgacttcaagggggcccctgtgggcggccacatcctgagctacctgctggagaagagccgggtggtgcaccagaaccacggggagaggaacttccacatcttctaccagctgctggagggcggggaggaggagaccctgcggcggctgggcctggagaggaacccccagagctacctgtacctggtgaagggccagtgtgccaaggtgagcagcatcaatgacaagagtgactggaaggtggtgaggaaggccctgactgtgattgacttcacagaagatgaggtggaggacctgctgagcatcgtggcctctgtgctgcacctgggcaacatccactttgctgccaatgaggagagcaatgcccaggtgaccacagagaaccagctgaagtacctgacccggctgctgtctgtggagggcagcaccctgcgggaggccctgacccacaggaagatcatcgccaagggggaggagctgctgagccccctgaacctggagcaggccgcctatgccagagatgccctggccaaggctgtgtacagcaggaccttcacctggctggtgggcaagatcaacagaagcctggccagcaaggatgtggagagccccagctggaggagcaccaccgtgctgggcctgctggacatctacggctttgaggtgttccagcacaacagctttgagcagttctgcatcaactactgcaatgagaagctgcagcagctgttcatcgagctgaccctgaagtctgagcaggaggagtatgaggccgagggcatcgcctgggagcctgtgcagtacttcaacaacaagatcatctgtgacctggtggaggagaagttcaagggcatcatcagcatcctggatgaggagtgcctgcggcctggagaggccacagacctgaccttcctggagaagctggaggacacagtgaagcaccacccccacttcctgacccacaagctggccgaccagaggaccaggaagagcctgggccgcggggagttccggctgctgcactacgccggggaggtgacctacagcgtgacaggcttcctggacaagaacaatgacctgctcttcaggaacctgaaggagaccatgtgcagcagcaagaaccccatcatgagccagtgctttgacagaagtgagctgagtgacaagaagaggcctgagaccgtggccacccagttcaagatgagcctgctgcagctggtggagatcctgcagagcaaggagcccgcctacgtgcgctgcatcaagcccaatgatgccaagcagcccggccgctttgatgaggtgctgatccgccaccaggtgaagtacctgggcctgctggagaacctgcgggtgagaagagctggctttgcctacagaagaaaatatgaggccttcctgcagcgctacaagagcctgtgcccagagacctggcccacctgggccggccggccccaggatggagtggccgtgctggtgcgccacctgggctacaagccagaggagtacaagatgggccgcaccaagatcttcatccgcttccccaagaccctgtttgccacagaagatgccctggaggtgcggcggcagagcctggccaccaagatccaggccgcctggaggggcttccactggaggcagaagttcctgcgggtgaagaggtctgccatctgcatccagagctggtggaggggcaccctgggccgcaggaaggccgccaagaggaagtgggccgcccagaccatcagaagactcatccggggctttgtgctgcggcatgccccccgctgcccagaaaatgccttcttcctggaccacgtgaggaccagcttcctgctgaacctgcggcggcagctgccccagaatgtgctggacacctcctggcccaccccacctccagccctgcgggaggccagcgagctgctgcgggagctgtgcatcaagaacatggtgtggaagtactgccgcagcatcagccctgagtggaagcagcagctgcagcagaaggctgtggccagcgagatcttcaagggcaagaaggacaactacccccagagcgtgcccaggctcttcatcagcacccggctgggcacagatgagatcagcccccgggtgctgcaggccctgggcagcgagcccatccagtatgctgtgcctgtggtgaagtatgacaggaagggctacaagcccaggagccggcagctgctgctgaccccaaatgctgtggtgattgtggaggatgccaaggtgaagcagagaattgattatgccaacctgaccggcatctctgtgagcagcctgagtgacagcctgtttgtgctgcacgtgcagagagctgacaacaagcagaagggagatgtggtgctgcagagcgaccacgtgattgagaccctgaccaagacagccctgagcgccaacagagtgaacagcatcaacatcaaccagggcagcatcacctttgctgggggccctggaagagatggcaccatcgacttcaccccaggcagcgagctgctgatcaccaaggccaagaatggccacctggccgtggtggccccccggctgaacagcaggtag

SEQ ID NO: 160790 - DNA, 3120 bp, synthetic construct
  misc_feature 1..3120: note = Description of Artificial Sequence: Synthetic coding sequence
  source 1..3120: mol_type = other DNA
atggccctgggcagtgatggagtgcgggtgaccatggagagcgccctgacagcccgggacagagtgggcgtgcaggactttgtgctgctggagaacttcaccagcgaggccgccttcatcgagaacctgcggcggcgcttcagagaaaatctcatctacacctacatcggccctgtgctggtgtctgtgaacccctacagagacctgcagatctacagccggcagcacatggagcgctaccggggcgtgtccttctatgaggtgcccccccacctgtttgctgtggccgacacagtgtaccgggccctgaggacagaaagaagagaccaggccgtgatgatctctggagagagcggggccggcaagacagaggccaccaagaggctgctgcagttctacgccgagacctgcccagcccctgagcggggcggcgctgtgcgggaccggctgctgcagagcaaccctgtgctggaggcctttggaaatgccaagaccctgagaaatgacaacagcagcagatttgggaagtacatggatgtgcagtttgacttcaagggggcccctgtgggcggccacatcctgagctacctgctggagaagagccgggtggtgcaccagaaccacggggagaggaacttccacatcttctaccagctgctggagggcggggaggaggagaccctgcggcggctgggcctggagaggaacccccagagctacctgtacctggtgaagggccagtgtgccaaggtgagcagcatcaatgacaagagtgactggaaggtggtgaggaaggccctgaccgtcatcgacttcacagaagatgaggtggaggacctgctgagcatcgtggcctctgtgctgcacctgggcaacatccactttgctgccaatgaggagagcaatgcccaggtgaccacagagaaccagctgaagtacctgacccggctgctgtctgtggagggcagcaccctgcgggaggccctgacccacaggaagatcatcgccaagggggaggagctgctgagccccctgaacctggagcaggccgcctatgccagagatgccctggccaaggctgtgtacagcaggaccttcacctggctggtgggcaagatcaacagaagcctggccagcaaggatgtggagagccccagctggaggagcaccaccgtgctgggcctgctggacatctacggctttgaggtgttccagcacaacagctttgagcagttctgcatcaactactgcaatgagaagctgcagcagctgttcatcgagctgaccctgaagtctgagcaggaggagtatgaagctgagggcatcgcctgggagcctgtgcagtacttcaacaacaagatcatctgtgacctggtggaggagaagttcaagggcatcatcagcatcctggatgaagaatgtctgcggcctggagaggccacagacctgaccttcctggagaagctggaggacacagtgaagcaccacccccacttcctgacccacaagctggccgaccagaggaccaggaagagcctgggccgcggggagttccggctgctgcactacgccggggaggtgacctacagcgtgacaggcttcctggacaagaacaatgacctgctcttcaggaacctgaaggagaccatgtgcagcagcaagaaccccatcatgagccagtgctttgacagaagtgagctgagtgacaagaagaggcctgagaccgtggccacccagttcaagatgagcctgctgcagctggtggagatcctgcagagcaaggagcccgcctacgtgcgctgcatcaagcccaatgatgccaagcagcccggccgctttgatgaggtgctgatccgccaccaggtgaagtacctgggcctgctggagaacctgcgggtgcggcgggccggctttgcctacagaagaaaatatgaggccttcctgcagcgctacaagagcctgtgcccagagacctggcccacctgggccggccggccccaggatggagtggccgtgctggtgcgccacctgggctacaagccagaggagtacaagatgggccgcaccaagatcttcatccgcttccccaagaccctgtttgccacagaagatgccctggaggtgcggcggcagagcctggccaccaagatccaggccgcctggaggggcttccactggaggcagaagttcctgcgggtgaagaggtctgccatctgcatccagagctggtggaggggcaccctgggccgcaggaaggccgccaagaggaagtgggccgcccagaccatccggcggctcatccggggctttgtgctgcggcatgccccccgctgcccagaaaatgccttcttcctggaccacgtgaggaccagcttcctgctgaacctgcggcggcagctgccccagaatgtgctggacacctcctggcccaccccacctccagccctgcgggaggccagcgagctgctgcgggagctgtgcatcaagaacatggtgtggaagtactgccgcagcatcagccctgagtggaagcagcagctgcagcagaaggctgtggccagcgagatcttcaagggcaagaaggacaactacccccagagcgtgcccaggctcttcatcagcacccggctgggcacagatgagatcagcccccgggtgctgcaggccctgggcagcgagcccatccagtatgctgtgcctgtggtgaagtatgacaggaagggctacaagcccaggagccggcagctgctgctgaccccaaatgctgtggtgattgtggaggatgccaaggtgaagcagagaattgattatgccaacctgaccggcatctctgtgagcagcctgagtgacagcctgtttgtgctgcacgtgcagagagctgacaacaagcagaagggagatgtggtgctgcagagcgaccacgtgattgagaccctgaccaagacagccctgagcgccaacagagtgaacagcatcaacatcaaccagggcagcatcacctttgctgggggccctggaagagatggcaccatcgacttcaccccaggcagcgagctgctgatcaccaaggccaagaatggccacctggccgtggtggccccccggctgaacagcaggtag

SEQ ID NO: 160791 - DNA, 3021 bp, synthetic construct
  misc_feature 1..3021: note = Description of Artificial Sequence: Synthetic coding sequence
  source 1..3021: mol_type = other DNA
atggccgagcaggagagcctggagtttgggaaggctgactttgtgctgatggacacagtgtccatgcctgagttcatggccaacctgcggctgcgctttgagaagggccgcatctacaccttcatcggggaggtggtggtgtctgtgaacccctacaagctgctgaacatctacggccgggacaccatcgagcagtacaagggccgggagctgtatgaaagaccaccccacctgtttgccatcgcagatgctgcctacaaggccatgaagagaagaagcaaggacacctgcatcgtcatctctggagagagcggggccggcaagacagaggccagcaagtacatcatgcagtacatcgccgccatcaccaaccccagccagagagctgaggtggagcgggtgaagaacatgctgctgaagagcaactgtgtgctggaggcctttggaaatgccaagaccaacagaaatgacaacagcagcagatttgggaagtacatggacatcaactttgacttcaagggggaccccatcggcggccacatcaacaactacctgctggagaagagcagggtcatcgtgcagcagcccggggagaggagcttccacagcttctaccagctgctgcagggcggcagcgagcagatgctgcggagcctgcacctgcagaagagcctgagcagctacaactacatccacgtgggcgcccagctgaagagcagcatcaatgatgctgctgagttccgggtggtggctgatgccatgaaggtgattggcttcaagccagaggagatccagacagtgtacaagatcctggccgccatcctgcacctgggcaacctgaagtttgtggtggatggagacacccccctgattgaaaatggcaaggtggtgtccatcatcgccgagctgctgagcaccaagacagacatggtggagaaggccctgctgtacagaacagtggccaccggccgggacatcatcgacaagcagcacacagagcaggaggccagctatggaagagatgcctttgccaaggccatctatgaaagactcttctgctggatcgtgacccgcatcaatgacatcatcgaggtgaagaactatgacaccaccatccacggcaagaacacagtgattggagtgctggacatctacggctttgagatctttgacaacaacagctttgagcagttctgcatcaactactgcaatgagaagctgcagcagctgttcatccagctggtgctgaagcaggagcaggaggagtaccagcgggagggcatcccctggaagcacatcgactacttcaacaaccagatcatcgtggacctggtggagcagcagcacaagggcatcatcgccatcctggatgatgcctgcatgaatgtgggcaaggtgacagatgagatgttcctggaggccctgaacagcaagctgggcaagcacgcccacttcagcagcaggaagctgtgtgccagtgacaagatcctggagtttgaccgggacttccgcatccgccactatgctggagatgtggtgtacagcgtgattggcttcatcgacaagaacaaggacaccctcttccaggacttcaagaggctgatgtacaacagcagcaaccctgtgctgaagaacatgtggccagagggcaagctgagcatcacagaggtgaccaagaggcccctgacagctgccaccctcttcaagaacagcatgattgccctggtggacaacctggccagcaaggagccctactacgtgcgctgcatcaagcccaatgacaagaagagcccccagatctttgatgatgagcgctgccgccaccaggtggagtacctgggcctgctggagaatgtgcgggtgcggcgggccggctttgccttccggcagacctatgagaagttcctgcaccgctacaagatgatcagcgagttcacctggcccaaccacgacctgcccagcgacaaggaggccgtgaagaagctgattgagcgctgtggcttccaggatgatgtggcctacggcaagaccaagatcttcatccgcacccccaggaccctcttcaccctggaggagctgcgggcccagatgctgatcagaattgtgctcttcctgcagaaggtgtggaggggcaccctggccaggatgagatacaagaggaccaaggccgccctgaccatcatccgctactaccgccgctacaaggtgaagagctacatccacgaggtggcccggcgcttccacggcgtgaagaccatgagggactatggcaagcacgtgaagtggcccagcccccccaaggtgctgcggagatttgaggaggccctgcagaccatcttcaaccgctggagggccagccagctgatcaagagcatcccagccagtgacctgccccaggtgcgggccaaggtggccgctgtggagatgctgaagggccagagagctgacctgggcctgcagagggcctgggagggcaactacctggccagcaagccagacaccccccagaccagcggcacctttgtgcctgtggccaatgagctgaagaggaaggacaagtacatgaatgtgctcttcagctgccacgtgaggaaggtgaaccgcttcagcaaggtggaggaccgggccatctttgtgacagacagacacctgtacaagatggaccccaccaagcagtacaaggtgatgaagaccatccccctgtacaacctgaccggcctgtctgtgtccaatggcaaggaccagctggtggtgttccacaccaaggacaacaaggacctgattgtgtgcctcttcagcaagcagcccacccatgagagccgcatcggggagctggtgggcgtgctggtgaaccacttcaagtctgagaagaggcacctgcaggtgaatgtgaccaaccctgtgcagtgcagcctgcacggcaagaagtgcaccgtgtctgtggagacccggctgaaccagccccagcctgacttcaccaagaacagaagtggcttcatcctgtctgtgcccggcaactag

SEQ ID NO: 160792 - DNA, 597 bp, synthetic construct
  misc_feature 1..597: note = Description of Artificial Sequence: Synthetic coding sequence
  source 1..597: mol_type = other DNA
atgctgaagggccagagagctgacctgggcctgcagagggcctgggagggcaactacctggccagcaagccagacaccccccagaccagcggcacctttgtgcctgtggccaatgagctgaagaggaaggacaagtacatgaatgtgctcttcagctgccacgtgaggaaggtgaaccgcttcagcaaggtggaggaccgggccatctttgtgacagacagacacctgtacaagatggaccccaccaagcagtacaaggtgatgaagaccatccccctgtacaacctgaccggcctgtctgtgtccaatggcaaggaccagctggtggtgttccacaccaaggacaacaaggacctgattgtgtgcctcttcagcaagcagcccacccatgagagccgcatcggggagctggtgggcgtgctggtgaaccacttcaagtctgagaagaggcacctgcaggtgaatgtgaccaaccctgtgcagtgcagcctgcacggcaagaagtgcaccgtgtctgtggagacccggctgaaccagccccagcctgacttcaccaagaacagaagtggcttcatcctgtctgtgcccggcaactag

SEQ ID NO: 160793 - DNA, 3327 bp, synthetic construct
  misc_feature 1..3327: note = Description of Artificial Sequence: Synthetic coding sequence
  source 1..3327: mol_type = other DNA
atgggcagcaagggcgtgtaccagtaccactggcagagccacaacgtgaagcacagcggcgtggatgacatggtgctgctgagcaagatcacagagaacagcatcgtggagaacctgaagaagcgctacatggatgactacatcttcacctacatcggctctgtgctgatctctgtgaaccccttcaagcagatgccctactttggagagaaggagattgagatgtaccagggcgccgcccagtatgaaaatccaccccacatctatgccctggccgacaacatgtacagaaacatgatcatcgaccgggagaaccagtgtgtgatcatctctggagagagcggggccggcaagacagtggccgccaagtacatcatgagctacatcagccgggtgtctgggggcggcaccaaggtgcagcacgtgaaggacatcatcctgcagagcaaccccctgctggaggcctttggaaatgccaagacagtgaggaacaacaacagcagcagatttgggaagtactttgagatccagttcagccctggaggagagccagatggcggcaagatcagcaacttcctgctggagaagagccgggtggtgatgaggaaccctggagagaggagcttccacatcttctaccagctgattgagggcgccagcgctgagcagaagcacagcctgggcatcacctccatggactactactactacctgagcctgagcggcagctacaaggtggatgacattgatgaccggcgggagttccaggagaccctgcacgccatgaatgtgattggcatctttgctgaggagcagaccctggtgctgcagatcgtggccggcatcctgcacctgggcaacatctccttcaaggaggtgggcaactatgctgctgtggagagcgaggagttcctggccttccctgcctacctgctgggcatcaaccaggaccggctgaaggagaagctgaccagccggcagatggacagcaagtggggcggcaagtctgagagcatccacgtgaccctgaatgtggagcaggcctgctacaccagagatgccctggccaaggccctgcacgcccgggtgtttgacttcctggtggacagcatcaacaaggccatggagaaggaccacgaggagtacaacatcggcgtgctggacatctacggctttgagatcttccagaagaatggatttgagcagttctgcatcaactttgtgaatgagaagctgcagcagatcttcatcgagctgaccctgaaggccgagcaggaggagtatgtgcaggagggcatccgctggacccccatcgagtacttcaacaacaagatcgtgtgtgacctgattgagaacaaggtgaaccccccaggcatcatgagcatcctggatgatgtgtgtgccaccatgcatgctgtgggggagggcgctgaccagaccctgctgcagaagctgcagatgcagatcggcagccatgagcacttcaacagctggaaccagggcttcatcatccaccactacgccggcaaggtgtcctatgacatggatggcttctgtgaaagaaacagagatgtgctcttcatggacctgattgagctgatgcagagcagcgagctgcccttcatcaagagcctcttccctgagaacctgcaggccgacaagaagggccggcccaccacagctggcagcaagatcaagaagcaggccaatgacctggtgtccaccctgatgaagtgcaccccccactacatccgctgcatcaagcccaatgagaccaagaagccccgggactgggaggagagccgggtgaagcaccaggtggagtacctgggcctgaaggagaacatccgggtgagaagagctggctacgcctaccgccgcatcttccagaagttcctgcagagatatgccatcctgaccaaggccacctggcccagctggcagggcgaggagaagcagggcgtgctgcacctgctgcagagcgtgaacatggacagcgaccagttccagctgggccgcagcaaggtgttcatcaaggcccctgagagcctcttcctgctggaggagatgagggagaggaaatatgatggctacgcccgggtcatccagaagtcctggaggaagtttgtggccaggaagaagtatgtgcagatgagggaggaggccagtgacctgctgctgaacaagaaggagaggagaagaaacagcatcaacagaaacttcatcggggactacatcggcatggaggagcaccctgagctgcagcagtttgtgggcaagcgggagaagattgactttgctgacacagtgaccaagtatgaccggcgcttcaagggcgtgaagagggacctgctgctgacccccaagtgcctgtacctgattggccgggagaaggtgaagcagggccctgacaagggcctggtgaaggaggtgctgaagaggaagattgaaattgaaagaatcctgtctgtgtccctgagcaccatgcaggatgacatcttcatcctgcacgagcaggagtatgacagcctgctggagagcgtcttcaagacagagttcctgagcctgctggccaagagatatgaggagaagacccagaagcagctgcccctgaagttcagcaacaccctggagctgaagctgaagaaggagaactggggcccctggagcgctgggggcagccggcaggtgcagttccaccagggctttggagacctggccgtgctgaagcccagcaacaaggtgctgcaggtgtccatcggccctggcctgcccaagaacagccggcccaccaggaggaacaccacccagaacacaggctacagcagcggcacccagaatgccaactaccctgtgcgggccgcccctcctcctcctggctaccaccagaatggagtcatccggaaccagtatgtgccctacccccacgcccctggcagccagaggagcaaccagaagagcctgtacacctccatggcccggccccccctgccccggcagcagagcaccagcagtgacagagtgtcccagaccccagagagcctggacttcctgaaggtgcctgaccagggcgccgccggcgtgcggcggcagaccaccagccggcccccacctgctgggggccggcccaagccccagcccaagcccaagccccaggtgccccagtgcaaggccctgtatgcctatgatgcccaggacacagatgagctgtccttcaatgccaatgacatcatcgacatcatcaaggaggaccccagcggctggtggacaggccgcctgcggggcaagcagggcctcttccccaacaactacgtgaccaagatctag
